United States Patent Application Publication US 2023/0272434 A1 - sequence listing, part 16

SEQ ID NO: 26643 - protein, 937 aa, Dermanyssus gallinae
MNSKPPKPNPDHLQTRPQLTFICDVCRKSVKSLRGLHIHKTRVHGGQTHTHSFDRPPDGSAPHTSTQDQRDPADITSDNDPKMFTRILARARKSTKLVRIIPREVREICCAAYAEALSHFNSRLDAESWHRLMTLPTLMLHIPELKNNDITLCQVIRKNIKDSQWKTLDNFSDRPHHSLTQSRKEHLTDRQIAARAERKLAEGDIRSAARTLLSTESFALPDVRTTQELRSKHPSPSAHVRNRLINFEQPPTDEPFIVPAQLVVNAVSSFSLASGPGLDGLRPRHLRYMLDSTIPSSERLLAELRCLTNLTLSGRLPSFCHPIFYGADLTALKKKDGSIRPIACGLTLRRLVAKVAIAINRTAIVKAVAPHQVGVSVNGGAEAAAHATRAFTEAEGPPRVLVKLDFRNAFNTIRRDVILNEVKAKVPQMFRLAWQSYGTPSLLSWGESEPLLSANGVQQGDPIGPALFSLGISGLVSRMKSPLNVWYLDDGILGGPANIVASDIREVLQFAEEGGLTLNASKCEVIAVGGTSHQQDEACKLIADALPATKIIELPDLEVLGAPIGSRKISKTILDKRDALRCIKTRLLAMHAQATICLWRYSLGSPRLNYILRTSPTSHHCDNLQAFDEVAKEILSEVLNVALTDRSWERATLPLSEGGLRLRSVAELASLCYAASIIEFSGLAETLLEPDVHSVLRGRRDETELAARQAIGPGPWEQHPTQHMLDSYKCQTTARTILDGIQSPTERAVFIAARDTFSSGFLRALFSSQLGTMLDNTSFRMVAALRIGAPICEPYECKACGKTVDEDGLHPLSCTKSPGRAPRHAEINAILKKALRRAGIPSTLEPRLGLEDDKRPDGVTTPPWSNGNCLVWDATVSCTVAPSYLMHSAIRSGWVAEHAEIAKKRKYSDLERRYHFVPVAMETMGPISKSTVSSSKT

SEQ ID NO: 26644 - protein, 981 aa, Dermanyssus gallinae
MNERIRTISNNKNNNNNHLQTRPQLTFICDVCRKSVKSLRGLHIHKTRVHGGQTHTHSFDRPPDGSAPHTSIQDQRDPADITSDNDPKMFTRILARARKSTKLVRIIPRGVREVCCAAYAEALSHFNSRLDAESWHRLMTFPTLMLHIPELKSNDLTLCQVIRKNITDSQWKTLDNLSDRPHHSLTQSRKENLTDRQIAARAERKLAEGDIRSARTLLSTESFALPDDRTTQELRSKHPSPPAHVRDRLINFEQPASDEPFIVPAQLVVNALRSFSLASGPGLDGLRPRHLRDMLDSTIPSSERLLAELRCLTNLTLSGRLPSFCHPIFYGADLTALKKKDGSIRPIACGLTLRRLVAKVAIAINRTAIVKAVAPHQVGVSVKGGAEAAAHATRAFTEAEGPPRVLVKLDFRNAFNTIRRDVILNEVKAKVPQMFRLAWQSYGTPSLLSWGESDPLLSANGVQQGDPIGPALFSLGISGLVSRMKSPLNVWYLDDGILGGPANIVASDIREVLQFAEEGGLTLNASKCEVIAVGGASHQQDEACKLIADALPGTKIIELPDLEVLGAPIGSRKISKTILDKRDALRCIKTRLLAMHAQATLCLWRYSLGSPRLNYILRTSPTGHHCDSLQAFDEVAKEILSEVLNVALTDRSWERATLPLSEGGLGLRSVADLASLCYAASIIEFSGLAETLLEPDVHSVLRGRRDEAELAARQAIGPGPWEQHPTQHMLDSYKCQTTARKILDDIQSPTERAVFIAARDTFSSGFLRALPSSQLGTMLDNTSFRMVAALRIGAPICEPYECKACGKTVDEDGLHPLSCTKSPGRASRHAEINAILKKALRRAGIPSTLEPRLGFEDDKRPDGVTIPPWSNGKCLVWDATVSCTVAPSYLMHSAIRSGWVAEHAEIAKKRKYSDLGRRYHFVPVAMETMGPISKSTSILLKDLGVKISANTGDQLEGEFLRQQLSLAVCRGNAAAIIGSMD

SEQ ID NO: 26645 - protein, 937 aa, Dermanyssus gallinae
MVIIMIIIIIIIIIIIIIIIIIIIIPVQDEINPADITLDNEPVIFTRLLARVRKSTKLVRIIPRGVREICCAAYAEALSHFNSRLDAASWRRLMTLPTLMLHIPERKSNDSTLCQIIRKNITESRWRTLDNLPNGQHHSLTQSRKDHLSDRQIAARAERKLAEGDIRSAARTLYSTESFALPDDHTTQELRSKHPSPPAHVRDRLINFEQPPSEEPFIVPAQFVVNAVRSFSLASGPGLDGLRPRHLRDMLDSTIPSSEKLLAELRSLTNLTLSGRLPSFCHPIFYGADLTALKKKDGSIRPIACGLTLRRLVAKVAISINRTAIVKAVTPHQVGVSVKGGAEAAAHATRAFTEAEGPPRVLVKLDFQNAFNTIRRDVILSEVKAKVPQMFRLAWQSYGTPSLLSWGESEPLLSANGVQQGDPIRPALFSLGISGLVSRMRSPLNVWYLDDGILGGPASVVASDIREVLQFAEEGGLTLNASKCELIAVGGTSHEQEEACKIIADALPGTKRIELPHLEVLGAPIGSQKISRTIQDKRDALRSIKTRLLAMHSQATLCLWRYSLGLPRLNYILRTSPTGQNCDNLQAFDEVARETLSEVLNVPLTDRSWKRATLPLSEGGLGLRSVADLAPLCYAASLIEFSGLAETLLEPHVCSVLRATRDEAELAARQSIGPGPWEQHPTQHILDGYKCQTTARKILDDTQSPTERAVFIAARETFSSGFLRALPSSQLGTMLENTSFRMVAALRIGAPICEPYECRACGKTVDKDGLHPLSCSKSPGRTLRHAEINAVLKKALRRAGIPSTLEPRLGFEDDKRPDGVTIPPWSKGKCLVWDATVSCTVAPSYLMHSATRSGWVAEHAEIAKKRKYSDLEKRYHFVPVAMETMGPISKNTSIFLKDLGIKISANTGDQREGEFLRQQLSLAVCRGNAAAVIGSMD

SEQ ID NO: 26646 - protein, 976 aa, Dermanyssus gallinae
MNSKPPKPNPDYLQTRPQLKFICEVCRKSVKSLRGLHIHKTRVHGGQTHTHSFDRPPDGSAPHTSTQDQRDPADITSDNDPKMFTRILVRARKSTKLVRIIPRGVREICCAAYAEALSHFNSRLDAESWHRLMTLPTLMLHIPELKSNDITLCQVIRKNITDFQWKTLDNLSDRPHHSLTQSRKEHLTDRQIAARAERKLAEGDIRSAARTLLSAESFALPDDRTTQELRSKHPSPPAYVRDRLINFEQPPTDEPFIVPAQLVVNAVRSFSLASGPGLDGLRPRHLRDMLDSTIPSSERLLAELRCLTNLTLSGRLPSFCHPIFYGADLTALKKKDGSIRPIACGLTLRRLVAKVAIAINRTAIVKAVAPHQIGVSVKGGADAAAHATRAFTEAEGPPRVLVKLDFRNAFNTIRRDVILNEVKAKVPQMFRLAWQSYGTPSLLSWGEKKPLLSANGVQQGDPIGPALFSLGISGLVSRMKSSLNVWYLDDGILGGPANIVASDIREVLQFAEEGGLTLNASKCEVIAVGGTSHQQAEACKLIADALPGTKIIELPDLEVLGAPIGSRKISKTILDKRDALRCVKTRLLAMHAQATLCLWRYSLGLPRLNYILRTSPTGHHCDNLQAFDEVAKEILSEVLNVALTDRSWERATLPLSEGGLGLRSVAELASLCYAASNIEFSGLAETLLEPDVHSVLRGRRDKAELAARQAIGPGPWEQHPTQHMLDSYKCQTTARTILDDIQSPTERAVFIAARDTFSSGFLRALPSSQLGTMLDNTSFRMVAALRIGAPICEPYEYKACGKTVDEDGLHPLSCTKSPGRAPRHAEINAILKKALRRAGIPNTLEPRLGLEDDKRPDGVTIPPWSNGKCLVWDATVSCTVAPSYVMHSAIRSGWVAEHAEIAKKRKYSDFGRRYHFVPVAMETMGRISKSTSILLKDLGVKISANTGDQREGEFLRQQLSLAVCRGNAAAIIGSMD

SEQ ID NO: 26647 - protein, 894 aa, Dermanyssus gallinae
MFTRILARARKSTKLVRIIPRGVRQICCAAYAEALSHFNSRLDAESWHRLMTLPTFMLHIPELKSNDITLCHVIRKNITDSQWKTLDNLSDRPHHSLTQSRKKHLTDRQIAARAECKLAEGDIRSAARTLLSTESFALPDDRTTQELRSKHPSPPAHVRDRLISFEQPPTDEPFIVPAQLVVNAVRSFSLASGPGLDGLRPVHLRDMLDSTIPSSERLLAELRCLTNLTLSGRLPSFCHPIFYGADLTALKKKDGSIRPIACGLTLRRLVAKVAIAINRTAIVKAVAPHQVGVSVKGGAEAAAHATRAFTEAEGPPRVLVKLDFRNAFNTIRRDVILNEVKAKVPQMFRLAWQSYGTPSLLSWGESEPLLSANGVQQGDPIGPALFSLGISGLVSRMKSPLNVWYLDDGILGGPANIVASDIREVLQFAEEGGLTLNASKCEVIAVGGTSHQQDQACKLIADALPGTKIIELPDLEVLGAPIGSRKISKTILDKRDALRCIKTRLLAMHAQATLCLWRYSLGSPRLNYILRTSPTGHYCDNLQAFDEVAKEILSEVLNVALTDRSWERATLPLSEGGLGLRSVADLASLCYAASIIEFSGLAETLLEPDVHSVLRGRRDEAELAARQAIGPGPWEQHPTQHMLDSYKCQTTARKILDDIQSPTDRAVFIAARDTFSSGFLRALPSSQMGTMLDNTSFRMVAALRIGAPICEPYECKACGKTVDEDGLHPLSCTKSPGRAFRHAEINAILKKALRRAGIPSTLEPRLGFEDDKRPDGVTIPPWSNGKCLVWDATVSCTVAPSYLMHSAIRSGWVAEHAEIAKKRKYSDLERRYHFVPVAMETMGPISKSTSILLKDLGVKISANTGDQREGEFLRQQLSLAVCRGNAAAIIGSMD

SEQ ID NO: 26648 - protein, 976 aa, Dermanyssus gallinae
MNSKPPKPNPDHLQTRPQLTFICDVCRKSVKSLRGLHIHKTRVHGGQTHTHSFDRPPDGSAPHTSTQDQRDPADITSDNDPKMFTRILARARKSTKLVRIIPRGVREICCAAYAEALSHFNSRLDAESWHRLMTLPTLMLHIPELKSNDITLCQVIRKNITDSQWKTLDNLSDRPHHSLTQSRKEHLTDRQIAARAERKLAEGDIRSAARTLLSTESFALPDDRTTQELRSKHPSPPAHVRDRLINFEQPPTDEPFIVPAQLVVDAVRSFSLASGPGLDGLRPRHLRDMLDSTIPSSERLLAELRCLTNLTLSGRLPSFFHPIFYGADLTALKKKDGSIRPIACGLTLRRLVAKVAIAINRTAIVKAVAPHQVGVSVKGGAEAAAHATRAFTEAEGPPRVLVKLDFRNAFNTIRRDVILNEVKAKVPQMFRLAWQSYGTPSLLSWGESEPLLSANGVQQGDPIGPALFSLGISGLVSRMKSPLNVWYLDDGILGGPANIVASDIREVLQFAEEGGLTLNASKCEVIAVGGTSHQQDEACKLIADALPGTKIIELPDLEVLGAPIGSRKISKTILDKRDALRCIKTRLLAMHAQATLCLWRYSLGSPRLNYILRTSPTSHHCDNLQAFDEVAKEILSEVLNVALTDRSWERATLPLSEGGLGLRSVAELASLCYAASIIEFSGLAETLLEPDVHSVLRGRRDEAELAARQAIGPGPWEQHPTQHMLDSYKCQTTARTILDNIQSPTERAVFIAAPDTFSSGFLRALPSSQLGTMLDNTSFRMVAALRIGAPICEAYECKACGKTVDEDGLHPLSCTKSPGRAPRHAEINAILKKALRRAGIPSTLEPRLGLEDDKRPDGVTIPPWSNGKCLVWDATVSCTVAPSYLMHSAIRSGWVAEHAEIAKKRKYSDLGRRYHFVPVAMETMGPISKSTSILLKDLGVKISANTGDQREGEFLRQQLSLAVCRGNAAAIIGSMD

SEQ ID NO: 26649 - protein, 894 aa, Dermanyssus gallinae
MFTRLLARVRKSTKLVRIIPRGVREICCAAYAEALSHLNSRLDAESWHRLITLPTFMLHIPELKSNDITLCQVIRKNITDSQWKTLDNLSDRPHHSLTQSRKEHLTDRQIAARAERKLAEGDIRSAARTLLSTESFALPDDHTTEELRSKHPSPPAHVRERLINFEQPPTDEPFIAPAQLVVNAVRSFSIASGPGLDGLRPRHLRDMLDSTIPSSERLLAELRCLTNLALSGRLPSFCHPIFYGADLTALKKKDGSIRPIACGLTLRRLVAKVAIAINRTAIVKAVAPHQVGVSVKGGAEAAAHATRAFTEAEGPPRVLVKLDFRNAFNTIRRDVILNEVKAKVPQMFRLAWQSYGAPSLLSWGESEPLLSANGVQQGDPIGPALFSLGISGLVSRIKSPLNVWYLDDGKLGGPANIVASDIREVLQFAEEGGLTLNASKCEVIAVGGTSHQQDEACKLIANALPGTKIIELPDLEVLGAPIGSRKISKTILDKRDALRCIKTRLLAMHAQATLCLWRYSLGSPRLNYILRTSPTGHHCDKLQAFDEVAKEILSEVLNVALTDRSWERATLPLSEGGLGLKSVAELASLCYAASIIEFSGLAETLLEPDVHSVLRERRDEAELAARQSIGFGPWEQHPTQHMLDSYMCQTTARTILDDIQFPTERAVFIAARDTSSSGFLRALPSSQLGTMLDNTSFRMVTALRIGAPICEPYECKACGKTVDEDGLHPLSCTKSPGRAPRHAKINAILKKALRRAGIPSTLEPRLGLKDDKRPDGITTPPWSNGKCLVWDATVSCTVAPSYLMHSAIRSGWVAEHAEIAKKRKYFDLGRRYHFVPVAMETMGPISKSTSILLKDLGFKISANTGDQREGEFLRQQLSLAVCRGNAAAIIGSMY

SEQ ID NO: 26650 - protein, 976 aa, Dermanyssus gallinae
MNSKLPKPNPDHLQTRPQLTFICDVCRKSVRSLRGLHIHKTRVHGGQTHTHSFDRPPDGSAPHTSTQDQRDPADITSDNDPKMFTRILARARKSTKLVRIIPRGVREICCAAYAEALSHFNSRLDAESWHRLMPLPTLMLHIPKLKSNDITLCQVIRKNITDSQWKTLDNLSDRPHHSLTQSRNEHLTDRQIAARAERKLAEGDIRSAARTLLSTESFALPDDRTTQELRSKHPSPPAHVRDRLINFEQPPTDETFIVPAQLVVNAVRSFSLASGPGLDGLRPRHLRDMLDSTIPSSERLLAELRCLTNLTLSGRLPSFCHPIFYGADLPALKKKDGSIRPIACGLTLRRLVAKVAIAINRTAIVKAVAPHQVGVSVKGGAEAAAHATRAFTEAEGPPRVLVKLDFRNAFNTIRRDVILNEVKAKVPQMFRLAWQSYGTPSLLSWGEGEPLLSANGVQQGDPIGPALFSLGISGLVSRMKSPLNVWYLDDGILGGPANIVASDIREVLQFAGEGGLTLNASKCEVIAVGGTSHQQDEACKLIADALPGTKIIELPDLEVLGAPIGSRKISKTILDKRDALRCIKTRLLAMHAQATLCLWRYSLGSPRLNYILRTSPTGHHCDNLQAFDEVAKEILSEVLNVVLTDRSWERATLPLSEGGLGLRSVADLASLCYAASIIEFSGLAETLLEPDVYSVLRGRRDKAELAARQAIGPGPWEQHPTQHMLDSYKCQTTARKILDDIQSPTERAVFIAARDTFSSGFLRALPSSQLGTMLDNTSFRMVAALRMGAPICEPYECKACGKTVDEDGLHPLSCTKSPGRASRHAEINAILKKALRRAGIPSTLEPRLGFEDDKRPDGVTIPPWSNGKCLVWDATVSCTVAPSYLMHSAIRSGWVAEHAEIAKKRKYSDLGRRYHFVPVAMETMGPISKSTSILLKDLGVKISANTGDQREGEFLRQQLSLAVCRGNAAAIIGSMD

SEQ ID NO: 26651 - protein, 976 aa, Dermanyssus gallinae
MNSKLPKPNPDHLQTRPQLTFICDVCRKSVKSLRGLHIHKTRVHGGQTHTHSFDRLPDGSAPHTSTQDQRDPADITSDNDPKMFTRILARARKSTKLVRIIPRGVREICCAAYAEALSHFNSRLDAESWHRLMTLPTLMLHIQELKSNDITLCQVIRKNITDSQWKTLDNLSDRPHHSLTQSRKEHLTDRQIAARAERKLAEGGIRSAARTLLSTESFALPDDRTTQELRSKHPSPLAHVRDRLINFEQPPTDEPFIVPAQLVVNAVRSFSLASGPGLDGLRPQHLRDMLDSTIPSSERLLAELRCLTNLTLSGRLPSFCHPIFYGADLTALKKKDGSIRPIACGLTLRRLVAKVAIAINRTAIVKAVAPHQVGVSVKGGAEAAAHATRAFTEAEEPPRVLVKLDFRNAFNTIRRDVILNEVKAKVPQMFRLAWQSYGTPSLLSWGESEPLLPANGVQQGDPIGPALFSLGISGLVSRMKSPLNVWYLDDGILGGPANIVASDIREVLQFAEEGGLTLNASKCEVIAVGGTSHQQDEACKLIADALPGTKIIELTDLEVLGTPIGSRKISKTILDKRDALRCIKTRLLAMHAQATLCLWRYSLGSPRLNYILRTSPTGHHCDNLQAFDEVAKEILSEVLNVALTDRSWERATLPLSEGGWGLRSVADLASLCYAASIIEFSGLAETLLEPDVHSVLRGRRDEAELAARQAIGPGPWEQHPTQHMLDSYKCQTTARKILDDIQSPTERAVFIAARDTFSSGFLSALPSSQLGTMLDNTSFRMVAALRIGAPICEPYECKACGKTVDEDGLHPLSCTKSPGRASRHAEINAILKKALRRAGIPSTLEPRLGFKDDKRPDGVTIPPWSNGKCLVWDAKVSCTVAPSYLMHSAIRSGWVAEHAEIAKKRKYSDLGRRYHFVPVAMETMGPISKSTSILLKDLGVKISANTGDQREGEFLRQQLSLAVCRGNAAAIIGSMD

SEQ ID NO: 26652 - protein, 976 aa, Dermanyssus gallinae
MNSKPPKPNPDHLQTRPQLTFICDVCRKSVKSLRGLHIHKTRVHGGQTHTHSFDRPPDGSAPHTSTQDQRDPADITSDNDPKTFTRILARARKSTKLVRIIPRGVREICCAAYAEALSHFNSRLDAESWHRLMTLPTLMLHIPELKSNDITLCQVIRKNITDSQWKTLDNLSDRPHHSLTQSRKEHLTDRQIVARAERKLAEGDIRSAARTLLSTESFALPDDRTTQKLRSKHPSPPAHVRDRLINFEQPPTDEPFIVPAQLVVNAVRSFSLASGPGLDGLRPRHLRDMLDSTIPSSERLLAELRCLTNLTLSGRLPSFCHPIFYGADLTALKKKDGSIRPIACGLTLRRLVAKVAIAINRTAIVKAVAPHQVGVSVKGGAEAAAHATRAFTEAEGPPRVLVKLDFRNAFNTIRRDVILNEVKAKVPQMFRLAWQSYGTPSLLSWGESEPLLSANGVQRGDPIGPALFSLGISGLVSRMKSSLNVWYLDDGILGGPANIVASDIREVLQFAEEGGLTLNASKCEVIAVGGTSHQQDEACKLIADALPGTKIIELPDLEVLGAPIESRKISKTILDKRDALRCIKPRLLAMHAQATLCLWRYSLGSPRLNYILRTSPTGHHCDNLQAFDEVAKEILSEVLNVGLTDRSWKRATLPLSEGGLGLRSVAELASLCYAASIIEFSGLAETLLEPDVHSVLRGRRDEAELAARQAIGPGPWEQHPTQHMLDSYKCQTIARTILDDIQSPTERAVFIAACDTFSSGFLRALPSSQLGTMLDNTSFRMVAALRIGAPICEPYECKACGKTVDEDGLHPLSCTKSPGRAPRHAEINAILKKALRRAGIPSTLEPRLGLEDDKRPDGVTIPPWSNGKCLVWDATVSCTVAPSYLMHSAIRSGWVAEHAEIAKKRKYSDLGRRYHFVPVAMETMGPISKSTSILLKDLGVKISANTGDQREGEFLRQQLSLAVCRGNAAAIIGSMD

SEQ ID NO: 26653 - protein, 975 aa, Dermanyssus gallinae
MNSKPPQLNPDQPQTRPQQAIICDVCRKPLRSLRGLHIHKTRVHGEQTHAPSVGRLPDDSAPDTSVQDEINPADITLDNEPVIFTRLLARVRKSTKLVRIIPRGVREICCAAYAEALSHFNSRLDAASWRRLMTLPTLMLHIPERKINDSTLCQIIRKNITESRWRTLDNLPNGQHHSLTQSRKDHLSDRQIAARAERKLAEGDIRSAARTLYSTESFALPDDHTTQELRSKHPSPPAHVRDRLINFKQPPSEEPFIVPAQFVVNAVRSFSLASGPGLDGLRPRHLRDMLDSTIPSSEKLLAELHSLTNLTLSGRLPSFCHPIFYGADLTALKKKDGSIRPIACGLTLRRLVAKVAISINRTAIVKAVTPHQVGVSVKGGAEAAAHATRAFTEAEGPPRVLVKLDFQNAFNTIRRDVILSEVKAKVPQMFRLAWQSYGKPSLLSWGESEPLLSANGIQQGDPIGPALFSLGISGLVSRMRSPLNVWYLDDGILGPANVLASDIREVLQFAEEGGLTLNASKCELIAVGGTSHEQEEACKIIADALPGTKRIELPHLEVLGAPVGSRKISRTIQDKRDALRSIKTRLLAMHSQATLCLWRYSLESPRLNYILRTSPTGQNCDNLQAFDEVARETLSEVLNVALTDRSWKRATLPLSEGGLGLRSVADLAPLCYAASLIEFSGLAETLLEPHVCSVLRATRDEAELAARQSIGPGPWEQHPTQHILDGYKCQTTARKILDDTQSATERAVFIAARETFSSGFLRALPSPQLGTMLENTSFRMVAALRIGAPICEPYECRACGKTVDKDGLHPLSCSKSPGRTLRHAEINAVLKKALRRAGIPSTLEPRLGFEDDKRPDGVTIPPWSKGKCLVWDATVSCTVAPSYLMHSATRSGWVAEHAEIAKKRKYSDLEKRYHFVPVAMETLGPISKNTSIFLKDLGIKISANTGDQREGEFLRQQLSLAVCRGNAAAVIGSMD

SEQ ID NO: 26654 - protein, 954 aa, Dermanyssus gallinae
MNSEPPQPNPDQPQTRPQQAFICDVCRKPLRSLRGLHIHKTRVHGEQTHAPSVGRLPDDSAPDTSVQDEINPADITLDNEPVIFTRLLARVRKSTKLVRIIPRGVREICCAAYAEALSHFNSRLDAASWRRLMTLPTLMLHIPERKSNDSTLCQIIRKNITESRWRTLDNLPNGQHHSLTQSRKDHLSDRQIAARAERKLAEGDIRSAARTLYSTESFALPDDHTTQELRSKHPSPPAHVRDRLINFEQPPSEEPFIVPAQFVVNAVRSFSLASGPGLDGLRPRHLRDMLDSTIPSSEKLLAELRSLTNLTLSGRLPSFCHPIFYGADLTALKKKDGSIRPIACGLTLRRLVAKVAISINRTAIVKAVTPHQVGVSVKGGAEAAAHATRAFTEAEGPPRVLVKLDFQNAFNTIRRDVILSEVKAKVPQMFRLAWQSYGTPSLLSWGESEPLLSANGVQQGDPIGPALFSLGISGLVSRMRSPLNVWNLDDGILGGPASVVASDIREVLQFAEEGGLTLNASNALPGTKRIELPHLEVLGAPIGSQKISRTIQDKRDALRSIKTRLLAMHSQATLCLWRYSLGLPRLNYILRTSPTGQNCDNLQAFDEVARETLSEVLNVPLTDRSWKRATLPLSEGGLGLRSVADLAPLCYAASLIEFSGLAETLLEPHVCSVLRATRDEAELAATQSIGPGPWEQHPTQHILDGYKCQTTARKILDDTQSPTERAVFIAARETFSSGFLRALPSSQLGTMLENTSFRMVAALRIGAPICEPYECRACGKTVDKDGLHPLSCSKSPGRTLRHAEINAVLKKVLRRAGIPSTLEPRLGFEDDKRPDGVTIPPWSKGKCLVWDATVSCTVAPSYLMHSATRSGWVAEHAEIAKKRKYPDLEKRYHFVPVAMETMGPISKNTSIFLKDLGIKISANTGDQREGEFLRQQLSLAVCRGNAAAVIGSMD

SEQ ID NO: 26655 - protein, 945 aa, Dermanyssus gallinae
MSTQPLLQENPLQSQPRSQQPYICDVCGKSIQSIRGLRMHKTRLHRTNPQPLPTVPPLNNSENQVGNIVTTYDPDPQTLVTLLARARKDAKLIRIIPRGVREVCCAAYTEALANFNSKQDNASWVRLVTLPTLMLRTPERKAKDTTLCQIIRKNLVDAQWKRLENLLAEQSRSTPKNSEKQYTDRDRAATAERKLAEGDVRSAARSLLSTDSFAPLNSHTEQELRDKHPRPTDSVRERLNNFQAPVPAQACFVPEKCITDAARSFSLASGPGLDGLRPRHLLDMLDSTVPSSGRLAKELRSLASSALGGNLPHFCIPIFYGANLTALKKKDGSIRPIACGLTIRRLALKGGAEAAVHAVRAFVEAEGPVQVLVKLDFRNAFNTIRRDVVLDEVRLKVPQLLPLAWQSYKEPTLLSWDEKAPLLSSSGVQQGDPLGPALFSLGVSSLVARMKSPLNVWYLDDATIGGPLDLVVGDIINVLNFAEEGGLSLNASKCEVITLGGNAQEQDDIFRAISNVLPESRRVDLEELELLGAPISLRSISKTLKEKCTGLKQIRSRLTAMHSQAALCIWRYSLGSPKLNYTLRTSPAIKCHEDLQAYDDTARSILGEVLNVDLHDDTWKRATLPIAEGGLGIRSAAELAPMCYAASLLEFGKLAKTLVEPDIRQGITRAKDAAELIARQTIGPGPWQERPTQHTLDSYRCSAAARELLDNLQSPVEKAVFLAARDTFSGGFLKCLPFLGTMLDNTSFRMVTALRIGAPVCNPYSCRACGTTVTEDGLHPLSCIKSHGRVSRHAEINAIIRRALRKAGIPSTLEPRLGLYDDKRPDGVTIPLWANGRCLVWDATVSCTVAPSYIRHSSLEAGWVAERADNGKKRKYQELETSYIVVPISMETMGPVSKGTKRFISELGQRITDLTGNRREGEFLRQLLSLAVCRGNAGCIVGSME

SEQ ID NO: 26656 - protein, 971 aa, Dermanyssus gallinae
MSTQPLLQENPLQSQPRSQQPYICDVCGKSIQSMRGLRMHKTRLHRTNPQPLPTVPPLNNSENQVGNIVTTYDPDPQTLVTLLARARKDAKLIRIIPRGVREVCCAAYTEALANFNSKQDNASWVRLVTLPTLMLRIPERKAKDTTLCQIIRKNLVDTQWKRLENLFAEQSRSTRKNSEKQYTDRDRAATAERKLAEGDVRSAARSLLSTDSFAPLNSHTEQELRDKHPRATDSVRERLNNFQAPVPAQACLVPEKCITDAARSFSLASGPGLDGLRPRHLLDMLDSTVPSSGRLVEELRSLASSALGGNLPHFCIPIFYGANLTALKKKDGSIRPIACGLTIRRLVAKVAIAITRTTIVTAISPSQIGVAVKGGAEAAVHAVRAFVEAEGPVRVLVKLDFRNAFNTIRRDVVLDEVRLKVPQLLPLAWQSYKEPTLLSWDEKAPLLSSSGVQQGDPLGPALFSLGVSSLVARMKSPLNVWYLDDATIGGPLDLVVGDIINVLNFAEEGGLSLNASKCEVITLGGNAQEQDEIFRAVSNVLPESRRVDLDELELLGAPISLRSISKTLKEKCTGLKQIRSCLTAMHSQAALCIWRYSLGSPKLNYTLRTSPAIKCHEDLQAYDDTARSILGEVLNVDLHDDTWKRATLPIAEGGLGIRSAAELAPMCYAASLLEFGKLAKTLAEPDIRQGITRAKDAAELIARQTIGPGPWQERPTQHTLDSYRCSAAARELLDNLQSPVEKAVFLAARDTFSGGFLKCLPSPQLGTMLDNTSFRMVTALRIGAPVCNPYSCRACGTTVTEDGLHPLSCIKSHGRVSRHAEINAIIRRALRKAGIPSTLEPRIGLHDDKRPDGVTIPLWANGRCLVWDATVSCTVAPSYIRHSSLEAGWVAERADNGKKRKYQELETSYIVVPISMETMGPVSKGTKRFISELGQRITDLTGNRREGEFLRQLLSLAVCRGNAGCIVGSME

SEQ ID NO: 26657 - protein, 971 aa, Dermanyssus gallinae
MSTQPLLQENPLQSQPRSQQPYICDVCGKSIQSMRGLRMHKTRLHRTNPQPLPTVPLLNNSENQVGNIVTTYDPDPQTLVTLLARARKDAKLIRIIPRGVREVCCAAYTEALANFNSKQDNASWVRLVTLPTLMLRIPERKAKDTTLCQIIRKNLVDTQWKRLENLFAEQSRSTRKNSEKQYTDRDRAATAERKLAEGDVRSAARSLLSTDSFAPLNSHTEQELRDKHPRPTDSVRERLNNFQAPVPAQACLVPEKCITDAARSFSLASGPGLDGLRPRHLLDMLDSTVPSSGRLVEELRSLASSALDGNLPHFCIPIFYGANLTALKKKNGSIRPIACGLTIRRLVAKVAIAITRTTIVTAISPSQIGVAVKGGAEAAVHAVRAFVEAEGPVRVLVKLDFRNAFNTIRRDVVLDEVRLKVPQLLPLAWQSYKEPTLLSWDEKAPLLSSSGVQQGDPLGPALFSLGVSSLVARMKSPLNVWYLDDATIGGPLDLVVGDIINVLNFAEEGGLSLNASKCEVITLGGNAQEQDEIFRAVSNVLPESRRVDLDELELLGAPISLRSISKTLKEKCTGLKQIRSCLTAMHSQAALCIWRYSLGSPKLNYTLRTSPAIKCREDLQAYDDTARSILGEVLNVDLHDDTWKRATLPISEGGLGIRSAAELAPMCYAASLLEFGKLAKTLVEPDIRQGITRAKDAAELIARQTIGPGPWQERPTQHTLDSYRCSAAARELLDNLQSPVEKAVFLAARDTFSGGFLKCLPSPQLGTMLDNTSFRMVTALRIGAPVCNPYSCRACGTTVTEDGLHPLSCIKSHGRVSRHAEINAIIRRALRKAGIPSTLEPRIGLHDDKRPDGVTIPLWANGRCLVWDATVSCTVAPSYIRHSSLEAGWVAERADNGKKRKYQELETSYIVVPISMETMGPVSKGTKRFISELGQRITDLTGNRREGEFLRQLLSLAVCRGNAGCIVGSME

SEQ ID NO: 26658 - protein, 971 aa, Dermanyssus gallinae
MSTQPLLQENPLQSQPRSQQPYICDVCGKSIQSMRGLRMHKTRLHRTNPQPLPTVPPLNNSENQVGNIVTTYDPDPQTLVTLLARARKDAKLIRIIPRGVREVCCAAYTEALANFNSKQDNASWVRLVTLPTLMLRIPERKAKDTTLCQIIRKNLVDTQWKRLENLFAEQSRSTRKNSEKQYTDRDRAATAERKLAEGDVRSAARSLLSTDSFAPLNSHTEQELRDKHPRATDSVRERLNNFQAPVPAQACLVPEKCITDAARSFSLASGPGLDGLRPRHLLDMLDSTVPSSGRLVEELRSLASSALGGNLPHFCIPIFYGANLTALKKKDGSIRPIACGLTIRRLVAKVAIAITRTTIVTAISPSQIGVAVKGGAEAAVHAVRAFVEAEGPVRVLVKLDFRNAFNTIRRDVVLDEVRLKVPQLLPLAWQSYKEPTLLSWDEKAPLLSSSGVQQGDPLGPALFSLGVSSLVARMKSPLNVWYLDDATIGGPLDLVVGDIINVLNFAEEGGLSLNASKCEVITLGGNAQEQDEIFRAVSNVLPESRRVDLDELELLGAPISLRSISKTLKEKCTGLKQIRSCLTAMHSQAALCIWRYSLGSPKLNYTLRTSPAIKCHEDLQAYDDTARSILGEVLNVDLHDDTWKRATLPIAEGGLGIRSAAELAPMCYAASLLEFGKLAKTLVEPDIRQGITRAKDAAELIARQTIGPGPWQERPTQHTLDSYRCSAAARELLDNLQSPVEKAVFLAARDTFSGGFLKCLPSPQLGTMLDNTSFRMVTALRIGAPVCNPYSCRACGTTVTEDGLHPLSCIKSHGRVSRHAEINAIIRRALRKAGIPSTLEPRIGLHDDKRPDGVTIPLWANGRCLVWDATVSCTVAPSYIRHSSLEAGWVAERADNGKKRKYQELETSYIVVPISMETMGPVSKGTKRFISELGQRITDLTGNRREGEFLRQLLSLAVCRGNAGCIVGSME

SEQ ID NO: 26659 - protein, 971 aa, Dermanyssus gallinae
MSTQPLLQENPLQSQPRSQQPYICDVCGKSIQSIRGLRMHKTRLHRTNPQPLPTVPPLNNSENQVGNIVTTYDPDPQTLVTLLARARKDAKLIRIIPRGVREVCCAAYTEALANFNSKQDNASWVRLVTLPTLMLRIPERKAKDTTLCQIIRKNLVDAQWKRLENLLAEQSRSTPKNSEKQYTDRDRAATAERKLAEGDVRSAARSLLSTDSFAPLNSHTEQELRDKHPRPTDSVRERLNNFQAPVPAQACLVPEKCITDAARSFSLASGPGLDGLRPRHLLDMLDSTVPSSGRLVKELRSLASSALGGNLPHFCIPIFYGANLTALKKKDGSIRPIACGLTIRRLVAKVAIAITRTTIVTAISPSQIGVAVKGGAEAAVHAVRAFVEAEGPVRVLVKLDFRNAFNTIRRDVVLDEVRLKVPQLLPLAWQSYKEPTLLSWDEKAPLLSSSGVQQGDPLGPALFSLGVSSLVARMKSPLNVWYLDDATIGGPLDLVVGDIINVLNFAEEGGLSLNASKCEVITLGGNAQEQDEIFRAISNVLPESRRVDLEELELLGAPISLRSISKTLKEKCTGLKQIRSRLTAMHSQAALCIWRYSLGSPKLNYTLRTSPAIKCHEDLQAYDDTARSILGEVLNVDLHDDTWKRATLPIAEGGLGIRSAAELAPMCYAASLLEFSKLAKTLVEPDIRQEITRAKDAAELIARQTIGPGPWQERPTQHTLDSYRCSAAARELLDNLQSPVEKAVFLAARDTFSGGFLKCLPSPQLGTMLDNTSFRMVTALRIGAPVCNPYSCRACGTTVTEDGLHPLSCIKSHGRVSRHAEINAIIRRALRKAGIPSTLEPRLGLHDDKRPDGVTIPLWANGRCLVWDATVSCTVAPSYIRHSSLEAGWVAERADNGKKRKYQELETSYIVVPISMETMGPVSKGTKRFISELGQRITDLTGNRREGEFLRQLLSLAVCRGNAGCIVGSME

SEQ ID NO: 26660 - protein, 971 aa, Dermanyssus gallinae
MSTQPLLQENPLQSQPRSQQPYICDVCGKSIQSIRGLRMHKTRLHRTNPQPLPTVPPLINSENQVGNIVTTYDPDPQTLVTLLARARKDAKLIRIIPRGVREVCCAAYTEALANFNSKQDNASWVRLVTLPTLMLRIPERKAKDTTLCQIIRKNLVDAQWKRLENLLTEQSRSTPKNSEKQYTDRDRAATAERKLAEGDVRSAARSLLSTDSFAPLNSHTEQELRDKHPRPTDSVRERLNNFQAPVPAQACLVPEKCITDAARSFSLASGPGLDGLRPRHLLDMLDSTVPSSGRLVKELRSLASSALGGNLPHFCIPIFYGANLTALKKKDGSIRPIACGLTIRRLVAKVAIAITRTTIVTAISPSQIGVAVKGGAEAAVHAVRAFVEAEGPVRVLVKLDFRNAFNTIRRDVVLDEIRLKVPQLLPLAWQSYKEPTLLSWDEKAPLLSSSGVQQGDPLGPALFSLGVSSLVARMKSPLNVWYLDDATIGGPLDLVVGDIINVLNFAEEGGLSLNASKCEVITLGGNAQEQDEIFRAISNALPESRRVDLEELELLGAPISLRSISKTLKEKCTGLKQIRSRLTAMHSQAALCIWRYSLGSPKLNYALRTSPAIKCHEDLQAYDDTARSILGEVLNVDLHDDTWKRATLPIAEGGLGIRSAAELAPMCYAASLLEFGKLAKTLVEPDIRQGITRAKDAAELIARQTIGPGPWQERPTQHTLDSYRCSAAARELLDNLQSPVEKAVFLAARDTFSGGFLKCLPSPQLGTMLDNTSFRMVTALRIGAPVCNPYSCRACGTTVTEDGLHPLSCIKSHGRVSRHAEINAIIRRALLKAGIPSTLEPRLGLHDDKRPDGVTIPLWVNGRCLVWDATVSCTVAPSYIRHSSLEAGWVAERADNGKKRKYQELETSYIVVPISMETMGPVSKGTKRFISELGQRITDLTGNRREGEFLRQLLSLAVCRGNAGCIVGSME

SEQ ID NO: 26661 - protein, 971 aa, Dermanyssus gallinae
MSTQPLLQENPLQSQPRSQQPYICDVCGKSIQSMRGLRMHKTRLHRTNPQSLPTVPPLNNSENQVGNIVTTYDPDPQTLVTLLARARKDAKLIRIIPRGVREVCCAAYTEALANFNSKQDNASWVRLVTLPTLMLRIPERKAKDTTLCQIIRKNLVDTQWKRLENLFAEQSRSTFKNSEKQYTDRDRAATAERKLAEGDVRSAARSLLSTDSFAPLNSHTEQELRDKHPRPTDSVRERLNHFQAPVPAQACLVPEKCITDAARSFSLASGPGLDGLRPRHLLDMLDSTVPSSGRLVEELRSLASSALGGNLPHFCIPIFYGANLTALKKKDGSIRPIACGLTIRRLVAKVAIAISRTTIVTAISPSQIGVAVKGGAEAAVHAVRAFVEAEGPVRVLVKLDFRNAFNTIRRDVVLDEVRLKVPQLLPLAWQSYKEPTLLSWDEKAPLLSSSGVQQGDPLGPALFSLGVSSLVARMKSPLNVWYLDDATIGGPLDLVVGDIINVLNFAEEGGLSLNASKCEVITLGGNAQEQDEIFRAVSNVLPESRRVDLDELELLGAPISLRSISKTLKEKCTGLKQIRSRLTAMHSQAALCIWRYSLGSPKLNYTLRTSPAIKCHEDLQAYDDTARSILGEVLNVDLHDDTWKRATLPIAEGGLGIRSAAELAPMCYAASLLEFGKLAKTLVEPDIRQEITRAKDAAELIARQTIGPGPWQERPTQHTLDSYRCSAAARELLDNLQSPVEKAVFLAARDTFSGGFLKCLPSPQLGTMLDNTSFRIVTALRIGAAVCNPYSCRACGTTVTEDGLHPLSCIKSHGRVSRHAEINAIIRRALRKAGIPSTLEPRLGLHDDKRPDGVTIPLWANGRCLVWDATVSCTVAPSYIRHSSLEAGWVAERADNGKKRKYQELETSYIVVPISMETMGPVSKGTKRFISELGQRITDLTGNRREGEFLRQLLSLAVCRGNAGCIVGSME

SEQ ID NO: 26662 - protein, 971 aa, Dermanyssus gallinae
MSTQPLFQENPLQSQPRSQQPYICDVCGKSIQSIRGLRMHKTRLHRTNPQPLPTVPPLNNSENQVGNIVTTYDPDPQTLVTLLARARKDAKLIRIIPRGVREVCCAAYTEALANFNSKQDNASWVRLVTLPTLMLRIPERKAKDTTLCQIIRKNLVDAQWKRLENLLAEQSRSTPKNSEKQYTDRDRAATAERKLAEGDVRSAARSLLSTDSFAPLNSHTEQELRDKHPRPTDSVRERLNNFQAPVPAQACLVPEKCITDAARSFSLASGPGLDGLRPRHLLDMLDSTVPSSGRLVKELRSLASSALGGNLPHFCIPIFYGANLTALKKKDGSIRPIACGLTIRRLVAKVAIAITRTTIVTAISPSQIGVAVKGGAEAAVHAVRAFVEAEGPVRVLVKLDFRNAFNTIRRDVVLDEVRLKVPQLLPLAWQSYKEPTLLSWDEKAPLLSSSGVQQGDPLGPALFSLGVSSLVARMKSPLNVWYLDDATIGGPLDLVVGDIINVLNFAEEGGLSLNASKCEVITLRGNAQEQDEIFRAVSNVLPESRRVDLEELELLGAPISLRSISKTLKEKCTGLKQIRSRLTAMHSQAALCIWRYSLGSPKLNYTLRTSPAIKCHEDLQAYDDTARSILGEVLNVDLHDDTWKRATLPIAEGGLGIRSAAELAPMCYAASLLEFGKLAKTLVEPDIRQGITRAKDAAELIARQTIGPGPWQERPTQHTLDSYRCSAAARELLDNLQSPVEKAVFLAARDTFSGGFLKCLPSPQLGTMLDNTSFRMVTALRIGAPVCNPYSCRACGTTVTEDGLHPLSCIKSHGRVSRHAEINAIIRRALRKAGIPSTLEPRLGLHDDKRPDGVTIPLWANGRCLVWDATVSCTVAPSYIRHSSLEAGWVAERADNGKKRKYQELETSYIVVPISMETMGPVSKGTKRFISELGQRITDLTGNRREGEFLRQLLSLAVCRGNAGCIVGSME

SEQ ID NO: 26663 - protein, 987 aa, Dermanyssus gallinae
MTCKIRIIIIIIIIIIIIIIIIIIIIIIIIIIISQQPYICDVCGKSIQSIRGLRMHKTRLHRTNPQPLPTVPPLNNSENQVGNIVTTYDPDPQTLVTLLARARKDAKLIRIIPRWVREVCCAAYTETLANFNSKQDNASWVRLVTLPTLMLRIPERKAKDTTLCQIIRKNLVDTQWKRLENLFAEQSRSTPKNSEKQYTDRDRAATAERKLAEGDVRSAARSLLSTDSFAPLNSHTEQELRDKHPRPTDSVRERLNNFQAPVPAQACLVPEKCITDAARSFSLASGPGLDGLRPRHLLDMLDSTVPSSGRLVEELRSLASSALGGNLPHFCIPIFYGANLTALKKKDGSIRPIACGLTIRRLVAKVAIAITRTTIVTAISPSQIGVAVKGGAEAAVHAVRAFVEAEGPVRVLVKLDFRNAFNTIRRDVVLDEVRLKVPQLLPLAWQSYKEPTLLSWDEKAPLLSSSGVQQGDPLGPALFSLGVSSLVARMKSPLNVWYLDDATIGGPLDLVVGDIINVLNFAEEGYLSLNASKCEVITLGGNAQEQDEIFRAVSNVLPESRRVDLDELELLGAPISLRSISKTLKEKCTGLKQIRSRLTAMHSQAALCIWRYSLGSPKLNYTLRTSPAIKCHEDLQAYDDTARSILGEVLNVDLHDDTWKRATLPIAEGGLGIRSAAELAPMCYAASLLEFGKLAKTLVEPDIRQGITRAKDAAELIARQTIGPGPWQERPTQHTLDSYRCSAAARELLDNLQSPVEKAVFLAARDTFSGGFLKCLPSPQLDTMLDNTSFRMVTALRIGAPVCNPYSCRACGTTVTEDGLHSLSCIKSHGRVSRHAEINAIIRRALRKAGIPSTLEPRLGLHDDKRPDGVTIPLWANGRCLVWDATVSCTVAPSYIRHSSLEAGWVAERADNGKKRKYQELETSYIVVPISMETMGPVSKGTKRFISELGQRITDLTGNRREGEFLRQLLSLAVCRGNAGCIVGSME

SEQ ID NO: 26664 - protein, 971 aa, Dermanyssus gallinae
MSTQPLLQENPLQSQPRSQQPYICDVCGKSIQSIRGLRMHKTRLHRTNPQPLPTVPPLNNSENQVGNIVTTYDPDPQTLVTLLARARKDAKLIRIIPRGVREVCCAAYTEALANFNSKQDNASWVRLVTLPTLMLRIPERKAKDTTLCQIIRKNLVDAQWKRLENLLAEQSRSTPKNSEKQYTDRDRAATAERKLAEGDVRSAARSLLSTDSFAPLNSHTEQELRDKHPRPTDSVRERLNNFQAPVPAQACLVPEKCITDAARSFSLASGPGLDGLRPRHLLDMLDSTVPSSGRLVKELRSLASSALGGNLPHFCIPIFYGANLTALKKKDGSIRPIACGLTIRRLVAKVAIAITRTTIVTAISPSQIGVAVKGGAEAAVHAVRAFVEAEGPVRVLVKLDFRNAFNTIRRDVVLDEVRLKVPQLLPLAWQSYKEPTLLSWDEKAPLLSSSGVQQGDPLGPALFSLGVSSLVARMKSPLNVWYLDDATIGGPLDLVVGDIINVLNFAEEGGLSLNASKCEVITLGGNAQEQDEIFRAVSNVLPESRRVDLEELELLGAPISLRSISKTLKEKCTGLKQIRSRLTAMHSQAALCIWRYSLGSPKLNYTLRTSPAIKCHEDLQAYDDTARSILGEVLNVDLHDDTWKRATLPIAEGGLGIRSAAELAPMCYAASLLEFGKLAKTLVEPDIRQGITRAKDAAELIARQTIGPGPWQERPTQHTLDSYRCSAAARELLDNLQSPVEKAVFLAARDTFSGGFLKCLPSPQLGTMLDNTSFRMVTALRIGAPVCNPYSCRACGTTVTEDGLHPLSCIKSHGRVSRHAEINAIIRRALRKAGIPSTLEPRLGLHDDKRPDGVTIPLWANGRCLVWDATVSCTVAPSYIRHSSLEAGWVAERADNGKKRKYQELETSYIVVPISMETMGPVSKGTKRFISELGQRITDLTGNRREGEFLRQLLSLAVCRGNAGCIVGSME

SEQ ID NO: 26665 - protein, 971 aa, Dermanyssus gallinae
MSTQPLLQENPLQSQPRSQQPYICDVCGKSIQSMRGLRMHKTRLHRTNPQPLPTVPPLNNSENQVGNIVTTYDPDPQTLVTLLARARKDAKLIRIIPRGVREVCCAAYTEALANFNSKQDNASWVRLVTLPTLMLRIPERKAKDTTLCQIIRKNLVDTQWKRLENLFAEQSRSTRKNSEKQYTDRDRAATAERKLAEGDVRSAARSLLSTDSFAPLNSHTEQELRDKHPRATDSVRERLNNFQAPVPAQACLVPEKCITDAARSFSLASGPGLDGLRPRHLLDMLDSTVPSSGRLVEELRSLASSALGGNLPHFCIPIFYGANLTALKKKDGSIRPIACGLTIRRLVAKVAIAITRTTIVTAISPSQIGVAVKGGAEAAVHAVRAFVEAEGPVRVLVKLDFRNAFNTIRRDVVLDEVRLKVPQLLPLAWQSYKEPTLLSWDEKAPLLSSSGVQQGDPLGPALFSLGVSSLVARMKSPLNVWYLDDATIGGPLDLVVGDIINVLNFAEEGGLSLNASKCEVITLGGNAQEQDEIFRAVSNVLPESRRVDLDELELLGAPISLRSISKTLKEKCTGLKQIRSCLTAMHSQAALCIWRYSLGSPKLNYTLRTSPAIKCHEDLQAYDDTARSILGEVLNVDLHDDTWKRATLPIAEGGLGIRSAAELAPMCYAASLLEFGKLAKTLVEPDIRQGITRAKDAAELIARQTIGPGPWQERPTQHTLDSYRCSAAARELLDNLQSPVEKAVFLAARDTFSGGFLKCLPSPQLGTMLDNTSFRMVTALRIGAPVCNPYSCRACGTTVTEDGLHPLSCIKSHGRVSRHAEINAIIRRALRKAGIPSTLEPRIGLHDDKRPDGVTIPLWANGRCLVWDATVSCTVAPSYIRHSSLEAGWVAERADNGKKRKYQELETSYIVVPISMETMGPVSKGTKRLISELGQRITDLTGNRREGEFLRQLLSLAVCRGNAGCIVGSME

SEQ ID NO: 26666 - protein, 971 aa, Dermanyssus gallinae
MSTQPLLQENPLQSQPRSQQPYICDVCGKSIQSIRGLRMHKTRLHRTNPQPLPTVPPLNNSENQVGNIVTTYDPDPQTLVTLLARARKDAKLIRIIPRGVREVCCAAYTEALANFNSKQDNASWVRLVTLPTLMLRIPERKAKDTTLCQIIRKNLVDAQWKRLENLLAEQSRSTPKNSEKQYTDRDRAATAERKLAEGDVRSAARSLLSTDSFAPLNSHTEQELRDKHPRPTDSVRERLNNFQAPVPAQACLVPEKCITDAARSFSLASGPGLDGLRPRHLLDMLDSTVPSSGRLVKELRSLASSALDGNLPHFCIPIFYGANLTALKKKDGSIRPIACGLTIRRLVAKVAIAITRTTIVTAISPSQIGVAVKGGAEAAVHAVRAFVEAEGPVRALVKLDFRNAFNTIRRDVVLDEVRLKVPQLLPLAWQSYKEPTLLSWDEKAPLLSSSGVQQGDPLGPALFSLGVSSLVARMKSPLNVWYLDDATIGGPLDLVVGDIINVLNFAEEGGLSLNASKCEVITLGGNAQEQDEIFRAISNVLPESRRVDLEELELLGAPISLQSISKTLKEKCTGLKQIRSRLTAMHSQAALCIWRYSLGSPKLNYTLRTSPAIKCHEDLQAYDDTARSILDEVLNADLHDDTWKRATLPIAEGGLGIRSAAELAPMCYAASLLEFGKLAKTLVEPDIRQGITRAKDAAELIARQTIGPGPWQERPTQHTLDSYRCSAAARELLDNLQSPVEKAVFLAARDTFSGGFLKCLPSPQLGTMLDNTSFRMVTALRIGAPVCNPYSCRACGTTVTEDGLHPLSCIKSHGRVSRHAEINAIIRRALRKAGIPSTLEPRLGLHDDKRPDGVTIPLWANGRCLVWDATVSCTVAPSYIRHSSLEAGWVAERADNGKKRKYQELETSYIVVPISMETLGPVSKGTKRFISELGQRITDLTGNRREGEFLRQLLSLAVCRGNAGCIVGSME

SEQ ID NO: 26667 - protein, 976 aa, Dermanyssus gallinae
MSTQPLLQENPLQSQLRSQQPYICDVCGKSIQSIRGLRMHKTRLHRTNPQPLPTVPPLNNSENQVGNIVTTYDPDPQTLVTLLARARKDAKLIRIIPRGVREVCCAAYTEALANFNSKQDNASWVRLVTLPTLMLRIPERKAKDTTLCQIIRKNLVDAQWKRLENLLAEQSRSTPKNSEKQYTDRDRAATAERKLAEGDVRSAARSLLSTDSFAPLNSHTEQELRDKHPRPTDSVRERLNNFQAPVPAQACLVPEKCITDAARSFSLASGPGLDGLRPRHLLDMLDSTVPSSGRLVKELRSLASSALGGNLPHFCISIFYGANLTALKKKDGSIRPIACGLTIRRLVAKVAIAITRTTIVTAISPSQIGVAVKGGAEAAVHAVRAFVEAEGPVRVLVKLDFRNAFNTIRRDVVLDEVRLKVPQLLPLAWQSYKEPTLLSWDEKAPLLSSSGVQQGDPLGPALFSLGVSSLVARMKSPLNVWYLDDATIGGPLDLVVGDIINVLNFAEEGGLSLNASKCEVITLGGNAQEQDEIFRAISNVLPESRRVDLEELELLGAPISLRSISKTLKEKCTGLKQIRSRLTAMHSQAALCIWRYSLGSPKLNYTLRTSPAIKCHEDLQAYDDTARSILGEVLNVDLHDDTWKRATLPIAEGGLGIRSAAELAPMCYAASLLEFGKLAKTLVEPDIRQGITRAKDAAELIARQTIGPGPWQERPTQHTLDSYRCSAAARELLDNLQSPVEKAVFLAARDTFSGGFLKCLPSPQLGTMLDNTSFRMVTALRIGAPICNPYSCRACGTTVTEDGLHPLSCIKSHGRVSRHAEINAIIRRALRKAGIPSTLEPRLGLHDDKRPDGVTIPLWANGRCLVWDATVSCSVAPSYIRHSSLEAGWVAERADNGKKRKYQELETSYIVVPISMETMGPVSKGTKRFISELGQRITDLTGNRREGEFSTATAVACCVPRKRRLYCRFHGIIFRS

SEQ ID NO: 26668 - protein, 971 aa, Dermanyssus gallinae
MSTQPLLQENPLQSQPRSQQPYICDVCGKSIQSMRGLRMHKTRLHRTNPQPLPTVPPLNNSENQVGNIVTTYDPDPQTLVTLLARARKDAKLIRIIPRGVREVCCAAYTEALANFNSKQDNASWVRLVTLPTLMLRIPERKAKDTTLCQIIRKNLVDTQWKRLENLFAEQSRSTRKNSEKQYTDRDRAATAERKLAEGDVRSAARSLLSTDSFAPLNSHTEQELRDKHPRATDSVRERLNNFQAPVPAQACLVPEKCITDAARSFSLASGPGLDGLRPRHLLDMLDSTVPSSGRLVEELRSLASSALGGNLPHFCIPIFYGANLTALKKKDGSIRPIACGLTIRRLVAKVAIAITRTTIVTAISPSQIGVAVKGGAEAAVHAVRAFVEAEGPVRVLVKLDFRNAFNTIRRDVVLDEVRLKVPQLLPLAWQSYKEPTLLSWDEKAPLLSSSGVQQGDPLGPALFSLGVSSLVARMKSPLNVWYLDDATIGGPLDLVVGDIINVLNFAEEGGLSLNASKCEVITLGGNAQEQDEIFRAVSNVLPESRRVDIDELELLGAPISLRSISKTLKEKCTGLKQIRSCLTAMHSQAALCIWRYSLGSPKLNYTLRTSPAIKCHEDLQAYDDTARSILGEVLNVDLHDDTWKRATLPIAEGGLGIRSAAELTPMCYAASLLEFGKLAKTLVEPDIRQGITRAKDAAELIARQTIGPGPWQERPTQHTLDSYRCSAAARELLDNLQSPVEKAVFLAARDTFSGGFLKCLPSPQLGTMLDNTSFRMVTALRIGAPVCNPYSCRACGTTVTEDGLHPLSCIKSHGRVSRHAEINAIIRRALRKAGIPSTLEPRIGLHDDKRPDGVTIPLWANGRCLVWDATVSCTVAPSYIRHSSLEAGWVAERADNGKKRKYQELETSYIVVPISMETMGPVSKGTKRFISELGQRITDLTGNRREGEFLRQLLSLAVCRGNAGCIVGSME

SEQ ID NO: 26669 - protein, 971 aa, Dermanyssus gallinae
MSTQPLLQENPLQSQPRSQQPYICDVCGKSIQSMRGLRMHKTRLHRTNPQPLPTVPPLNNSENQVGNIVTTYDPDPQTLVTLLARARKDAKLIRIIPRGVREVCCAAYTEALANFNSKQDNASWVRLVTLPTLMLRIPERKAKDTTLCQIIKKNLVDTQWKRLENLFAEQSRSTPKNSEKQYTDRDRAATAERKLAEGDVRSAARSLLSTDSFAPLNSHTEQELRDKHPRPTDSVRERLNNFQAPVPAQACLVPEKIITDAARSFSLASGPGLDGLRPRHLLDMLDSTVPSSGRLVEELRSLASSALGGNLPHFCIPIFYGANLTALKKKDGSIRPIACSLTIRRLVAKVAIAITRTTIVTAISPSQIGVAVKGGAEAAVHAVPAFVEAEGPVRVLVKLDFRNAFNTIRRDVVLDEVRLKVPQLLPLAWQSYKEPTLLSWDEKAPLLSSSGVQQGDPLGPALFSLGVSSLVARMKSPLNVWYLDDATIGGPLDLVVGDIINVLNFAEEGGLSLNASKCEVNTLGGNAQEQDEIFRAVSNVLPDSRRVDLDELELLGAPISLRSISKTLKEKCTGLKQIRSRLTAMHSQAALCIWRYSLGSPKLNYTLRTSPAIKCREDLQAYDDTARSILGEVLNVDLHDDTWKRATLPIAEGGLGIRSAAELAPMCYAASLLEFGKLAKTLVEPDIRQGITRAKDAAELIARQTIGPGPWQERPTQHTLDSYRCSAAARELLDNLQSPVEKAVFLAARDTFSGGFLKCLPSPQLGTMLDNTSFRMVTALRIGAPVCNPYSCRACGTTVTEDGLHPLSCIKSHGRVSRHAEINAIIRRALRKAGIPSTLEPRLGLHDDKRPDGVTIPLWANGRCLVWDATVSCTVAPSYIRHSSLEAGWVAERADNGKKRKYQELETSYIVVPISMETMGPVSKGTKRFISELGQRITDLTGNRREGEFLRQLLSLAVCRGNAGCIVGSME

SEQ ID NO: 26670 - protein, 971 aa, Dermanyssus gallinae
MSTQPLLQENPLQSQPRSQQPYICDVCGKSIQSIRGLRMHKTRLHRTNPQPLPTVPPLNNSENQVGNIVTTYDPDPQTLVTLLARARKDAKLIRIIPRGVREVCCAAYTEALANFNSKQDNASWVRLVTLPTLMLRIPERKAKDTTLCQIIRKNLVDAQWKRLENLLAEQSRSTPKNSEKQYTDRDRAATAERKLAEGDVRSAARSLLSTDSFAPLNSHTEQELRDKHPRPTDSVRERLNNFQAPVPAQACLVPEKCITDAARSFSLASGPGLDGLRPRHLLDMLDSTVPSSGRLVKELRSLASSALGGNLPHFCIPIFYGANLIALKKKDGSIRPIACGLTIRRLVAKVAIAITRTTIVTAISPSQIGVAVKGGAEAAVHAVRAFVEAEGPVRVLVKLDFRNAFNTIRRDVVLDEVRLKVPQLLPLAWQSYKEPTLLSWDEKAPLLSSSGVQQGDPLGPALFSLGVSSLVARMKSPLNVWYLDDATIGGPLDLVVGDIINVLNFAEEGGLSLNASKCEVITLGGNAQEQDEIFRAVSNVLPESRRVDLEELELLGAPISLRSISKTLKEKCTGLKQIRSRLTAMHSQAALCIWRYSLGSPKLNYTLRTSPAIKCHEDLQAYDDTARSILGEVLNVDLHDDTWKRATLPIAEGGLGIRSAAELAPMCYAASLLEFGKLAKTLVEPDIRQGITRAKDAAELIARQTIGPGPWQERPTQHTLDSYRCSAAARELLDNLQSPVEKAVFLAARDTFSGGFLKCLPSMQLGTMLDNTSFRMVTALRIGAPVCNPYNCRACGTTVTEDGLHPLSCIKSHGRVSRHAEINAIIRRALRKAGIPSTLEPRLGLHDDKRPDGVTIPLWANGRCLVWDATVSCTVAPSYIRHSSLEAGWVAERADNGKKRKYQELETSYIVVPISMETMGPVSKGTKRFISELGQRITDLTGNRREGEFLRQLLSLAVCRGNAGCIVGSME

SEQ ID NO: 26671 - protein, 798 aa, Dermanyssus gallinae
MLRIPERKAKDTTLCQIIIKNLVDAQWKRLENLLAEQSRSTPKNSEKQYTDRDRAATAERKLAEGDVRSAARSLLSTDSFAPLNSRTEQELRDKHPRPTDSVRERLNNFQAPVPAQACLVPEKCITDAARSFSLASGPGLDGLRPRHLLDMLDSTVPSSGRLVEELRSLASSALGGNLPHFCIPIFYGANLTALKKKDGSIRPIACGLTIRRLVAKVAIAITRTTIVTAISPSQIGVAVKGGAEAAVHAVRAFVEAEGPVRVLVKLDFRNAFNTIRRDVVLDEVRLKVPQLLPLAWQSYKKPTLLSWDEKTPLLSSSGVQQGDPLGPALFSLGVSSLVARMKSPLNVWYLDDATIGGPLDLVVGDIINVLNFAEEGGLSLNASKCEVITLRGNAQEQDEIFRAVSNVLPESRRVDLEELELLGAPISLRSISKTLKEKCTGLKQIRSRLTAMHSQAALCIWRYSLGSPKLNYTLRTSPAIKCHEDLQAYDDTARSILGEVLNVDLHDDTWKRATLPIAEGGLGIRSAAELAPMCYAASLLEFGKLAKTLVEPDIRQGITRAKDAAELIARQTIGPGPWQERPTQHTLDSYRCSAAARELLDNLQSPVKKAVFLAARDTFSGGFLKCLPSPQLGTMLDNTSFRMVTALRIGAPVCNPYSCRACGTTVTEDGLHPLSCIKSHGRVSRHAEINAIIRRALRKAGIPSTFEPRLGLHDDKRPDGVTIPLWANGRCLVWDATVSCTVAPSYIRHSSLEAGWVAERADNGKKTQVPRTGDKLYRSANIDGNNGPGKQGNQEIHQ

SEQ ID NO: 26672 - protein, 971 aa, Dermanyssus gallinae
MSTQPLLQENPLQSQPRSQQPYICDVCGKSIQSIRGLRMHKTRLHRTNPQPLPTVPPLNNSENQVGNIVTTYDPDPQTLVTLLARARKDAKLIRIIPRGVREVCCAAYTEALANFNSKQDNASWVRLVTLPTLMLRIPERKAKDTTLCQIIRKNLVDAQWKRLENLLAEQSRSTPKNSEKQYTDRDRAATAERKLAEGDVRSAARSLLSTDSFAPLNSHTEQELRDKHPRPTDSVRERLNNFQAPVPAQACLVPEKCITDAARSFSLASGPGLDGLRPRHLLDMLDSTVPSSGRLVKELRSLASSALGGNLPHFCIPIFYGANLTALKKKDGSIRPIACGLTIRRLVAKVAIAITRTTIVTAISPSQIGVAVKGGAEAAVHAVRAFVEAEGPVRVLVKLDFRNAFNTIRRDVVLDEVRLKVPQLLPLAWQSYKEPTLLSWDEKAPLLSSSGVQQGDPLGPALFSLGVSSLVARMKSPLNVWYLDDATIGGPLDLVVGDIINVLNFAEEGGLSLNASKCEVITLGGNAQEQDEIFRAISNVLPESRRVDLEELELLGAPISLRSISKTLKEKCTGLKQIRSRLTAMHSQAALCIWRYSLGSPKLNYTLRTSPAIKCHEDLQAYDDTARSILGEVLNVDLHDDTWKRATLPIAEGGLGIRSAAELAPMCYAASLLEFGKLAKTLVEPDIRQEITRAKDAAELIARQTIGPGPWQERPTQHTLDSYRCSAAARELLDNLQSPVEKAVFLAARDTFSGGFLKCLPSPQLGTMLDNTSFRMVTALRIGAPVCNPYSCRECGTTVTEDGLHPLSCIKSHGRVSRHAEINAIIRRALRKAGIPSTLEPRLGLHDDKRPDGVTIPLWANGRCLVWDATVSCTVAPSYIRHSSLEAGWVAERADNGKKRKYQELETSYIVVPISMETMGPVSKGTKRFISELGQRITDLTGNRREGEFLRQLLSLAVCRGNAGCIVGSME

SEQ ID NO: 26673 - protein, 910 aa, Dermanyssus gallinae
MSTQPLLQENPSQSQPRSQQPYICDVCGKSIKSIRGLRMHKTRLHRTNPQPLPTVPPLNNSENQAGNIVTTYDPDPQTLITLLARARKDAKLIRIIPRGVREVCCAAYTEALANFNSKQDNASWVRLVTLPTLMLRIPERKAKDTTLCQIIRKNLVDTQWKRLENLLAEQSRSTPKNSEKQYTDRDRAATAERKLAEGDVRSAARSLLSTDSFAPLNSHTEQELRDKHPRPTDSVRERLNNFQAPVPAQACLVPEKLITDAARSFSLASGPGLDGLRPRHLLDMLDSTVPSSGRLVEELRSLVSSALGGNLPHFCIPIFYGANLTALKKKDGSIRPIACGLTIRRLVAKVAIAITRTTIVTAISPSQIGVAVKGGAEAAVHAVRAFVEAEGPVRVLVKLDFRNAFNTIRRDVVLDEVRLKVPQLLPLAWQSYKEPTLLSWDEKAPLLSASGVQQGDPLGPALFSLGVSSLVARMKSPLNVWYLDDATIGGPLDLVVCDIINVLNFAEEGGLSLNASKCEVITLGGNAQEQDEIFRAVSNVLPESRRVDLDELELLGAPISLRSISKTLKEKCTGLKQIRSRLTAMHSQAALCIWRYSLGSPKLNYTLRTSPAIKCHEDLQAYDDTARSILGEVLNVDLHDDTWKRATLPIAEGGLGIRSAAELAPMCYAASLLEFGKLAKTLVEPDIRQGITRAKDAAELIARQTIGPGPWQERPTQHTLDSYRCSAAARELLDSLQSPVEKAVFLAARDTFSGGFLKCLPSPQLGTMLDNTSFRMVTALRIGAPVCNPYSCRACGTTVTEDGLHPLSCIKSHGRVSRHAEINAIIRRALRRAGIPSTLEPRLGLHDDKRPDGVTIPLWANGRCLVWDATVSCTVAPSYIRHSSLEAGWVAERADNGKKRKYQELRQVIS

SEQ ID NO: 26674 - protein, 971 aa, Dermanyssus gallinae
MSTQPLLQENPLQSQPRSQQPYICDVCGKSIQSMRGLRMHKTRLHRTNPQPLPTVPPLNNSENQVGNIVTTYDPDPQTLVTLLARARKDAKLIRIIPRGVREVCCAAYTEALANFNSKQDNASWVRLVTLPTLMLRIPERKAKDTTLCQIIRKNLVDTQWKRLENLFAEQSRSTRKNSEKQYTDRDRAATAERKLAEGDVRSAARSLLSTDSFAPLNSHTEQELRDKHPRATDSVRERLNNFQAPVPAQACLVPEKCLTDAARSFSLASGPGLDGLRPRHLLDMLDSTVPSSGRLVEELRSLASSALGGNLPHFCIPIFYGANLTALKKKDGSIRPIACGLTIRRLVAKVAIAITRTTIVTAISPSQIGVAVKGGAEAAVHAVRAFVEAEGPVRVLVKLDFRNAFNTIRRDVVLDEVRLKVPQLLPLAWQSYKEPTLLSWDEKAPLLSSSGVQQGDPLGPALFSLGVSSLVARMKSPLNVWYLDDATIGGPLDLVVGDIINVLNFAEEGGLSLNASKCEVITLGGNAQEQDEIFRAVSNVLPESRRVDLDELELLGAPISLRSISKTLKEKCTGLKQIRSCLTAMHSQAALCIWRYSLGSPKLNYTLRTSPAIKCHEDLQAYDDTARSILGEVLNVDLHDDTWKRATLPIAEGGLGIRSAAELAPMCYAASLLEFGKLAKTLVEPDIRQGITRAKDAAELIARQTIGPGPWQERPTQHTLDSYRCSAAARELLDNLQSPVEKAVFLAARDTFSGGFLKCLPSPQLGTMLDNTSFRMVTALRIGAPVCNPYSCRACGTTVTEDGLHPLSCIKSHGRVSRHAEINAIIRRALRKAGIPSTLEPRLGLHDDKRPDGVTIPLWANGRCLVWDATVSCTVAPSYIRHSSLEAGWVAERADNGKKRKYQELETSYIVVPISMETMGPVSKGTKRFISELGQRITDLTGNRREGEFLRQLLSLAVCRGNAGCIVGSME

SEQ ID NO: 26675 - protein, 971 aa, Dermanyssus gallinae
MSTQPLLQENPLQSQPRSQQPYICDVCGKSIQSIRGLRMHKTRLHRTNPQPLPTVPPLNNSENQVGNIVTTYDPDPQTLVTLLARARKDAKLIRIIPRGVREVCCAAYTEALANFNSKQDNASWVRLVTLPTLMLRIPERKAKDTTLCQIIRKNLVDAQWKRLENLLAEQSRSTPKNSEKQYTDRDRAATAERKLAEGDVKSAARSLLSTDSFAPLNSHTEQELRDKHPRPTDSVRERLNNFQAPVPAQACLVPEKCITDAARYFSLASGPGLDGLRPRHLLDMLDSTVPSSGRLVKELRSLASSALGGNLPHCCIPIFYGANLTALKKKDGSIRPIACGLTIRRLVAKVAIAITRTTIVTAISPSQIGVAVKGGAEAAVHAVRAFVEAEGPVRVLVKLDFRNAFNTIRRDVVLDEVRLKVPQLLPLAWQSYKEPTLLSWDEKAPLLSSSGVQQGDPLGPALFSLGVSSLVARMKSPLNVWYLDDATIGGPLDLVGGDIINVLNFAEEGGLSLNASKCEVITLGGNAQEQDEIFRAISNVLPESRRVDLDELELLGAPISLRSISKTLKEKCTGLKQIRSRLTAMHSQAALCIWRYSLGSPKLNYTLRTSPAIKCHEDLQAYDDTARSILGEVLNVDLHDDTWKRATLPIAEGGLGIRSAAELAPMCYAASLLEFGKLAKTLVEPDIRQGITGAKDAAELIARQTIGPGPWQERPTQHTLDSYRCSAAARELLDNLQSPVEKAVFLAARDTFSGGFLKCLPSPQLGTMLDNTSFRMVTALRIGAPVCNPYSCRACGTTVTEDGLHPLSCIKSHGRVSRHAEINAIIRRALRKAGIPSTLEPRLGLHDDKRPDGVTIPLWANGRCLVWDATVSCTVAPSYIRHSSLEAGWVAERADNGKKRKYQELETSYIVVPISMETMGPVSKGTKRFISELGQRITDLTGNRREGEFLRQLLSLAVCRGNAGCIVGSME

SEQ ID NO: 26676 - protein, 971 aa, Dermanyssus gallinae
MSTQPLLQENPLQSQPRSQQPYICDVCGKSIQSMRGLRMHKTRLHRTNPQPLPTVPPLNNSENQVGNIVTTYDPDPQTLVRLLARARKDAKLIRIIPRGVREVCCAAYTEALANFNSKQDNASWVRLVTLPTLMLRIPERKAKDTTLCQIIRKNLVDTQWKRLENLFAEQSRSTPKNSEKQYTDRDRAATAERKLAEGDVRSAARSLLSTDSFAPLNSHTEQELTDKHPRPTDSVRKRLNNFQAPVPAQACLVPEKCITDAARSFSLASGPGLDGLRPRHLLDMLDSTVPSSGRLVEELRSLASSALGGNLPHFCIPIFYGANLTALKKKDGSIRPIACGLTIRRLVAKVAIAITRTTIVTAISPSQIGVAVKGGAEAAVHAIRAFVEAEGPVRVLVKLDFRNAFNTIQRDVVLDEVRLKVPQLLPLAWQSYKEPTLLSWDEKAPLLSSSGVQQGDPLGPALFSLRVSSLVARMKSPLNVWYLDDATIGGPLDLVVGDNINVLNFAEEGGLSLNASKCEVITLGGNAQEQDAFFKAVSNVLPESRRVDLDELELLGAPISLRSISKTLKEKCTGLKQIRSRLTAMHSQAALCIWRYSLGSPKLNYTLRTSPAIKCLEDLQAYDDTARSILGEVLNVDLHDDTWKRATLPIAEGGLGIRSAAELAPMCYAASLLEFGKLLKTLVEPDIRQGITRAKDAAELIARQTIGPGPWQERPTQHTLDSYRCSAAARELLDNLQSPVEKAVFLAARDTFSGGFLKCLPSPQLGTMLDNTSFRMVTALQIGAPVCNPYSCRACGTTVTEDGLHPLSCIKSHGKVSRHAEINAIIRRALRKAGIPSTLEPRLGLHDDKRPDGVTIPLWANGRCLVWDATVSCTVAPSYIRHSSLEAGWVAERADNGKKRKYQELETSYIVVPISMETMGPVSKGTKRFISELGQRITDLTGNRREGEFLRQLLSLAVCRGNAGCIVGSME

SEQ ID NO: 26677 - protein, 971 aa, Dermanyssus gallinae
MSTQPLLQENPLQSQPRSQQPYICDVCGKSIQSIRGLRMHKTRLHRTNPQPLPTVPPLNNSENQVGNIVTTYDPDPQTLVTLLARARKDAKLIRIIPRGVREVCCAAYTEALANFNSKQDNASWVRLVTLPTLMLRIPERKAKDTTLCQIIRKNLVDAQWKRLENLLAEQSRSTPKNSEKQYTDRDRAATAERKLAEGDVRSAARSLLSTDSFAPLNSHTEQELRDKHPRPTDSVRERLNNFQAPVPAQACLVPEKCITDAARSFSLASGPGLDGLRPRHLLDMLDSTVPSSGRLVEELRSLASSALGGNLPHFCIPIFYGANLTALKKKDGSIRPIACGLTIRRLVAKVAIAITRTTIVTAISPSQIGVAVKGGAEAAVHAVRAFVEAEGPVRVLVKLDFRNAFNTIRRDVVLDEVRLKVPQLLPLAWQSYKEPTLLSWDEKAPLLSSSGVQQGDPLGPALFSLGVSSLVARMKSPLNVWYLDDATIGGPLDLVVGDIINVLNFAEEGGLSLNASKCEVITLGGNAQEQDEIFRAVSNVLPESRRVDLEELELLGAPISLRSISKTLKEKCTGLKQIRSRLTAMHSQAALCIWRYSLGSPKLNYTLRTSPAIKCHEDLQAYDDTARSILGEVLNVDLHDDTWKRATLPIAEGGLGIRSAAELAPMCYAASLLEFGKLAKTLVEPDIRQGITRAKDAAELIARQTIGPGPWQERPTQHTLDSYRCSAAARELLDNLQSPVEKAVFLAARDTFSGGFLKCLPSPQLGTMLDNTSFRMVTALRIGAPVCNPYSCRACGTTVTEDGLHPLSCIKSHGRVSRHAEINAIIRRALRKAGIPSTLEPRLGLHDDKRPDGVTIPLWANGRCLVWDATVSCTVAPSYIRHSSLEAGWVAERADNGKKRKYQELETSYIVVPISMETMGPVSKGTKRFISELGQRITDLTGNRREGEFLRQLLSLAVCRGNAGCIVGSME

SEQ ID NO: 26678 - protein, 838 aa, Dermanyssus gallinae
MLRIPERKAKDTTLCQIIRKNLVDTQWKRLENLFAEQSRSTRKNSEKQYTDRDRAATAERKLAEGDVRSAARSLLSTDSFAPLNSHTEQELRDKHPRATDSVRERLNHFQAPVPAQACLVPEKCITDAARSFSLASGPGLDGLRPRHLLDMLDSTVPSSGRLVEELRSLASSALGGNLPHFCIPIFYGANLTALKKKDGSIRPIACGLTIRRLVAKVAIAITRTTIVTAISPSQIGVAVKGGAEAAVHAVRAFVEAEGPVRVLVKLDFRNAFNTIRRDVVLDEVRLKVPQLLPLAWQSYKEPTLLSWDEKAPLLSSSGVQQGDPLGPALFSLGVSSLVARMKSPLNVWYLDDATIGGPLDLVVGDIINVLNFAEEGGLSLNASKCEVITLGGNAQEQDEIFRAVSNVLPESRRVDLDELELLGAPISLRSISKTLKEKCTGLKQIRSCLTAMHSQAALCIWRYSLGSPKLNYTLRTSPAIKCHEDLQAYDDTARSILGEVLNVDLHDDTWKRATLPIAEGGLGIRSAAELAPMCYAASLLEFGKLAKTLVEPDIRQGITRAKDAAELIARQTIGPGPWQERPTQHTLDSYRCSAAARELLDNLQSPVEKAVFLAARDTFSGGFLKCLPSPQLGTMLDNTSFRMVTALRIGAPVCNPYSCRACGTTVTEDGLHPLSCIKSHGRVSRHAEINAIIRRALRKAGIPSTLEPRIGLHDDKRPDGVTIPLWANGRCLVWDATVSCTVAPSYIRHSSLEAGWVAERADNGKKRKYQELETSYIVVPISMETMGPVSKGTKRFISELGQRITDLTGNRREGEFLRQLLSLAVCRGNAGCIVGSME

SEQ ID NO: 26679 - protein, 971 aa, Dermanyssus gallinae
MSTQPLLQENPLQSQPRSQQPYICDVCGKSIQSIRGLRMHKTRLHRTNPQPLPTVPPLNNSENQVGNIVTTYDPDPQTLVTLLARARKDAKLIRIIPRGVREVCCAAYTEALANFNSKQDNASWVRLVTLPTLMLRIPERKAKDTTLCKIIRKNLVDAQWKRLENLLAEQSRSTPKNSEKQYTDRDRAATAERKLAEGDVRSAARSLLSTDSFAPLNSHTEQELRDKHPRPTDSVRERLNNFQAPVPAQACLVPEKCITDAARSFSLASGPGLDGLRPRHLLDMLDSTVPSSGRLVEELRSLASSALGGNLPHFCIPIFYGANLTALKKKDGSIRPIACGLTIRRLVAKVAIAITRTTIVTAISPSQIGVAVKGGAEAAVHAVRAFVEAEGPVRVLVKLDFRNAFNTIRRNVVLNEVRLKVPQLLPLAWQSYKEPTLLSWDENAPLLSSSGVQQGDPLGPALFSLGVSSLVARMKSPLNVWYLDDATIGGPLDLVVGDIINVLNFAEEGGLSLNASKCEVITLGGNAQEQDEIFRAVSNVLPESRRVDLEELELLGAPISLRSISKTLKEKCTGLKQIRSRLTAMHSQAALCIWRYSLGSPKLNYTLRTSPAIKCHEDLQAYDDTARSILGEVLNVDLHDDTWKRATLPIAEGGLGIRSAAELAPMCYAASLLEFGKLAKTLVEPDIRQGITRAKDAAELIARQTIGPGPWQERPTQHTLDSYRCSAAARELLDNLQSPVEKAVFLAARDTFSGGFLKCLPSPQLGTMLDNTSFRMVTALRIGAPVCNPYSCRACGTTVTEDGLHPLSCIKSHGRVSRHAEINAIIRRALRKAGIPSTLEPRLGLHDDKRPDGVTIPLWANGRCLVWDATVSCTVAPSYIRHSSLDAGWVAERADNGKKRKYQELETSYIVVPISMETMGPVSKGTKRFISELGQRITDLTGNRREGEFLRQLLSLAVCRGNAGCIVGSME

SEQ ID NO: 26680 - protein, 971 aa, Dermanyssus gallinae
MSTQPLLQENPLQSQPRSQQPYICDVCGKSIQSMRGLRMHKTRLHRTNPQPLPTVPPLNNSENQVGNIVTTYDPDPQTLVTLLARARKDAKLIRIIPRGVREVCCAAYTEALANFNSKQDNASWVRLVTLPTLMLRIPERKAKDTTLCQIIRKNLVDTQWKRLENLFAEQSRSTRKNSEKQYTDRDRAATAERKLAEGDVRSAARSLLSTDSFAPLNSHTEQELRDKHPRATDSVRERLNNFQAPVPAQACLVPEKCITDAARSFSLASGPGLDGLRPRHLLNMLDSTVPSSGRLVEELRSLASSALGGNLPHFCIPIFYGANLTALKKKNGSIRPIACGLTIRRLVAKVAIAITRTTIVTAISPSQIGVAVKGGAEAAVHAVRAFVEAEGPVRVLVKLEFRNAFNTIRRDVVLDEVRLKVPQLLPLAWQSYKEPTLLSWDEKAPLLSSSGVQQGDPLGPALFSLGVSSLVARMKSPLNVWYLDDATIGGPLDLVVGDIINVLNFAEEGGLSLNASKCEVITLGGNAQEQDEIFRAVSNVLPESRRVDLDELELLGAPISLRSISKTLKEKCTELKQIRSCLTAMHSQAALCIWRYSLGSPKLNYTLRTSPAIKCHEDLQAYDDTARSILGEVLNVDLHDDTWKRATLPIAEGGLGIRSAAELAPMCYAASLLEFGKLAKTLVEPDIRQGITRAKDAAELIARQTIGRGPWQERPTQHTLDSYRCSAAARELLDNLQSPVEKAVFLAARDTFSGGFLKCLPSPQLGTMLDNTSFRMVTALRIGAPVCNPYSCRACGTTVTEDGLHPLSCIKSHGRVSRHAEINAIIRRALRKAGIPSTLEPRIGLHDDKRPDGVTIPLWANGRCLVWDATVSCTVAPSYIRHSSLEAGWVAERADNGKKRKYQELETSYIVVPISMETMGPVSKGTKRFISELGQRITDLTGNRREGEFLRQLLSLAVCRGNAGCIVGSME

SEQ ID NO: 26681 - protein, 971 aa, Dermanyssus gallinae
MSTQPLLQENPLQSQPRSQQPYICDVCGKSIQSMRGLRMHKTRLHRTNPQPLPTVPPLNNSENQVGNIVTTYDPDPQTLVTLLARARKDAKLIRIIPRGVREVCCAAYTEALANFNSKQDNASWVRLVTLPTLMLRIPERKAKDTTLCQIIRKNLVDTKWKRLENLFAEQSRSTRKNSEKQYTDRDRAATAERKLAEGDVRSAARSLLSTDSFAPLNSHTEQELRDKHPRATDSVRERLNNFQAPVPAQACLVPEKCITDAARSFSLASGPGLDGLRPRHLLDMLDSTVPSSGRLVEELRSLASSALGGNLPHFCIPIFYGANLTALKKKDGSIRPIACGLTIRRLVAKVAIAITRTTIVTAISPSQIGVAVKGGAEAAVHAVRAFVEAEGPVRVLVKLDFRNAFNTIRRDVVLDEVRLKVPQLLPLAWQSYKEPTLLSWDEKAPLLSSSGVQQGDPLGPALFSLGVSSLVARMKSPLNVWYLDDATIGGPLDLVVGDIINVLNFAEEGGLSLNASKCEVITLGGNAQEQDDIFRAVSNVLPESRRVDLDELELLGAPISLRSISKTLKEKCTGLKQIRSCLTAMHSQAALCIWRYSLGSPKLNYTLRTSPAIKCHEDLQAYDDTARSILGEVLNVDLHDDTWKRATLPIAEGGLGIRSAAELAPMCYAASLLEFGKLAKTLVEPDIRQGITRAKDAAELIARQTIGPGPWQERPTQHTLDSYRCSAAARELLDNLQSPVEKAVFLAARDTFSGGFLKCLPSPQLGTMLDNTSFRMVTALRIGAPVCNPYSCRACGTTVTEDGLHPLSCIKSHGRVSRHAEINAIIRRALRKAGIPSTLEPRLGLHDDKRPDGVTIPLWANGRCLVWDATVSCTVAPSYIRHSSLEAGWVAERADNGKKRKYQELETSYIVVPISMETMGPVSKGTKRFISELGQRITDLTGNRREGEFLRQLLSLAVCRGNAGCIVGSME

SEQ ID NO: 26682 - protein, 971 aa, Dermanyssus gallinae
MSTQPLLQENPLQSQPRSQQPYICDVCGKSIQSIRGLRMHKTRLHRTNPQPLPTVPPLNNSENQVGNIVTTYDPDPQTLVTQLARARKDAKLIRIIPRGVREVCCAAYTEALANFNSKQDNASWVRLVTLPTLMLRIPERKAKDTTLCQIIRKNLVDTQWKRLENLLAEQSRSTPKNSEKQYTDRDRAATAERKLAEGDVRSAARSLLSTDSFAPLNSHTEQELRDKHPRPTDSVRERLNNFQAPVPAQACLVPEKCITDAARSFSLASDPGLDGLRPRHLLDMLDSTVPSSGRLVEELCSLASSALGGNLPHFCIPIFYGANLTALKKKDGSIRPIACGLTIRRLVAKVAIDITRTTIVTAISPSQIGVAVKGGAEAAVHAVRAFVEAEGPVRVLVKLDFRNAFNTIRRDVVLDEVRLKVPQLLPLAWQSYKEPTLLSWDEKAPLLSSSGVQQGDPLGPALFSLGVSSLVARMKSPLNVWYLDDATIGGPLDLVVGDIINVLNFAEEGGLSLNASKCEVITLGGNAQEQDDIFRAVSNVLPESRRVDLDELELLGAPISLRSISKTLKEKCTGLKQIRSRLTAMHSQAALCIWRYSLGSPKLNYTLRTSPAIKCHEDLQAYDDTARSILGEVLNVDLHDDTWKRATLPIAEGGLGIRSAAELAPMCYAASLLEFGKLAKTLVEPDIRQGITRAKDAAELIARQTIGPGPWQECPTQHTLDSYRCSAAARELLDNLQSPVAKAVFLAARDTFSGGFLKCLPSPQLGTMLDNTSFRMVTALRIGAPVCNPYSCRECGTTVTEDGLHPLSCIKSHSRVSRHAEINAIRRRALRKAGIPSTLEPRLGLHDDKRPDGVTIPLWANGRCLVWDATVSCTVAPSYIRHSSLEAGWVAERADNGKKRKYQELETSYIVVPISMETMGPVSKGTKRFISELGQRITDLTGNRREDEFLRQLLSLAVCRGNAGCIVGSME

SEQ ID NO: 26683 - protein, 971 aa, Dermanyssus gallinae
MSTQPLLQENPLQSQPRSQQPYICDVCGKSIQSMRGLRMHKTRLHRTNPQPLPTVPPLNNSENQVGNIVTTYDPDPQTLVTLLARARKDAKLIRIIPRGVREVCCAAYTEALANFNSKQDNASWVRLVTLPTLMLRIPERKAKDTTLCQIIRKNLVDTQWKRLENLFAEQSRSTPKNSEKQYTDRDRAATAERKLAEGDVRSAARSLLSTDSFAPLNSHTEQELRDKHPRPTDSVRERLNNFQAPVPAQACLVPEKCITDAARSFSLASGPGLDGLRPRHLLDMLDSTVPSSGRLVKELRSLASSALGGNLPHFCIPIFYGANLTALKKKDGSIRPIACGLTVRRLVAKVAIAITRTTIVTAISPSQIGVAVKGGAEAAVHAVRAFVEAEGPVRVLVKLHIRNAFNTIRRDVVLDEVRLKVPQLLPLAWQSYKEPTLLSWDEKAPLLSSSGVQQGDPLGPALFSLGVSSLVARMKSPLNVWYLDDATIGGPLDLVVVDIINVLNFAEEGGLSLNASKCEVITLGGNAQEQDEIFRAVSNVLPESRRVDLDELELLGAPISLRSISKTLKEKCTGLKQIRSRLTAMHSQAALCIWRYSLGSPKLNYTLRTSPAIKCHEDLQAYDDTARSILGEVLNVDLHDDTWKRATLPIAEGGLGIRSAAELAPMCYAASLLEFGKLAKTLVEPDIRQGITRAKDAAELIARQTIGPGPWQERPTQHTLDSYRCSAAARELLDNLQSPVEKAVFLAARDTFSGGFLKCLPSPQLGTMLDNTSFRMVTALRIGAPVCNPYSCRACGTTVTEVGLHPLSCIKSHGRVSRHAEINAIIRRALRKAGIPSTLEPRLGLHDDKRPDGVTIPLWANGRCLVWDATVSCTVAPSYIRHSSLEAGWVAERADNGKKRKYQELETSYIVVPISMETMGPVSKGTERFISELGQRITDLTGNRREGEFLRQLLSLAVCRGNAGCIVGSME

SEQ ID NO: 26684 - protein, 971 aa, Dermanyssus gallinae
MNTQPPPASPDHPPMLSQQLFICDICRKAVKSLRGLRMHKTRVHRSHTPPSRLPFDSARSTEPQDHADPISTIPNHDPKILIRTLSNARKTIRLVRIIPRGVREICSAAYAEALANFNSRQDYPSWHSLITLPLLMLKVPERKGKDITLCQIIRKNLADSQWRVLENVVEEHHSDNIRISKKHHLDRHRATMAERKLAEGDIRSAAHTLLSVDTFAPPDDHTYQELINKHPAPPTSASIDNLPAPNPQETCVAQEKLIADAVRSFALASGPGLDGLRPRHLRDMLDCMVPSSERLLTELCSLVNLALNGKLPSFCLPIFYGAELTALKKKDGTIRPIACGLTLRRLAAKVAIVVNRRAISSAVTPKQVGVSVRGGAEAAAHAVRGFIEADGPPRVVVKLDFRNAFNTIRRDVILNEVKSKVPQLFPFTLQSYSKPSLLSWADKEPLLSSNGVQQGDPLGPALFSIGISEIVARMDSPLNVWYLDDATLGGPINSVVGDILNVLRSADEGVLELNPSKCEIIAVGGDSHQQGEMFRTIENILPGSKRVDQADLEILGAPIGARRILETITVKRNALLRIKPRLIAMHPQAALCLWRYSLGSPRLNYILRTFPASNELAGLQDFDDTAREILGEVLNVTLTDHTWQRASLPLREGGLGIRSVTELAPVCYAASLLEFAQLAGTLVEPNIRHVIQVTKDKAELAARNVIGPGPWEERPTQHTLDGYRCNIVGRNLLDSMQSPTERAVFIAARDTFSSGYLRALPSPQLGTMLDNTSFRMVTALRIGAPICEPYTCSACGTPVESNGLHPLSCIKSQGRAARHAELNSIIRRALRRAGIPSTLEPRLDTSSDRRPDGVTIPLWSCGKCLAWDTTVSCTVAPSYLRHSALEAGWVAEHADREKRRKYRDLEPRYHVVPIAMETLGPASKGTRRFIKELGERIQENTGDRRESEFLRQLLSLAVCRGNAACIIGSMF

SEQ ID NO: 26685 - protein, 840 aa, Dermanyssus gallinae
MPLLMLKVPKRKGKDITLCQIIRKNLADSQWRVLENVVEEHHSDNIRISKKHHLDRHRATMAERKLAEGDIRSAAHTLLSVDTFAPPDDHTYQELINKHPAPPTSASIDNLLAPNPQETCVAQEKLIADAVRSFALASGPGLDGLRPRHLRDMLDCMVPSSERLLTELCSLVNLALNGKLPSFCLPIFYGAELTALKKKDGTIRPIACGLTLRRLAAKVAIVVNRRAISSAVTPKQVGVSVKGGAEAAAHAVRGFIEADGPPRVVVKLDFRNAFNTIRRDVILNEVKSKVPQLFPFTLQSYSKPSLLSWADKEPLLSSNGVQQGDPLGPALFSIGISEIVARMDSPLNVWYLDDATLGGPINSVVGDILNVLRSADEGGLELNPSKCEIIAVGGDSHEQGEMFRTIENILPGSKRVDQADLEILGAPIGARRILETITVKRNALLRIKPRLIAMHPQAALCLWRYSLGSPRLNYILRTSPASNELAGLQDFDDTAREILGEVLNVTLTDHTWQRASLPLREGGLGIRSVTELAPVCYAASLLEFAQLAGTLVEPNIRHVIQVTKDKAELAARNVIGPGPWEERPTQHTLDGYRCNIVGRNLLDSMQSPTERAVFIAARDTFSSGYLRALPSPQLGTMLDNTSFRMVTALRIGAPICEPYTCSACGTPVESNGLHPLSCIKSQGRAARHAELNSIIRRALRRAGIPSTLEPRLDTSSDRRPDGVTIPLWSCGKCLAWDTTVSCTVAPSYLRHSALEAGWVAEHADREKRRKYRDLEPRYHVVPIAMETLGPASKGTRRFIKELGERIQENTGDRRESEFLRQLLSLAVCRGNAACIIGSMF

SEQ ID NO: 26686 - protein, 957 aa, Dermanyssus gallinae
MLSQQLFICDICRKAVKSLRGLRMHKTRVHRAHTPPSRLPFDSARSTEPQDHADPISTIPNHDPKILIRTLSNARKTIRLVRIIPRGVREICSAAYAEALTNFNLRQDYPSWHSLITLPLLMLKVPERKGKDITLCQIIRKNLADSQWRVLENVVEEHHSDNIRISKKHHLDRHRATMAERKLAEGDIRSAAYTLLSVDTFAPPDDHTYQELINKHPAPPTSASINNLPAPNPQETCVAQEKLIADAVRSFALASGPGLDGLRPRHLRDMLDCMVPSSERLLTELCSLVNLALNGKLPSFCLPIFYGAELTALKKKDGTIRPIACGLTLRRLAAKVAIVVNRRAISSAVTPKQVGVSVKGGAEAAAHAVRGFIEADGPPRVVVKLDFRNAFNTIRRDVILNEVKSKVPQLFPFTLQSYSKPSLLSWADKEPLLSSNGVQQGDPLGPALFSIGISEIVARMDSPLNVWYLDDATLGGPVNSVVGDILNVLRSADEGGLELNPSKCEIVAVGGDSHEQDEVFRTIENILPGSKRVDQADLEILGAPIGARRIVETITVKRNALLRIKPRLIAMHPQAALCLWRYSLGSPRLNYILRTSPASNELAGLQDFDDTAREILGEVLNVTLTDHAWQRATLPLREGGLGIRSVTELAPVCYAASLLEFAQLAGTLVEPNIRHVIQVTKDKAELAARNVIGPGPWEERPTQHTLDGYRCNIVGRNLLDSMQSPTERAVFIAARDTFSSGYLRALPSPQLGTMLDNTSFRMVTALRIGAPICEPYTRSACGTPVDSNGLHPLSCIKSQGRAARHAELNSIIRRALRRAGIPSTLEPRLDISSDRRPDGVTIPLWSCGKCLAWDTTVSCTVAPSYLRHSALEAGWVAEHADREKKRKYRDLEPRYHVVPIAMETLGPASKGTRRFIKELGERIQENTGDRRESEFLRQLLSLAVCRGNAACIIGSMF

SEQ ID NO: 26687 - protein, 918 aa, Dermanyssus gallinae
MSTQPPPASPDHPPMLSQQLFICDICRKAVKSLRGLRMHKTRVHRAHTPPSRLPFDSARRTEPQDHADPISTIPNDDPKILIRTLSNARKTIRLVRIIPRGVREICSAAYAEAVANFNLRQDYPSWHSLITLPLLMLKVPERKGKDITLCQIIRKNLADSQWRVLENVVEEHHSDNIRISKKHHLDRHRATMAERKLVEGDIRSAAHTLLSVDTFAPPDDHTYQELIHKHPAPPTSASIDNLPAPNPQERCVAQEKLIADAVRFFALASGPGLDGLRPRHLRDMLDCMVPSSERLLTELCSLVNLALNGKLPSFCLPIFYGAELTALKKKDGTIRPIACGLTLRRLAAKVAIVVNRRAISSAVTPKQVCVSVKGGAEAAAHAVRGFIEADGPPRVVVKLDFRNAFNTIRRDVILNEVESKVPKLFPFALQSYSKPSLLSWADKEPLLSCNGVQQGDPLGPALFSIGISEIVARMDSPLNVWYLDDATLGGPVNSVVGDILNVLRSADEGGLELNPSKCEIIAVGGDSHEQGEMFRTIENILPGSKRVDQADLEILGAPIGARRILETITVKRNAQPRLIAMHPQAALCLWRYSLGSPRLNYILRTSPASNELAGLQDFDDTAREILDEVLNVTLTDHTWQRATLPLREGGLGIRSVTELAPVCYAASLLEFAQLAETLVEPNIRHVIQVTKDKAELAARNVIGPGPWEERPTQHTLDGYRCNIVGRNLLDSMQSPTERAVFIAARDTFSSGYLRALPSPQLGTMLDNTSFRMVTALRIGAPICEPYTCSACGTPVESNGLHPLSCIKSQGRAARHAELNSIIRRALRRAGIPSTLEPRLDTSSDRRPDGVTIPLWSCGKCLAWDTTVSCTVAPSYLRHSALEAGWIAEHADREKKTKVQGLRAQIPRRAYRYGNTRSR

SEQ ID NO: 26688 - protein, 1183 aa, Morbakka virulenta
MSVMSYSNYEDNGVNETGASSEGLSPGRCPTVWQGGPGRYPASAKMKWNKELNVAVMECYFLSKPTDENGRPIRGYRRRMHNIWKERELPTLTEQRLCDQARAIRKNEWFTTVEMEEIRRSLEVDSDNEEGNDGNRQLPEIEVQEHGQTEEISVQINRTDEQDEQESCMIEEIVDITRSGQMCDTRGLKKVNRKVLSEWIGKVNKIIGKIRTENLTDTNKLIGAVAIYISKKVGLKTGNSRRKTKEEPWWKKRIKGTIQELRKHVNILQRNKRGELTRKERYKELDRKYQIKKKGENVVIEELKQKLQAKVAKLKRYEQRVNQFRINRLFQQDQKKVYQEFNGMSKSEGIAPDAEESEQFWSSIWGNEVQHNKDAGWLKELKDECGETRQDDIMIDCVMVSAQAKKIPNWKAPGPDGVQGYWIKKLTSLHDRIAKQMNEMINSRVPVPAWMTMGRTVLCQKDPQKGNVVDNYRPISCLPLMWKLMTGVIADSVYKMLEESDVLPTEQKGCRKKSRGTKDQLLIDKMILTDCKKRQKNLAMAWVDYKKAYDMVPHSWIVECLKMAQVPQNVTSFLQRSMRNWKTELMSCGESLGTVNIKRGIFQGDSLSPLIFVICMIPLSKVLRKAKAGYRLGDVKINHLLFMDDLKMFTKNKNEIDSLVSTVQVISQDIGMQFGVKKCGVIIMKRGKLVKSEDITLTNGESIREVSDEGYKYLGILELDKIKEKEMKELFRKEYLRRFNLIMKSKLNGRNKIFAANTWAVSLMRYGAGILRWTKNELQEIDRKTRKVMTINKELHPRSDVARIYVSRKRGGRGLMSCENCVKGEENNLSWYIKNSKEILLRKVGEVSIVNTEKAMEPNDYKKFKSQEMEEEWKQKVMHGQFLRDKEGVNWDKSWQWLAKGDLKGCTEALISSAQEQALRTNYTKFHIDKNADSPLCRMCREKGETISHLVSECGKLAQREYKKRHDNVARYIHWQLCNKGGLERAEKWYEQQPEAVIENENFKLLWDFTIQCDRFIEARRPDIVLVDKRNKEVKIIDIAVPGDSRVAEKELEKIEKYQMLREEIGHVWQMNKVTVIPVVIGALGVISNKFERYMEKMGVKIEMTIIQKTALLETGRILRKVLSLERNRRRNFETPGDLLLPALKDKRTKELSRQTCLRFTLIIIIIIIIIIIIIIDTSWVWR

SEQ ID NO: 26689 - protein, 1125 aa, Morbakka virulenta
MSEMSYSNYKENGVNETGASGEGLSPGRCPTVWQGGPGRYPASAKMKWSKELNVALMECYFLSKPTDENGRPILVYRRRMHNIWKERELPTLTEQRLCDQARAIRKNEWFTTVEMEEIRRSLEVDSDNEEGNDGNRQLPEIEVQEHGQTEEISVQINRTDEQDEQESCMIEEIVDITRSGQMCDTRGLKKVNRKVLSEWIGKVNKIIGKIRTENLTDTNKLIGAVAIYISKKVGLKTGNSRRKTKEEPWWKKRIKGTIQELRKHVNILQRNKRGELTRKERYKELDRKYQIKKKGENVVIEELKQKLQAKVAKLKRYEQRVNQFRINRLFQQDQKKVYQEFNGMSKSEGIAPDAEESEQFWSSIWGNEVQHNKDAGWLKELKDECGETRQDDIMIDCVMVSAQAKKIPNWKAPGPDGVQGYWIKKLTSLHDRIAKQMNEMINSRVPVPAWMTMGRTVLCQKDPQKGNVVDNYRPISCLPLMWKLMTGVIADSVYKMLEESDVLPTEQKGCRKKSRGTKDQLLIDKMILTDCKKRQKNLAMAWVDYKKAYDMVPHSWIVECLKMAQVPQNVTSFLQRSMRNWKTELMSCGESLGTVNIKRGIFQGDSLSPLIFVICMIPLSKVLRKAKAGYRLGDVKINHLLFMDDLKMFTKNKNEIDSLVSTVQVISQDIGMQFGVKKCGVIIMKRGKLVKSEDITLTNGESIREVSDEGYKYLGILELDKIKEKEMKELFRKEYLRRFNLIMKSKLNGRNKIFAANTWAVSLMRYGAGILRWTKNELQEIDRKTRKVMTINKELHPRSDVARIYVSRKRGGRGLMSCENCVKGEENNLSWYIKNSKEILLRKVGEVSIVNTEKAMEPNDYKKFKSQEMEEEWKQKVMHGQFLRDKEGVNWDKSWQWLAKGDLKGCTEALISSAQEQALRTNYTKFHIDKNADSPLCRMCREKGETISHLVSECGKLAQREYKKRHDNVARYIHWQLCNKGGLERAEKWYEQQPEAVIENENFKLLWDFTIQCDRFIEARRPDIVLVDKRNKEVKIIDIAVPGDSRVAEKELEKIEKYQMLREEIGHVWQMNKVTVIPVVIGALGVISNKFERYMEKMGVKIEMAIIQKTALLETGRILRKVLSL

SEQ ID NO: 26690 - protein, 1125 aa, Morbakka virulenta
MSVMSYSNYEDNGVNETGASSEGLSPGRCPTVWQGGPGRYPASAKMKWNKELNVAVMECYFLSKPTDENGRPIRGYRRRMHNIWKERELPTLTEQRLCDQARAIRKNEWFTTVEMEEIRRSLEVDSDNEEGNDGNRQLPEIEVQEHGQTEEISVQINRTDEQDEQESCMIEEIVDITRSGQMCDTRGLKKVNRKVLSEWIGKVNKIIGKIRTENLTDTNKLIGAVAIYISKKVGLKTGNSRRKTKEEPWWKKRIKGTIQELRKHVNILQRNKRGELTRKERYKELDRKYQIKKKGENVVIEELKQKLQAKVAKLKRYEQRVNQFRINRLFQQDQKKVYQEFNGMSKSEGIAPDAEESEQFWSSIWGNEVQHNKDAGWLKELKDECGETRQDDIMIDCVMVSAQAKKIPNWKAPGPDGVQGYWIKKLTSLHDRIAKQMNEMINSRVPVPAWMTMGRTVLCQKDPQKGNVVDNYRPISCLPLMWKLMTGVIADSVYKMLEESDVLPTEQKGCRKKSRGTKDQLLIDKMILTDCKKRQKNLAMAWVDYKKAYDMVPHSWIVECLKMAQVPQNVTSFLQRSMRNWKTELMSCGESLGTVNIKRGIFQGDSLSPLIFVICMIPLSKVLRKAKAGYRLGDVKINHLLFMDDLKMFTKNKNEIDSLVSTVQVISQDIGMQFGVKKCGVIIMKRGKLVKSEDITLTNGESIREVSDEGYKYLGILELDKIKEKEMKELFRKEYLRRFNLIMKSKLNGRNKIFAANTWAVSLMRYGAGILRWTKNELQEIDRKTRKVMTINKELHPRSDVARIYVSRKRGGRGLMSCENCVKGEENNLSWYIKNSKEILLRKVGEVSIVNTEKAMEPNDYKKFKSQEMEEEWKQKVMHGQFLRDKEGVNWDKSWQWLAKGDLKGCTEALISSAQEQALRTNYTKFHIDKNADSPLCRMCREKGETISHLVSECGKLAQREYKKRHDNVARYIHWQLCNKGGLERAEKWYEQQPEAVIENENFKLLWDFTIQCDRFIEARRPDIVLVDKRNKEVKIIDIAVPGDSRVAEKELEKIEKYQMLREEIGHVWQMNKVTVIPVVIGALGVISNKFERYMEKMGVKIEMAIIQKTALLETGRILRKVLSL

SEQ ID NO: 26691 - protein, 1032 aa, Morbakka virulenta
MSVMSYSNYEDNGVNETGASSEGLSPGRCPTVWQGGPGRYPASAKMKWNKELNVAVMECYFLSKPTDENGRPIRGYRRRMHNIWKERELPTLTEQRLCDQARAIRKNEWFTTVEMEEIRRSLEVDSDNEEGNDGNRQLPEIEVQEHGQTEEISVQINRTDEQDEQESCMIEEIVDITRRGQMCDTRGLKKVNRKVLSEWIGKVNKIIGKIRTENLTDTNKLIGAVAIYISKKVGLKTGNSRRKTKEEPWWKKRIKGTIQELRKHVNILQRNKRGELTRKERYKELDRKYQIKKKGENVVIEELKQKLQAKVAKLKRYEQRVNQFRINRLFQQDQKKVYQEFNGMSKSEGIAPDAEESEQFWSSIWGNEVQHNKDAGWLKELKDECGETRQDDIMIDCVMVSAQAKKIPNWKAPGPDGVQGYWIKKLTSLHDRIAKQMNEMINSRVPVPAWMTMGRTVLCQKDPQKGNVVDNYRPISCLPLMWKLMTGVIADSVYKMLEESDVLPTEQKGCRKKSRGTKDQLLIDKMILTDCKKRQKNLAMAWVDYKKAYDMVPHSWIVECLKMAQVPQNVTSFLQRSMRNWKTELMSCGESLGTVNIKRGIFQGDSLSPLIFVICMIPLSKVLRKAKAGYRLGDVKINHLLFMDDLKMFTKNKNEIDSLVSTVQVISQDIGMQFGVKKCGVIIMKRGKLVKSEDITLTNGESIREVSDEGYKYLGILELDKIKEKEMKELFRKEYLRRFNLIMKSKLNGRNKIFAANTWAVSLMRYGAGILRWTKNELQEIDRKTRKVMTINKELHPRSDVARIYVSRKRGGRGLMSCENCVKGEENNLSWYIKNSKEILLRKVGEVSIVNTEKAMEPNDYKKFKSQEMEEEWKQKVMHGQFLRDKEGVNWDKSWQWLAKGDLKGCTEALISSAQEQALRTNYTKFHIDKNADSPLCRMCREKGETISHLVSECGKLAQREYKKRHDNVARYIHWQLCNKGGLERAEKWYEQQPEAVIENENFKLLWDFTIQCDRFIEARRPDIVLVDKRNK

SEQ ID NO: 26692 - protein, 1107 aa, Morbakka virulenta
MSEMSYSNYEDNGVNETGASSEGLLPGRYPTVWQGGPGRYPVSAKMKWNKELNVAVMECYFLSKPTDENGRPIRGYRRRMHNIWKERELPTLTEQRLCDQARAIRKNEWFTTVEMEEIRRSLEVDSDNEEGNDGNRQLPEIEVQEHGQTEEISVQINRTDEQDEQESCMIEEIVDITRSGQMCDTRGLKKVNRKVLSEWIGKVNKIIGKIRTENLTDTNKLIGAVAIYISKKVGLKTGNSRRKTKEEPWWKKRIKGTIQELRKHVNILQRNKRGELTRKERYKELDRKYQIKKKGENVVIEELKQKLQAKVAKLKRYEQRVNQFRINRLFQQDQKKVYQEFNGMSKSEGIAPDAEESEQFWSSIWGNEVQHNKDAGWLKELKDECGETRQDDIMIDCVMVSAQAKKIPNWKAPGPDGVQGYWIKKLTSLHDRIAKQMNEMINSRVPVPAWMTMGRTVLCQKDPQKGNVVDNYRPISCLPLMWKLMTGVIADSVYKMLEESDVLPTEQKGCRKKSRGTKDQLLIDKMILTDCKKRQKNLAMAWVDYKKAYDMVPHSWIVECLKMAQVPQNVTSFLQRSTRNWKTELMSCGESLGTVNIKRGIFQGDSLSPLIFVICMIPLSKVLRKAKAGYRLGDVKINHLLFMDDLKMFTKNKNEIDSLVSTVQVISQDIGMQFGVKKCGVIIMKRGKLVKSEDITLTNGESIREVSDEGYKYLGILELDKIKEKEMKELFRKEYLRRFNLIMKSKLNGRNKIFAANTWAVSLMRYGAGILRWTKNELQEIDRKTRKVMTINKELHPRSDVARIYVSRKRGGRGLMSCENCVKGEENNLSWYIKNSKEILLRKVGEVSIVNTEKAMEPNDYKKFKSQEMEEEWKQKVMHGQFLRDKEGVNWDKSWQWLAKGDLKGCTEALISSAQEQALRTNYTKFHIDKNADSPLCRMCREKGETISHLVSECGKLAQREYKKRHDNVARYIHWQLCNKGGLERAEKWYEQQPEAVIENENFKLLWDFTIHCDRFIEARRPDIVLVDKRKKEVKIIDIAVPGNSRVAEKELEKIEKYQMLREEIGHVWQMNKVTVIPAVIGTLGVISNKFERYMEKMGVQIEMAII

SEQ ID NO: 26693 - protein, 1125 aa, Morbakka virulenta
MSVMSYSNYEDNGVNETGASSEGLSPGRCPTVWQGGPGRYPASAKMKWNKELNVAVMECYFLSKPTDENGRPIRGYRRRMHNIWKERELPTLTEQRLCDQARAIRKNEWFTTVEMEEIRRSLEVDSDNEEGNDGNRQLPEIEVQEHGQTEEISVQINRTDEQDEQESCMIEEIVDITRSGQMCDTRGLKKVNRKVLSEWIGKVNKIIGKIRTENLTDTNKLIGAVAIYISKKVGLKTGNSRRKTKEEPWWKKRIKGTIQELRKHVNILQRNKRGELTRKERYKELDRKYQIKKKGENVVIEELKQKLQAKVAKLKRYEQRVNQFRINRLFQQDQKKVYQEFNGMSKSEGIAPDAEESEQFWSSIWGNEVQHNKDAGWLKELKDECGETRQDDIMIDCVMVSAQAKKIPNWKAPGPDGVQGYWIKKLTSLHDRIAKQMNEMINSRVPVPAWMTMGRTVLCQKDPQKGNVVDNYRPISCLPLMWKLMTGVIADSVYKMLEESDVLPTEQKGCRKKSRGTKDQLLIDKMILTDCKKRQKNLAMAWVDYKKAYDMVPHSWIVECLKMAQVPQNVTSFLQRSMRNWKTELMSCGESLGTVNIKRGIFQGDSLSPLIFVICMIPLSKVLRKAKAGYRLGDVKINHLLFMDDLKMFTKNKNEIDSLVSTVQVISQDIGMQFGVKKCGVIIMKRGKLVKSEDITLTNGESIREVSDEGYKYLGILELDKIKEKEMKELFRKEYLRRFNLIMKSKLNGRNKIFAANTWAVSLMRYGAGILRWTKNELQEIDRKTRKVMTINKELHPRSDVARIYVSRKRGGRGLMSCENCVKGEENNLSWYIKNSKEILLRKVGEVSIVNTEKAMEPNDYKKSKSQEMEEEWKQKVMHGQFLRDKEGVNWDKSWQWLAKGDLKGCTEALISSAQEQALRTNYTKFHIDKNADSPLCRMCREKGETISHLVSECGKLAQRDYKKRHDNVARYIHWQLCNKGGLERAEKWYEQQPEAVIENENFKLLWDFTIQCDRFIEARRPDIVLVDKRNKEVKIIDIAVPGDSRVAEKELEKIEKYQMLREEIGHVWQMNKVTVIPVVIGALGVISNKFERYMEKMGVKIEMAIIQKTALLETGRILRKVLSL

SEQ ID NO: 26694 - protein, 1125 aa, Morbakka virulenta
MSEMSYSNYKDNGVNVTGASSEGLSPGRCPTVWQGGPGRYPASAKMKWNKELNVAVMECYFLSKPTDENGRPIRGYRRRMHNIWKERELPTLTEQRLCDQARAIRKNEWFTTVEMEEIRRSLEVDSDNEEGNDGNRQLPEIEVQEHGQTEEISVQINRTDEQDEQESCMIEEIVDITRSGQMCDTRGLKKVNRKVLSEWIGKVNKIIGKIRTENLTDTNKLIGAVAIYISKKVGLKTGNSRRKTKEEPWWKKRIKGTIQELRKHVNILQRNKRGELTRKERYKELDRKYQIKKKGENVVIEELKQKLQAKVAKLKRYEQRVNQFRINRLFQQDQKKVYQEFNGMSKSEGIAPDAEESEQFWSSIWGNEVQHNKDAGWLKELKDECGETRQDDIMIDCVMVSAQAKKIPNWKAPGPDGVQGYWIKKLTSLHDRIAKQMNEMINSRVPVPAWMTMGRTVLCQKDPQKGNVVDNYRPISCLPLMWKLMTGVIADSVYKMLEESDVLPTEQKGCRKKSRGTKDQLLIDKMILTDCKKRQKNLAMAWVDYKKAYDMVPHSWIVECLKMAQVPQNVTSFLQRSMRNWKTELMSCGESLGTVNIKRGIFQGDSLSPLIFVICMIPLSKVLRKAKAGYRLGDVKINHLLFMDDLKMFTKNKNEIDSLVSTVQVISQDIGMQFGVKKCGVIIMKRGKLVKSEDITLTNGESIREVSDEGYKYLGILELDKIKEKEMKELFRKEYLRRFNLIMKSKLNGRNKIFAANTWAVSLMRYGAGILRWTKNELQEIDRKTRKVMTINKELHPRSDVARIYVSRKRGGRGLMSCENCVKGEENNLSWYIKNSKEILLRKVGEVSIVNTEKAMEPNDYKKFKSQEMEEEWKQKVMHGQFLRDKEGVNWDKSWQWLAKGDLKGCTEALISSAQEQALRTNYTKFHIDKNADSPLCRMCREKGETISHLVSECGKLAQREYKKRHDNVARYIHWQLCNKGGLERAEKWYEQQPEAVIENENFKLLWDFTIQCDRFIEARRPDIVLVDKRNKEVKIIDIAVPGDSRVAEKELEKIEKYQMLREEIGHVWQMNKVTVIPVVIGALGVISNKFERYMEKMGVKIEMAIIQKTALLETGRILRKVLSL

SEQ ID NO: 26695 - protein, 1125 aa, Morbakka virulenta
MSVMSYSNYEDNGVNETGASSEGLSPGRCPTVWQGGPGRYPASAKMKWNKELNVAVMECYFLSKPTDENGRPIRGYRRRMHNIWKERELPTLTEQRLCDQARAIRKNEWFTTVEMEEIRRSLEVDSDNEEGNDGNRQLPEIEVQEHGQTEEISVQINRTDEQDEQESCMIEEIVDITRSGQMCDTRGLKKVNRKVLSEWIGKVNKIIGKIRTENLTDTNKLIGAVAIYISKKVGLKTGNSRRKTKEEPWWKKRIKGTIQELRKHVNILQRNKRGELTRKERYKELDRKYQIKKKGENVVIEELKQKLQAKVAKLKRYEQRVNQFRINRLFQQDQKKVYQEFNGMSKSEGIAPDAEESEQFWSSIWGNEVQHNKDAGWLKELKDECGETRQDDIMIDCVMVSAQAKKIPNWKAPGPDGVQGYWIKKLTSLHDRIAKQMNEMINSRVPVPAWMTMGRTVLCQKDPQKGNVVDNYRPISCLPLMWKLMTGVIADSVYKMLEESDVLPTEQKGCRKKSRGTKDQLLIDKMILTDCKKRQKNLAMAWVDYKKAYDMVPHSWIVECLKMAQVPQNVTSFLQRSMRNWKTELMSCGESLGTVNIKRGIFQGDSLSPLIFVICMIPLSKVLRKAKAGYRLGDVKINHLLFMDDLKMFTKNKNEIDSLVSTVQVISQDIGMQFGVKKCGVIIMKRGKLVKSEDITLTNGESIREVSDEGYKYLGILELDKIKEKEMKELFRKEYLRRFNLIMKSKLNGRNKIFAANTWAVSLMRYGAGILRWTKNELQEIDRKTRKVMTINKELHPRSDVARIYVSRKRGGRGLMSCENCVKGEENNLSWYIKNSKEILLRKVGEVSIVNTEKAMEPNDYKKFKSQEMEEEWKQKVMHGQFLRDKEGVNWDKSWQWLAKGDLKGCTEALISSAQEQALRTNYTKFHIDKNADSPLCRMCREKGETISHLVSECGKLAQRDYKKRHDNVARYIHWQLCNKGGLERAEKWYEQQPEAVIENENFKLLWDFTIQCDRFIEARRPDIVLVDKRNKEVKIIDIAVPGDSRVAEKELEKIEKYQMLREEIGHVWQMNKVTVIPVVIGALGVISNKFERYMEKMGVKIEMAIIQKTALLETGRILRKVLSL

SEQ ID NO: 26696 - protein, 782 aa, Morbakka virulenta
MSKSEGIAPDAEESEQFWSSIWGNEVQHNKDAGWLKELKDECGETRQDDIMIDCVMVSAQAKKIPNWKAPGPDGVQGYWIKKLTSLHDRIAKQMNEMINSRVPVPAWMTMGRTVLCQKDPQKGNVVDNYRPISCLPLMWKLMTGVIADSVYKMLEESDVLPTEQKGCRKKSRGTKDQLLIDKMILTDCKKRQKNLAMAWVDYKKAYDMVPHSWIVECLKMAQVPQNVTSFLQRSMRNWKTELMSCGESLGTVNIKRGIFQGDSLSPLIFVICMIPLSKVLRKAKAGYRLGDVKINHLLFMDDLKMFTKNKNEIDSLVSTVQVISQDIGMQFGVKKCGVIIMKRGKLVKSEDITLTNGESIREVSDEGYKYLGILELDKIKEKEMKELFRKEYLRRFNLIMKSKLNGRNKIFAANTWAVSLMRYGAGILRWTKNELQEIDRKTRKVMTINKELHPRSDVARIYVSRKRGGRGLMSCENCVKGEENNLSWYIKNSKEILLRKVGEVSIVNTEKAMEPNDYKKFKSQEMEEEWKQKVMHGQFLRDKEGVNWDKSWQWLAKGDLKGCTEALISSAQEQALRTNYTKFHIDKNADSPLCRMCREKGETISHLVSECGKLAQREYKKRHDNVARYIHWQLCNKGGLERAEKWYEQQPEAVIENENFKLLWDFTIQCDRFIEARRPDIVLVDKRNKEVKIIDIAVPGDSRVAEKELEKIEKYQMLREEIGHVWQMNKVTVIPVVIGALGVISNKFERYMEKMGVKIEMAIIQKTALLETGRILRKVLSL

SEQ ID NO: 26697 - protein, 1157 aa, Morbakka virulenta
MSVMSYSNYEDNGVNETGASSEGLSPGRCPTVWQGGPGRYPASAKMKWNKELNVAVMECYFLSKPTDENGRPIRGYRRRMHNIWKERELPTLTEQRLCDQARAIRKNEWFTTVEMEEIRRSLEVDSDNEEGNDGNRQLPEIEVQEHGQTEEISVQINRTDEQDEQESCMIEEIVDITRSGQMCDTRGLKKVNRKVLSEWIGKVNKIIGKIRTENLTDTNKLIGAVAIYISKKVGLKTGNSRRKTKEEPWWKKRIKGTIQELRKHVNILQRNKRGELTRKERYKELDRKYQIKKKGENVVIEELKQKLQAKVAKLKRYEQRVNQFRINRLFQQDQKKVYQEFNGMSKSEGIAPDAEESEQFWSSIWGNEVQHNKDAGWLKELKDECGETRQDDIMIDCVMVSAQAKKIPNWKAPGPDGVQGYWIKKLTSLHDRIAKQMNEMINSRVPVPAWMTMGRTVLCQKDPQKGNVVDNYRPISCLPLMWKLMTGVIADSVYKMLEESDVLPTEQKGCRKKSRGTKDQLLIDKMILTDCKKRQKNLAMAWVDYKKAYDMVPHSWIVECLKMAQVPQNVTSFLQRSMRNWKTELMSCGESLGTVNIKRGIFQGDSLSPLIFVICMIPLSKVLRKAKAGYRLGDVKINHLLFMDDLKMFTKNKNEIDSLVSTVQVISQDIGMQFGVKKCGVIIMKRGKLVKSEDITLTNGESIREVSDEGYKYLGILELDKIKEKEMKELFRKEYLRRFNLIMKSKLNGRNKIFAANTWAVSLMRYGAGILRWTKNELQEIDRKTRKVMTINKELHPRSDVARIYVSRKRGGRGLMSCENCVKGEENNLSWYIKNSKEILLRKVGEVSIVNTEKAMEPNDYKKFKSQEMEEEWKQKVMHGQFLRDKEGVNWDKSWQWLAKGDLKGCTEALISSAQEQALRTNYTKFHIDKNADSPLCRMCREKGETISHLVSECGKLAQREYKKRHDNVARYIHWQLCNKGGLERAEKWYEQQPEAVIENENFKLLWDFTIQCDRFIEARRPDIVLVDKRNKEVKIIDIAVPGDSRVAEKELEKIEKYQMLREEIGHVWQMNKVTVIPVVIGALGVISNKFERYMEKMDVKIEMAIIQKMALLETGGYCEKSCLFRETGEGTLRPLVTCCYPLSKIKEQKNFPDKHV

SEQ ID NO: 26698 - protein, 1011 aa, Morbakka virulenta
MEEIRRSFGVDSDNEEGNDSNRQLPEIEVQEHGQTEEISVQINRTDEQSEQESCMIEEIVDITRSDQVYDTRELKKVNRNVLSEWIGKVSKIIGKIRTENLTDTNKLIGAVAVYILKKVGLKTGNSRRNTKKEPWWKRRIKGTIQELRKHVNILQRNKRGELTRKERYKELERKYQIKKKGENVVIEELKQKLQAKVAKLKRYEQRVNQFRINRLFQQDQKKVYQEFNGMSKSEGIAPDAEESEQFWSSIWGNEVQHNKDAGWLKELKDECGETRQDDIMIDCVMVSAQAKKIPNWKAPGPDGVQGYWIKKLTSLHDRIAKQMNEMINSRVPVPAWMTMGRTVLCQKDPQKGNVVDNYRPISCLPLMWKLMTGVIADSVYKMLEESDVLPTEQKGCRKKSRGTKDQLLIDKMILTDCKKRQKNLAMAWVDYKKAYDMVPHSWIVECLKMAQVPQNVTSFLQRSMRNWKTELMSCGESLGTVNIKRGIFQGDSLSPLIFVICMIPLSKVLRKAKAGYRLGDVKINHLLFMDDLKMFTKNKNEIDSLVSTVQVISQDIGMQFGVKKCGVIIMKRGKLVKSEDITLTNGESIREVSDEGYKYLGILELDKIKEKEMKELFRKEYLRRFNLIMKSKLNGRNKIFAANTWAVSLMRYGAGILRWTKNELQEIDRKTRKVMTINKELHPRSDVARIYVSRKRGGRGLMSCENCVKGEENNLSWYIKNSKEILLRKVGEVSIVNTEKAMEPNDYKKFKSQEMEEEWKQKVMHGQFLRDKEGVNWDKSWQWLAKGDLKGCTEALISSAQEQALRTNYTKFHIDKNADSPLCRMCREKGETISHLVSECGKLAQREYKKRHDNVARYIHWQLCNKGGLERAEKWYEQQPEAVIENENFKLLWDFTIQCDRFIEARRPDIVLVDKRNKEVKIIDIAVPGDSRVAEKELEKIEKYQMLREEIGHVWQMNKVTVIPIVIGALGVISDKFERYMEKMGVKIEMAIIQKTALLETGRILRKVLSL

SEQ ID NO: 26699 - protein, 1125 aa, Morbakka virulenta
MSVMSYSNYEDNGVNETGASSEGLSPGRCPTVWQSGPGRYPASAKMKWNKELNVAVMECYFLSKPTDENGRPIRGYRRRMHNIWKERELPTLTEQRLCDQARAIRKNEWFTTVEMEEIRRSLEVDSDNEEGNDGNRQLPEIEVQEHGQTEEISVQINRTDEQDEQESCMIEEIVDITRSGQMCDTRGLKKVNRKVLSEWIGKVNKIIGKIRTENLTDTNKLIGAVAIYISKKVGLKTGNSRRKTKEEPWWKKRIKGTIQELRKHVNILQRNKRGELTRKERYKELDRKYQIKKKGENVVIEELKQKLQAKVAKLKRYEQRVNQFRINRLFQQDQKKVYQEFNGMSKSEGIAPDAEESEQFWSSIWGNEVQHNKDAGWLKELKDECGETRQDDIMIDCVMVSAQAKKIPNWKAPGPDGVQGYWIKKLTSLHDRIAKQMNEMINSRVPVPAWMTMGRTVLCQKDPQKGNVVDNYRPISCLPLMWKLMTGVIADSVYKMLEESDVLPTEQKGCRKKSRGTKDQLLIDKMILTDCKKRQKNLAMAWVDYKKAYDMVPHSWIVECLKMAQVPQNVTSFLQRSMRNWKTELMSCGESLGTVNIKRGIFQGDSLSPLIFVICMIPLSKVLRKAKAGYRLGDVKINHLLFMDDLKMFTKNKNEIDSLVSTVQVISQDIGMQFGVKKCGVIIMKRGKLVKSEDITLTNGESIREVSDEGYKYLGILELDKIKEKEMKELFRKEYLRRFNLIMKSKLNGRNKIFAANTWAVSLMRYGAGILRWTKNELQEIDRKTRKVMTINKELHPRSDVARIYVSRKRGGRGLMSCENCVKGEENNLSWYIKNSKEILLRKVGEVSIVNTEKAMEPNDYKKFKSQEMEEEWKQKVMHGQFLRDKEGVNWDKSWQWLAKGDLKGCTEALISSAQEQALRTNYTKFHIDKNADSPLCRMCREKGETISHLVSECGKLAQREYKKRHDNVARYIHWQLCNKGGLERAEKWYEQQPEAVIENENFKLLWDFTIQCDRFIEARRPDIVLVDKRNKEVKIIDIAVPGDSRVAEKELEKIEKYQMLREEIGHVWQMNKVTVIPVVIGALGVISNKFERYMEKMGVKIEMAIIQKTALLETGRILRKVLSL

SEQ ID NO: 26700 - protein, 1125 aa, Morbakka virulenta
MSVMSYSNYEDNGVNETGASSEGLSPGRYPTVWQGGPGRYPASAKMKWNKELNVAVMECYFLSKPTDENGRPIRGYRRRMHNIWKERELPTLTEQRLCDQARAIRKNEWFTTVEMEEIRRSLEVDSDNEEGNDGNRQLPEIEVQEHGQTEEISVQINRTDEQDEQESCMIEEIVDITRSGQMCDTRGLKKVNRKVLSEWIGKVNKIIGKIRTENLTDTNKLIGAVAIYISKKVGLKTGNSRRKTKEEPWWKKRIKGTIQELRKHVNILQRNKRGELTRKERYKELDRKYQIKKKGENVVIEELKQKLQAKVAKLKRYEQRVNQFRINRLFQQDQKKVYQEFNGMSKSEGIAPDAEESEQFWSSIWGNEVQHNKDAGWLKELKDECGETRQDDIMIDCVMVSAQAKKIPNWKAPGPDGVQGYWIKKLTSLHDRIAKQMNEMINSRVPVPAWMTMGRTVLCQKDPQKGNVVDNYRPISCLPLMWKLMTGVIADSVYKMLEESDVLPTEQKGCRKKSRGTKDQLLIDKMILTDCKKRQKNLAMAWVDYKKAYDMVPHSWIVECLKMAQVPQNVTSFLQRSMRNWKTELMSCGESLGTVNIKRGIFQGDSLSPLIFVICMIPLSKVLRKAKAGYRLGDVKINHLLFMDDLKMFTKNKNEIDSLVSTVQVISQDIGMQFGVKKCGVIIMKRGKLVKSEDITLTNGESIREVSDEGYKYLGILELDKIKEKEMKELFRKEYLRRFNLIMKSKLNGRNKIFAANTWAVSLMRYGAGILRWTKNELQEIDRKTRKVMTINKELHPRSDVARIYVSRKRGGRGLMSCENCVKGEENNLSWYIKNSKEILLRKVGEVSIVNTEKAMEPNDYKKFKSQEMEEEWKQKVMHGQFLRDKEGVNWDKSWQWLAKGDLKGCTEALISSAQEQALRTNYTKFHIDKNADSPLCRMCREKGETISHLVSECGKLAQREYKKRHDNVARYIHWQLCNKGGLERAEKWYEQQPEAVIENENFKILWDFTIQCDRFIEARRPDIVLVDKRNKEVKIIDIAVPGDSRVAEKELEKIEKYQMLREEIGHVWQMNKVTVIPVVIGALGVISNKFERYMEKMGVKIEMAIIQKTALLETGRILRKVLSL

SEQ ID NO: 26701 - protein, 1125 aa, Morbakka virulenta
MSEMSYSNYEDNGVNETGASREGLSPGRCPTVWQGGPGRYPASAKMKWNKELNVAVMECYFLSKPTDENGRPIRGYRRRMHNIWKERELPTLTEQRLCDQARAIRKNEWFTTVEMEEIRRSLEVDSDNEEGNDGNRQLPEIEVQEHGQTEEISVQINRTDEQDEQESCMIEEIVDITRSGQMCDTRGLKKVNRKVLSEWIGKVNKIIGKIRTENLTDTNKLIGAVAIYISKKVGLKTGNSRRKTKEEPWWKKRIKGTIQELRKHVNILQRNKRGELTRKERYKELDRKYQIKKKGENVVIEELKQKLQAKVAKLKRYEQRVNQFRINRLFQQDQKKVYQEFNGMSKSEGIAPDAEESEQFWSSIWGNEVQHNKDAGWLKELKDECGETRQDDIMIDCVMVSAQAKKIPNWKAPGPDGVQGYWIKKLTSLHDRIAKQMNEMINSRVPVPAWMTMGRTVLCQKDPQKGNVVDNYRPISCLPLMWKLMTGVIADSVYKMLEESDVLPTEQKGCRKKSRGTKDQLLIDKMILTDCKKRQKNLAMAWVDYKKAYDMVPHSWIVECLKMAQVPQNVTSFLQRSMRNWKTELMSCGESLGTVNIKRGIFQGDSLSPLIFVICMIPLSKVLRKAKAGYRLGDVKINHLLFMDDLKMFTKNKNEIDSLVSTVQVISQDIGMQFGVKKCGVIIMKRGKLVKSEDITLTNGESIREVSDEGYKYLGILELDKIKEKEMKELFRKEYLRRFNLIMKSKLNGRNKIFAANTWAVSLMRYGAGILRWTKNELQEIDRKTRKVMTINKELHPRSDVARIYVSRKRGGRGLMSCENCVKGEENNLSWYIKNSKEILLRKVGEVSIVNTEKAMEPNDYKKFKSQEMEEEWKQKVMHGQFLRDKEGVNWDKSWQWLAKGDLKGCTEALISSAQEQALRTNYTKFHIDKNADSPLCRMCREKGETISHLVSECGKLAQREYKKRHDNVARYIHWQLCNKGGLERAEKWYEQQPEAVIENENFKLLWDFTIQCDRFIEARRPDIVLVDKRNKEVKIIDIAVPGDSRVAEKELEKIEKYQMLREEIGHVWQMNKVTVIPVVIGALGVISNKFERYMEKMGGKIEMAIIQKMALLETARILRKVLSL

SEQ ID NO: 26702 - protein, 1125 aa, Morbakka virulenta
MSVMSYSNYEDNGVNETGASSEGLSPGRCPTVWQGGPGRYPASAKMKWNKELNVAVMECYFLSKPTDENGRPIRGYRRRMHNIWKERELPTLTEQRLCDQARAIRKNEWFTTVEMEEIRRSLEVDSDNEEGNDGNRQLPEIEVQEHGQTEEISVQINRTDEQDEQESCMIEEIVDITRSGQMCDTRGLKKVNRKVLSEWIGKVNKIIGKIRTENLTDTNKLIGAVAIYISKKVGLKTGNSRRKTKEEPWWKKRIKGTIQELRKHVNILQRNKRGELTRKERYKELDRKYQIKKKGENVVIEELKQKLQAKVAKLKRYEQRVNQFRINRLFQQDQKKVYQEFNGMSKSEGIAPDAEESEQFWSSIWGNEVQHNKDAGWLKELKDECGETRQDDIMIDCVMVSAQAKKIPNWKAPGPDGVQGYWIKKLTSLHDRIAKQMNEMINSRVPVPAWMTMGRTVLCQKDPQKGNVVDNYRPISCLPLMWKLMTGVIADSVYKMLEESDVLPTEQKGCRKKSRGTKDQLLIDKMILTDCKKRQKNLAMAWVDYKKAYDMVPHSWIVECLKMAQVPQNVTSFLQRSMRNWKTELMSCGESLGTVNIKRGIFQGDSLSPLIFVICMIPLSKVLRKAKAGYRLGDVKINHLLFMDDLKMFTKNKNEIDSLVSTVQVISQDIGMQFGVKKCGVIIMKRGKLVKSEDITLTNGESIREVSDEGYKYLGILELDKIKEKEMKELFRKEYLRRFNLIMKSKLNGRNKIFAANTWAVSLMRYGAGILRWTKNELQEIDRKTRKVMTINKELHPRSDVARIYVSRKRGGRGLMSCENCVKGEENNLSWYIKNSKEILLRKVGEVSIVNTEKAMEPNDYKKFKSQEMEEEWKQKVMHGQFLRDKEGVNWDKSWQWLAKGDLKGCTEALISSAQEQALRTNYTKFHIDKNADSPLCRMCREKGETISHLVSECGKLAQREYKKRHDNVARYIHWQLCNKGGLERAEKWYEQQPEAVIENENFKLLWDFTIQCDRFIEARRPDIVLVDKRNKEVKIIDIAVPGDSRVAEKELEKIEKFQMLREEISHVWQMNKFTVIPVVIGVLGAISNKFERYMEKMVVKIEMTIIQKTALLETGRILRKVLSL

SEQ ID NO: 26703 - protein, 1069 aa, Morbakka virulenta
MECYFLSKPTDENGRPIRGYRRRMHNIWKERELPTLTEQRLCDQARAIRKNEWFTTVEMEEIRRSLEVDSDNEEGNDGNRQLPEIEVQEHGQTEEISVQINRTDEQDEQESCMIEEIVDITRSGQMCDTRGLKKVNRKVLSEWIGKVNKIIGKIRTENLTDTNKLIGAVAIYISKKVGLKTGNSRRKTKEEPWWKKRIKGTIQELRKHVNILQRNKRGELTRKERYKELDRKYQIKKKGENVVIEELKQKLQAKVAKLKRYEQRVNQFRINRLFQQDQKKVYQEFNGMSKSEGIAPDAEESEQFWSSIWGNEVQHNKDAGWLKELKDECGETRQDDIMIDCVMVSAQAKKIPNWKAPGPDGVQGYWIKKLTSLHDRIAKQMNEMINSRVPVPAWMTMGRTVLCQKDPQKGNVVDNYRPISCLPLMWKLMTGVIADSVYKMLEESDVLPTEQKGCRKKSRGTKDQLLIDKMILTDCKKRQKNLAMAWVDYKKAYDMVPHSWIVECLKMAQVPQNVTSFLQRSMRNWKTELMSCGESLGTVNIKRGIFQGDSLSPLIFVICMIPLSKVLRKAKAGYRLGDVKINHLLFMDDLKMFTKNKNEIDSLVSTVQVISQDIGMQFGVKKCGVIIMKRGKLVKSEDITLTNGESIREVSDEGYKYLGILELDKIKEKEMKELFRKEYLRRFNLIMKSKLNGRNKIFAANTWAVSLMRYGAGILRWTKNELQEIDRKTRKVMTINKELHPRSDVARIYVSRKRGGRGLMSCENCVKGEENNLSWYIKNSKEILLRKVGEVSIVNTEKAMEPNDYKKFKSQEMEEEWKQKVMHGQFLRDKEGVNWDKSWQWLAKGDLKGCTEALISSAQEQALRTNYTKFHIDKNADSPLCRMCREKGETISHLVSECGKLAQREYKKRHDNVARYIHWQLCNKGGLERAEKWYEQQPEAVIENENFKLLWDFTIQCDRFIEARRPDIVLVDKRNKEVKIIDIAVPGDSRVAEKELEKIEKYQMLREEIGHIWQMNKVTVIPVVIGALGVISNKFERYMEKMGVKIEMAIIQKTALLETGRILRKVLSL

SEQ ID NO: 26704 - protein, 1125 aa, Morbakka virulenta
MSVMSYSNYEDNGVNETGASSEGLSPGRCPTVWQGGPGRYPASAKMKWNKELNVAVMECYFLSKPTDENGRPIRGYRRRMHNIWKERELPTLTEQRLCDQARAIRKNEWFTTVEMEEIRRSLEVDSDNEEGNDGNRQLPEIEVQEHGQTEEISVQINRTDEQDEQESCMIEEIVDITRSGQMCDTRGLKKVNRKVLSEWIGKVNKIIGKIRTENLTDTNKLIGAVAIYISKKVGLKTGNSRRKTKEEPWWKKRIKGTIQELRKHVNILQRNKRGELTRKERYKELDRKYQIKKKGENVVIEELKQKLQAKVAKLKRYEQRVNQFRINRLFQQDQKKVYQEFNGMSKSEGIAPDAEESEQFWSSIWGNEVQHNKDAGWLKELKDECGETRQDDIMIDCVMVSAQAKKIPNWKAPGPDGVQGYWIKKLTSLHDRIAKQMNEMINSRVPVPAWMTMGRTVLCQKDPQKGNVVDNYRPISCLPLMWKLMTGVIADSVYKMLEESDVLPTEQKGCRKKSRGTKDQLLIDKMILTDCKKRQKNLAMAWVDYKKAYDMVPHSWIVECLKMAQVPQNVTSFLQRSMRNWKTELMSCGESLGTVNIKRGIFQGDSLSPLIFVICMIPLSKVLRKAKAGYRLGDVKINHLLFMDDLKMFTKNKNEIDSLVSTVQVISQDIGMQFGVKKCGVIIMKRGKLVKSEDITLTNGESIREVSDEGYKYLGILELDKIKEKEMKELFRKEYLRRFNLIMKSKLNGRNKIFAANTWAVSLMRYGAGILRWTKNELQEIDRKTRKVMTINKELHPRSDVARIYVSRKRGGRGLMSCENCVKGEENNLSWYIKNSKEILLRKVGEVSIVNTEKAMEPNDYKKFKSQEMEEEWKQKVMHGQFLRDKEGVNWDKSWQWLAKGDLKGCTEALISSAQEQALRTNYTKFHIDKNADSPLCRMCREKGETISHLVSECGKLAQREYKKRHDNVARYIHWQLCNKGGLERAEKWYEQQPEAVIENENFKLLWDFTIQCDRFIEARRPDIVLVDKRNKEVKIIDIAVPGDSRVAEKELEKIEKYQMLREEIGHVWQMNKVTVIPVVIGALGVISNKFERYMEKMGVKIEMAIIQKTALLETGRILRKVLFL

SEQ ID NO: 26705 - protein, 1080 aa, Morbakka virulenta
MKWNKELNVAVMECYFLSKPTDENGRPIRGYRRRMHNIWKERELPTLTEQRLCDQARAIRKNEWFTTVEMEEIRRSLEVDSDNEEGNDGNRQLPEIEVQEHGQTEEISVQINRTDEQDEQESCMIEEIVDITRRGQMCDTRGLKKVNRKVLSEWIGKVNKIIGKIRTENLTDTNKLIGAVAIYISKKVGLKTGNSRRKTKEEPWWKKRIKGTIQELRKHVNILQRNKRGELTRKERYKELDRKYQIKKKGENVVIEELKQKLQAKVAKLKRYEQRVNQFRINRLFQQDQKKVYQEFNGMSKSEGIAPDAEESEQFWSSIWGNEVQHNKDAGWLKELKDECGETRQDDIMIDCVMVSAQAKKIPNWKAPGPDGVQGYWIKKLTSLHDRIAKQMNEMINSRVPVPAWMTMGRTVLCQKDPQKGNVVDNYRPISCLPLMWKLMTGVIADSVYKMLEESDVLPTEQKGCRKKSRGTKDQLLIDKMILTDCKKRQKNLAMAWVDYKKAYDMVPHSWIVECLKMAQVPQNVTSFLQRSMRNWKTELMSCGESLGTVNIKRGIFQGDSLSPLIFVICMIPLSKVLRKAKAGYRLGDVKINHLLFMDDLKMFTKNKNEIDSLVSTVQVISQDIGMQFGVKKCGVIIMKRGKLVKSEDITLTNGESIREVSDEGYKYLGILELDKIKEKEMKELFRKEYLRRFNLIMKSKLNGRNKIFAANTWAVSLMRYGAGILRWTKNELQEIDRKTRKVMTINKELHPRSDVARIYVSRKRGGRGLMSCENCVKGEENNLSWYIKNSKEILLRKVGEVSIVNTEKAMEPNDYKKFKSQEMEEEWKQKVMHGQFLRDKEGVNWDKSWQWLAKGDLKGCTEALISSAQEQALRTNYTKFHIDKNADSPLCRMCREKGETISHLVSECGKLAQREYKKRHDNVARYIHWQLCNKGGLERAEKWYEQQPEAVIENENFKLLWDFTIQCDRFIEARRPDIVLVDKRNKEVKIIDIAVPGDSRVAEKELEKIEKYQMLREEIGHVWQMNKVTVIPVVIGALGVISNKFERYMEKMGVKIEMAIIQKTALLETGRILRKVLSL

SEQ ID NO: 26706 - protein, 1125 aa, Morbakka virulenta
MSVMSYSNYEDNGVNETGASSEGLLPGRCPTVWQGGPGRYPASAKMKWNKELNVAVMECYFLSKPTDENGRPIRGYRRRMHNIWKERELPTLTEQRLCDQARAIRKNEWFTTVEMEEIRRSLEVDSDNEEGNDGNRQLPEIEVQEHGQTEEISVQINRTDEQDEQESCMIEEIVDITRSGQMCDTRGLKKVNRKVLSEWIGKVNKIIGKIRTENLTDTNKLIGAVAIYISKKVGLKTGNSRRKTKEEPWWKKRIKGTIQELRKHVNILQRNKRGELTRKERYKELDRKYQIKKKGENVVIEELKQKLQAKVAKLKRYEQRVNQFRINRLFQQDQKKVYQEFNGMSKSEGIAPDAEESEQFWSSIWGNEVQHNKDAGWLKELKDECGETRQDDIMIDCVMVSAQAKKIPNWKAPGPDGVQGYWIKKLTSLHDRIAKQMNEMINSRVPVPAWMTMGRTVLCQKDPQKGNVVDNYRPISCLPLMWKLMTGVIADSVYKMLEESDVLPTEQKGCRKKSRGTKDQLLIDKMILTDCKKRQKNLAMAWVDYKKAYDMVPHSWIVECLKMAQVPQNVTSFLQRSMRNWKTELMSCGESLGTVNIKRGIFQGDSLSPLIFVICMIPLSKVLRKAKAGYRLGDVKINHLLFMDDLKMFTKNKNEIDSLVSTVQVISQDIGMQFGVKKCGVIIMKRGKLVKSEDITLTNGESIREVSDEGYKYLGILELDKIKEKEMKELFRKEYLRRFNLIMKSKLNGRNKIFAANTWAVSLMRYGAGILRWTKNELQEIDRKTRKVMTINKELHPRSDVARIYVSRKRGGRGLMSCENCVKGEENNLSWYIKNSKEILLRKVGEVSIVNTEKAMEPNDYKKFKSQEMEEEWKQKVMHGQFLRDKEGVNWDKSWQWLAKGDLKGCTEALISSAQEQALRTNYTKFHIDKNADSPLCRMCREKGETISHLVSECGKLAQREYKKRHDNVARYIHWQLCNKGGLERAEKWYEQQPEAVIENENFKLLWDFTIQCDRFIEARRPDIVLVDKRNKEVKIIDIAVPGDSRVAEKELEKIEKYQMLREEIGHVWQMNKVTVIPVVIGALGVISNKFERYMEKMGVKIEMAIIQKTALLETGRILRKVLSL

SEQ ID NO: 26707 - protein, 1125 aa, Morbakka virulenta
MSEMSYSNYEDNGVNETGASSEGLPPGRCPTVWQGGPGHYPVLAKMKWNKELNIAVMGCYFLSKPTDENGRPIQGYRRRMHNIWKERELPTLKEQRLCDQARAIRKNEWFTPVEMEEIRRSLEVDSDNEEGDDLNRQFPEIEVQEHGQTEEISVQINRTDEQSEQESCMIEEIVDITRRGQMCDTRGLKKVNRKVLSEWIGKVNKIIGKIRTENLTDTNKLIGAVAIYISKKVGLKTGNSRRKTKEEPWWKKRIKGTIQELRKHVNILQRNKRGELTRKERYKELDRKYQIKKKGENVVIEELKQKLQAKVAKLKRYEQRVNQFRINRLFQQDQKKVYQEFNGMSKSEGIAPDAEESEQFWSSIWGNEVQHNKDAGWLKELKDECGETRQDDIMIDCVMVSAQAKKIPNWKAPGPDGVQGYWIKKLTSLHDRIAKQMNEMINSRVPVPAWMTMGRTVLCQKDPQKGNVVDNYRPISCLPLMWKLMTGVIADSVYKMLEESDVLPTEQKGCRKKSRGTKDQLLIDKMILTDCKKRQKNLAMAWVDYKKAYDMVPHSWIVECLKMAQVPQNVTSFLQRSMRNWKTELMSCGESLGTVNIKRGIFQGDSLSPLIFVICMIPLSKVLRKAKAGYRLGDVKINHLLFMDDLKMFTKNKNEIDSLVSTVQVISQDIGMQFGVKKCGVIIMKRGKLVKSEDITLTNGESIREVSDEGYKYLGILELDKIKEKEMKELFRKEYLRRFNLIMKSKLNGRNKIFAANTWAVSLMRYGAGILRWTKNELQEIDRKTRKVMTINKELHPRSDVARIYVSRKRGGRGLMSCENCVKGEENNLSWYIKNSKEILLRKVGEVSIVNTEKAMEPNDYKKFKSQEMEEEWKQKVMHGQFLRDKEGVNWDKSWQWLAKGDLKGCTEALISSAQEQALRTNYTKFHIDKNADSPLCRMCREKGETISHLVSECGKLAQREYKKRHDNVARYIHWQLCNKGGLERAEKWYEQQPEAVIENENFKLLWDFTIQCDRFIEARRPDIVLVDKRNKEVKIIDIAVPGDSRVAEKELEKIEKYQMLREEIGHVWQMNKVTVIPVVIGALGVISNKFERYMEKMGVKIEMAIIQKTALLETARILRKVLSL

SEQ ID NO: 26708 - protein, 1069 aa, Morbakka virulenta
MECYFLSKPTDENGRPIRGYRRRMHNIWKERELPTLTEQRLCDQARAIRKNEWFTTVEMEEIRRSLEVDSDNEEGNDGNRQLPEIEVQEHGQTEEISVQINRTDEQDEQESCMIEEIVDITRSGQMCDTRGLKKVNRKVLSEWIGKVNKIIGKIRTENLTDTNKLIGAVAIYISKKVGLKTGNSRRKTKEEPWWKKRIKGTIQELRKHVNILQRNKRGELTRKERYKELDRKYQIKKKGENVVIEELKQKLQAKVAKLKRYEQRVNQFRINRLFQQDQKKVYQEFNGMSKSEGIAPDAEESEQFWSSIWGNEVQHNKDAGWLKELKDECGETRQDDIMIDCVMVSAQAKKIPNWKAPGPDGVQGYWIKKLTSLHDRIAKQMNEMINSRVPVPAWMTMGRTVLCQKDPQKGNVVDNYRPISCLPLMWKLMTGVIADSVYKMLEESDVLPTEQKGCRKKSRGTKDQLLIDKMILTDCKKRQKNLAMAWVDYKKAYDMVPHSWIVECLKMAQVPQNVTSFLQRSMRNWKTELMSCGESLGTVNIKRGIFQGDSLSPLIFVICMIPLSKVLRKAKAGYRLGDVKINHLLFMDDLKMFTKNKNEIDSLVSTVQVISQDIGMQFGVKKCGVIIMKRGKLVKSEDITLTNGESIREVSDEGYKYLGILELDKIKEKEMKELFRKEYLRRFNLIMKSKLNGRNKIFAANTWAVSLMRYGAGILRWTKNELQEIDRKTRKVMTINKELHPRSDVARIYVSRKRGGRGLMSCENCVKGEENNLSWYIKNSKEILLRKVGEVSIVNTEKAMEPNDYKKFKSQEMEEEWKQKVMHGQFLRDKEGVNWDKSWQWLAKGDLKGCTEALISSAQEQALRTNYTKFHIDKNADSPLCRMCREKGETISHLVSECGKLAQREYKKRHDNVARYIHWQLCNKGGLERAEKWYEQQPEAVIENENFKLLWDFTIQCDRFIEARRPDIVLVDKRNKEVKIIDIAVPGDSRVAEKELEKIEKYQMLREEIGHVWQMNKVTVIPVVTGALGVISDKFERYMEKIGVKIEMAIIQKTALLETGRILRKVLSL

SEQ ID NO: 26709 - protein, 1097 aa, Morbakka virulenta
MSEMSYSNYEDNGVNETGASSEGLSPRRCPTIWQGGPSRYPASAKMKWNKELTVAVMECYFLSKPTDENGRPIRGYRRRMHNIWKERELPKLTEQRLCDQARAIRKNECFTTVEMEEIRRSLKVDSDNEKGNDPNRQLPEIEVQEHGQREEISVQINRTDEHSEQESCMIEEIVDIRRSGQVCDTRGRKKVNRNVLSEWIGKVNKIIGKIRTENLTDTNKLIGAVAIYISKKVGLKTGNSRRKTKEEPWWKKRIKGTIQELRKHVNILQRNKRGELTRKERYKELDRKYQIKKKGENVVIEELKQKLQAKVAKLKRYEQRVNQFRINRLFQQDQKKVYQEFNGMSKSEGIAPDAEESEQFWSSIWGNEVQHNKDAGWLKELKDECGETRQDDIMIDCVMVSAQAKKIPNWKAPGPDGVQGYWIKKLTSLHDRIAKQMNEMINSRVPVPAWMTMGRTVLCQKDPQKGNVVDNYRPISCLPLMWKLMTGVIADSVYKMLEESDVLPTEQKGCRKKSRGTKDQLLIDKMILTDCKKRQKNLAMAWVDYKKAYDMVPHSWIVECLKMAQVPQNVTSFLQRSMRNWKTELMSCGESLGTVNIKRGIFQGDSLSPLIFVICMIPLSKVLRKAKAGYRLGDVKINHLLFMDDLKMFTKNKNEIDSLVSTVQVISQDIGMQFGVKKCGVIIMKRGKLVKSEDITLTNGESIREVSDEGYKYLGILELDKIKEKEMKELFRKEYLRRFNLIMKSKLNGRNKIFAANTWAVSLMRYGAGILRWTKNELQEIDRKTRKVMTINKELHPRSDVARIYVSRKRGGRGLMSCENCVKGEENNLSWYIKNSKEILLRKVGEVSIVNTEKAMEPNDYKKFKSQEMEEEWKQKVMHGQFLRDKEGVNWDKSWQWLAKGDLKGCTEALISSAQEQALRTNYTKFHIDKNADSPLCRMCREKGETISHLVSECGKLAQREYKKRHDNVARYIHWQLCNKGGLERAEKWYEQQPEAVIENENFKLLWDFTIQCDRFIEARRPDIVLVDKRNKEVKIIDIAVPGDSRVAKKELEKIEKYQMLREEIGHVRQMNKVTLIPVVIGALGVISNKFEDTWRK

SEQ ID NO: 26710 - protein, 1093 aa, Morbakka virulenta
MSVMSYSNYEDNGVNETGASSEGLSPGRCPTVWQGGPGRYPASAKMKWNKELNVAVMECYFLSKPTDENGRPIRGYRRRMHNIWKERELPTLTEQRLCDQARAIRKNEWFTTVEMEEIRRSLEVDSDNEEGNDGNRQLPEIEVQEHGQTEEISVQINRTDEQDEQESCMIEEIVDITRSGQMCDTRGLKKVNRKVLSEWIGKVNKIIGKIRTENLTDTNKLIGAVAIYISKKVGLKTGNSRRKTKEEPWWKKRIKGTIQELRKHVNILQRNKRGELTRKERYKELDRKYQIKKKGENVVIEELKQKLQAKVAKLKRYEQRVNQFRINRLFQQDQKKVYQEFNGMSKSEGIAPDAEESEQFWSSIWGNEVQHNKDAGWLKELKDECGETRQDDIMIDCVMVSAQAKKIPNWKAPGPDGVQGYWIKKLTSLHDRIAKQMNEMINSRVPVPAWMTMGRTVLCQKDPQKGNVVDNYRPISCLPLMWKLMTGVIADSVYKMLEESDVLPTEQKGCRKKSRGTKDQLLIDKMILTDCKKRQKNLAMAWVDYKKAYDMVPHSWIVECLKMAQVPQNVTSFLQRSMRNWKTELMSCGESLGTVNIKRGIFQGDSLSPLIFVICMIPLSKVLRKAKAGYRLGDVKINHLLFMDDLKMFTKNKNEIDSLVSTVQVISQDIGMQFGVKKCGVIIMKRGKLVKSEDITLTNGESIREVSDEGYKYLGILELDKIKEKEMKELFRKEYLRRFNLIMKSKLNGRNKIFAANTWAVSLMRYGAGILRWTKNELQEIDRKTRKVMTINKELHPRSDVARIYVSRKRGGRGLMSCENCVKGEENNLSWYIKNSKEILLRKVGEVSIVNTEKAMEPNDYKKFKSQEMEEEWKQKVMHGQFLRDKEGVNWDKSWQWLAKGDLKGCTEALISSAQEQALRTNYTKFHIDKNADSPLCRMCREKGETISHLVSECGKLAQREYKKRHDNVARYIHWQLCNKGGLERAEKWYEQQPEAVIENENFKLLWDFTIQCDRFIEARRPDIVLVDKRNKEVKIIDIAVPGDSRVAEKELEKIEKYQMLREEIGHVWQMNKVTVIPVVIGALGVISNKFER

SEQ ID NO: 26711 - protein, 1173 aa, Morbakka virulenta
MKYRVGVRRGLVCLMGRGNSSALVSSPPRDGVSIKTPVVLQPKIHNPLMSEMFYSYYEDNGVNETGASSQGLSPGRCPTVPQDGPSRYQASAKMKWNKELNVAVMECYFLSKPTDENGRPIRGYRRRMHNIWKERELPTLTEQRLCDQARAIRKNEWFTTVEMEEIRRSLEVDSDNEEGNDGNRQLPEIEVQEHGQTEEISVQINRTDEQDEQESCMIEEIVDITRSGQMCDTRGLKKVNRKVLSEWIGKVNKIIGKIRTENLTDTNKLIGAVAIYISKKVGLKTGNSRRKTKEEPWWKKRIKGTIQELRKHVNILQRNKRGELTRKERYKELDRKYQIKKKGENVVIEELKQKLQAKVAKLKRYEQRVNQFRINRLFQQDQKKVYQEFNGMSKSEGIAPDAEESEQFWSSIWGNEVQHNKDAGWLKELKDECGETRQDDIMIDCVMVSAQAKKIPNWKAPGPDGVQGYWIKKLTSLHDRIAKQMNEMINSRVPVPAWMTMGRTVLCQKDPQKGNVVDNYRPISCLPLMWKLMTGVIADSVYKMLEESDVLPTEQKGCRKKSRGTKDQLLIDKMILTDCKKRQKNLAMAWVDYKKAYDMVPHSWIVECLKMAQVPQNVTSFLQRSMRNWKTELMSCGESLGTVNIKRGIFQGDSLSPLIFVICMIPLSKVLRKAKAGYRLGDVKINHLLFMDDLKMFTKNKNEIDSLVSTVQVISQDIGMQFGVKKCGVIIMKRGKLVKSEDITLTNGESIREVSDEGYKYLGILELDKIKEKEMKELFRKEYLRRFNLIMKSKLNGRNKIFAANTWAVSLMRYGAGILRWTKNELQEIDRKTRKVMTINKELHPRSDVARIYVSRKRGGRGLMSCENCVKGEENNLSWYIKNSKEILLRKVGEVSIVNTEKAMEPNDYKKFKSQEMEEEWKQKVMHGQFLRDKEGVNWDKSWQWLAKGDLKGCTEALISSAQEQALRTNYTKFHIDKNADSPLCRMCREKGETISHLVSECGKLAQREYKKRHDNVARYIHWQLCNKGGLERAEKWYEQQPEAVIENENFKLLWDFTIQCDRFIEARRPDIVLVDKRNKEVKIIDIAVPGDSRVAEKELEKIEKYQMLREEIGHVWQMNKVTVIPVVIGALGVISDKFERYIEKMGVKVEMAIIQKTALLETARILRKVLSL

SEQ ID NO: 26712 - protein, 939 aa, Morbakka virulenta
MCDTRGLKKVNRNVLSEWIGKVNKIIGKIRTENLTNTNKLIGAVAIYISKKVGLKTGNARRNTKKEPWWKRRIKGTIQELRKHVNILQRNKRGELTRKERYKELDRKYQIKKKGENVVIEELKQKLQAKVAKLKRYEQRVNQFRINRLFQQDQKKVYQEFNGMSKSEGIAPDAEESEQFWSSIWGNEVQHNKDAGWLKELKDECGETRQDDIMIDCVMVSAQAKKIPNWKAPGPDGVQGYWIKKLTSLHDRIAKQMNEMINSRVPVPAWMTMGRTVLCQKDPQKGNVVDNYRPISCLPLMWKLMTGVIADSVYKMLEESDVLPTEQKGCRKKSRGTKDQLLIDKMILTDCKKRQKNLAMAWVDYKKAYDMVPHSWIVECLKMAQVPQNVTSFLQRSMRNWKTELMSCGESLGTVNIKRGIFQGDSLSPLIFVICMIPLSKVLRKAKAGYRLGDVKINHLLFMDDLKMFTKNKNEIDSLVSTVQVISQDIGMQFGVKKCGVIIMKRGKLVKSEDITLTNGESIREVSDEGYKYLGILELDKIKEKEMKELFRKEYLRRFNLIMKSKLNGRNKIFAANTWAVSLMRYGAGILRWTKNELQEIDRKTRKVMTINKELHPRSDVARIYVSRKRGGRGLMSCENCVKGEENNLSWYIKNSKEILLRKVGEVSIVNTEKAMEPNDYKKFKSQEMEEEWKQKVMHGQFLRDKEGVNWDKSWQWLAKGDLKGCTEALISSAQEQALRTNYTKFHIDKNADSPLCRMCREKGETISHLVSECGKLAQREYKKRHDNVARYIHWQLCNKGGLERAEKWYEQQPEAVIENENFKLLWDFTIQCDRFIEARRPDIVLVDKRNKEVKIIDIAVPGDSRVAEKELEKIEKYQMLREEIGHVWQMNKVTVIPVVIGALGVISNKFERYMEKMGVKIEMAIIQKTALLETARILR

SEQ ID NO: 26713 - protein, 1011 aa, Morbakka virulenta
MEEIRRSLEVDSDNEEGNDENRQLPEIEVQEHGQTEEISMQINKTDEQGEQESCMIEEIVDITRLGQMCDTRGLKKVNRKVLSEWIGKVNKIIGKIRTENLTDTNKLIGAVAINISKKVGLKTGNSRRKTKEEPWWKKRIKGTIQELRKHVNILQRNKRGELTRKERYKELDRKYQIKKKGENVVIEELKQKLQAKVAKLKRYEQRVNQFRINRLFQQDQKKVYQEFNGMSKSEGIAPDAEESEQFWSSIWGNEVQHNKDAGWLKELKDECGETRQDDIMIDCVMVSAQAKKIPNWKAPGPDGVQGYWIKKLTSLHDRIAKQMNEMINSRVPVPAWMTMGRTVLCQKDPQKGNVVDNYRPISCLPLMWKLMTGVIADSVYKMLEESDVLPTEQKGCRKKSRGTKDQLLIDKMILTDCKKRQKNLAMAWVDYKKAYDMVPHSWIVECLKMAQVPQNVTSFLQRSMRNWKTELMSCGESLGTVNIKRGIFQGDSLSPLIFVICMIPLSKVLRKAKAGYRLGDVKINHLLFMDDLKMFTKNKNEIDSLVSTVQVISQDIGMQFGVKKCGVIIMKRGKLVKSEDITLTNGESIREVSDEGYKYLGILELDKIKEKEMKELFRKEYLRRFNLIMKSKLNGRNKIFAANTWAVSLMRYGAGILRWTKNELQEIDRKTRKVMTINKELHPRSDVARIYVSRKRGGRGLMSCENCVKGEENNLSWYIKNSKEILLRKVGEVSIVNTEKAMEPNDYKKFKSQEMEEEWKQKVMHGQFLRDKEGVNWDKSWQWLAKGDLKGCTEALISSAQEQALRTNYTKFHIDKNADSPLCRMCREKGETISHLVSECGKLAQREYKKRHDNVARYIHWQLCNKGGLERAEKWYEQQPEAVIENENFKLLWDFTIQCDRFIEARRPDIVLVDKRNKEVKIIDIAVPGDSRVAEKELEKIEKYQMLREEIGHVWQMNKVTVIPVVIGALGVISNKFERYMEKMGVKIEMPIIQKTALLETGRILRKVLSL

SEQ ID NO: 26714 - protein, 1125 aa, Morbakka virulenta
MSVMSYSNYEDNGVNETGASSEGLSPGRCPTVWQGGPGRYPASAKMKWNKELNVAVMECYFLSKPTDENGRPIRGYRRRMHNIWKERELPTLTEQRLCDQARAIRKNEWFTTVEMEEIRRSLEVDSDNEEGNDGNRQLPEIEVQEHGQTEEISVQINRTDEQDEQESCMIEEIVDITRSGQMCDTRGLKKVNRKVLSEWIGKVNKIIGKIRTENLTDTNKLIGAVAIYISKKVGLKTGNSRRKTKEEPWWKKRIKGTIQELRKHVNILQRNKRGELTRKERYKELDRKYQIKKKGENVVIEELKQKLQAKVAKLKRYEQRVNQFRINRLFQQDQKKVYQEFNGMSKSEGIAPDAEESEQFWSSIWGNEVQHNKDAGWLKELKDECGETRQDDIMIDCVMVSAQAKKIPNWKAPGPDGVQGYWIKKLTSLHDRIAKQMNEMINSRVPVPAWMTMGRTVLCQKDPQKGNVVDNYRPISCLPLMWKLMTGVIADSVYKMLEESDVLPTEQKGCRKKSRGTKDQLLIDKMILTDCKKRQKNLAMAWVDYKKAYDMVPHSWIVECLKMAQVPQNVTSFLQRSMRNWKTELMSCGESLGTVNIKRGIFQGDSLSPLIFVICMIPLSKVLRKAKAGYRLGDVKINHLLFMDDLKMFTKNKNEIDSLVSTVQVISQDIGMQFGVKKCGVIIMKRGKLVKSEDITLTNGESIREVSDEGYKYLGILELDKIKEKEMKELFRKEYLRRFNLIMKSKLNGRNKIFAANTWAVSLMRYGAGILRWTKNELQEIDRKTRKVMTINKELHPRSDVARIYVSRKRGGRGLMSCENCVKGEENNLSWYIKNSKEILLRKVGEVSIVNTEKAMEPNDYKKFKSQEMEEEWKQKVMHGQFLRDKEGVNWDKSWQWLAKGDLKGCTEALISSAQEQALRTNYTKFHIDKNADSPLCRMCREKGETISHLVSECGKLAQREYKKRHDNVARYIHWQLCNKGGLERAEKWYEQQPEAVIENENFKLLWDFTIQCDRFIEARRPDIVLVDKRNKEVKIIDIAVPGDSRVAEKELEKIEKYQMLREEIGHVWQMNKVTVIPVVIGALGVISNKFERYMEKMGVKIEMAIIQKTALLETGRILRKALSL

SEQ ID NO: 26715 - protein, 1125 aa, Morbakka virulenta
MSVMSYSNYEDNGVNETGASSEGLSPGRYPTVWQGGPGRYPASAKMKWNKELNVAVMECYFLSKPTDENGRPIRGYRRRMHNIWKERELPTLTEQRLCDQARAIRKNEWFTTVEMEEIRRSLEVDSDNEEGNDGNRQLPEIEVQEHGQTEEISVQINRTDEQDEQESCMIEEIVDITRSGQMCDTRGLKKVNRKVLSEWIGKVNKIIGKIRTENLTDTNKLIGAVAIYISKKVGLKTGNSRRKTKEEPWWKKRIKGTIQELRKHVNILQRNKRGELTRKERYKELDRKYQIKKKGENVVIEELKQKLQAKVAKLKRYEQRVNQFRINRLFQQDQKKVYQEFNGMSKSEGIAPDAEESEQFWSSIWGNEVQHNKDAGWLKELKDECGETRQDDIMIDCVMVSAQAKKIPNWKAPGPDGVQGYWIKKLTSLHDRIAKQMNEMINSRVPVPAWMTMGRTVLCQKDPQKGNVVDNYRPISCLPLMWKLMTGVIADSVYKMLEESDVLPTEQKGCRKKSRGTKDQLLIDKMILTDCKKRQKNLAMAWVDYKKAYDMVPHSWIVECLKMAQVPQNVTSFLQRSMRNWKTELMSCGESLGTVNIKRGIFQGDSLSPLIFVICMIPLSKVLRKAKAGYRLGDVKINHLLFMDDLKMFTKNKNEIDSLVSTVQVISQDIGMQFGVKKCGVIIMKRGKLVKSEDITLTNGESIREVSDEGYKYLGILELDKIKEKEMKELFRKEYLRRFNLIMKSKLNGRNKIFAANTWAVSLMRYGAGILRWTKNELQEIDRKTRKVMTINKELHPRSDVARIYVSRKRGGRGLMSCENCVKGEENNLSWYIKNSKEILLRKVGEVSIVNTEKAMEPNDYKKFKSQEMEEEWKQKVMHGQFLRDKEGVNWDKSWQWLAKGDLKGCTEALISSAQEQALRTNYTKFHIDKNADSPLCRMCREKGETISHLVSECGKLAQREYKKRHDNVARYIHWQLCNKGGLERAEKWYEQQPEAVIENENFKLLWDFTIQCDRFIEARRPDIVLVDKRNKEVKIIDIAVPGDSRVAEKELEKIEKYQMLREEIGHVWQMNKVTVIPVVIGALGVISNKFERYMEKMGVKIEMAIMQKTALLEKGRILRKVLSL

SEQ ID NO: 26716 - protein, 1125 aa, Morbakka virulenta
MSVMSYSNYEDNGVNETGASSEGLSPGRYPTVWQGGPGRYPASAKMKWNKELNVAVMECYFLSKPTDENGRPIRGYRRRMHNIWKERELPTLTEQRLCDQARAIRKNEWFTTVEMEEIRRSLEVDSDNEEGNDGNRQLPEIEVQEHGQTEEISVQINRTDEQDEQESCMIEEIVDITRSGQMCDTRGLKKVNRKVLSEWIGKVNKIIGKIRTENLTDTNKLIGAVAIYISKKVGLKTGNSRRKTKEEPWWKKRIKGTIQELRKHVNILQRNKRGELTRKERYKELDRKYQIKKKGENVVIEELKQKLQAKVAKLKRYEQRVNQFRINRLFQQDQKKVYQEFNGMSKSEGIAPDAEESEQFWSSIWGNEVQHNKDAGWLKELKDECGETRQDDIMIDCVMVSAQAKKIPNWKAPGPDGVQGYWIKKLTSLHDRIAKQMNEMINSRVPVPAWMTMGRTVLCQKDPQKGNVVDNYRPISCLPLMWKLMTGVIADSVYKMLEESDVLPTEQKGCRKKSRGTKDQLLIDKMILTDCKKRQKNLAMAWVDYKKAYDMVPHSWIVECLKMAQVPQNVTSFLQRSMRNWKTELMSCGESLGTVNIKRGIFQGDSLSPLIFVICMIPLSKVLRKAKAGYRLGDVKINHLLFMDDLKMFTKNKNEIDSLVSTVQVISQDIGMQFGVKKCGVIIMKRGKLVKSEDITLTNGESIREVSDEGYKYLGILELDKIKEKEMKELFRKEYLRRFNLIMKSKLNGRNKIFAANTWAVSLMRYGAGILRWTKNELQEIDRKTRKVMTINKELHPRSDVARIYVSRKRGGRGLMSCENCVKGEENNLSWYIKNSKEILLRKVGEVSIVNTEKAMEPNDYKKFKSQEMEEEWKQKVMHGQFLRDKEGVNWDKSWQWLAKGDLKGCTEALISSAQEQALRTNYTKFHIDKNADSPLCRMCREKGETISHLVSECGKLAQREYKKRHDNVARYIHWQLCNKGGLERAEKWYEQQPEAVIENENFKLLWDFTIQCDRFIEARRPDIVLVDKRNKEVKIIDIAVPGDSRVAEKELEKIEKYQMLREEIGHVWQMNKVTVIPVVIGALGVISNKFERYMEKMGVKIEMAIIQKTALLETGRILRIVLSL

SEQ ID NO: 26717 - protein, 1134 aa, Pimephales promelas
MEDGPNRTDNMVLTDMETTNEQRILRSCSCGWSKVTTYRGLRIHQGKAKCGGKDQRQTCTAQAGQTRRSQSRVEHHSVTDFTIADGHREAEQPQQQQAQSQQQAQSLGRESHIETPNGSPVRQAMERPARQSKINWPKSIEKAAWESFDHDLYTILKNLQRGSSITKLNLFGSIVYGEGKERFGEVIQRKNIPREVGRREQEIHKLVKERRLLRKSWKKADETEKEGLKALWAQIRSRLATLRRAERIRRRRSKKEKERASFFRDPFRYARSLLEDKKSGKLEATKQELEEHIKKQLTDQKKNIPLGSPGHVPRPAEPATEFDTTPPKWAEVKFVVDRARSASAPGPNGVPYKVYKNCPMVLKLLWRLMRVVWKAQDIPSEWSCAVTTFIPKEQNSCNINQFRGIALLNVEGKIFFSVMAKRLTNYLLNNCYIDTSCQKAGVPGFPGCVEHSTMIWEQIQTAKREKQDLHVVWLDLENAYGSIPHQLITFALEFFHIPPSIRNLISNYFHSFTVCYTTQMATSGWHYLEKGIAMGCSVSPILFTAAFEIILIGGRQMVRGVRGQSGQRLPALRSYMDDVTILLQTAACTNRLMKRLEELLSWARMRIKPAKSRSLSIRKGARIDHIFFTVNSKKIPILADQPIRSLGKLYTADLSDKHMTNTIMLQLTEGLMRIDKSHLPGKFKIWCYQFILYRRLMWPLKMCEIATSNVQKMDSKANNYIRKWLGLPRGLSSVGLFGRNALQLPLRSILLGYRQEKARLVLELRDSPDPSVRNTKAPVRTGRKWRAELAVDQAISRLKHQEIVGRTQSGRTGLGWGTAPKRWSKATKKERKELVISEVVRTEEENYQIKALSQSQQGRWTTWEGVISRTVGWADMWRIPQARLSFLIRSTYDTLPSPSNLCLWYGSEECCQLCNAPNPNLQHILSSCKTALTQGRYRWRHDRVLRKLAEILEVRRAESARERRPLKLRRPIHFVREGGGATKITQPQRSALAGSCDWNLRADLDRQLRFPTEITTTNLRPDIILWSATTRAVILAELTVPWEGGMEAAHERKKDCYLDLTAECREAGWSAVSYPVEVGCRGFVGTSTQRFLKSMGVTGPKLRNAMKVLAEEAEQGSFWLWLRRKDQAWGKQGS

SEQ ID NO: 26718 - protein, 933 aa, Pimephales promelas
MERPARQSKVNWPKSIEKAAWESFDHDLYTILKNLQRGSSITKLNLFGSIVYGEGKERFGEVIQRKNIPREVGRREQEIHKLVKERRLLRKSWKKADETEKEGLKALWAQIRSRLATLRRAERIRRRRSKKEKERASFFRDPFRYARSLLEDKKSGKLEATKQELEDHIKKQLTDQKKNIPLGSPGHVPRPAEPATEFDTTPPKWAEVKFVVDRARSASAPGPNGVPYKVYKNCPMVLKLLWRLMRVVWKAQDIPSEWSCAVTTFIPKEQNSCNINQFRGIALLNVEGKIFFSVMAKRLTNYLLDNCYIDTSCQKAGVPGFPGCVEHSTMIWEQIQTAKREKQDLHVVWLDLENAYGSIPHQLITFALEFFHIPPSIRNLISNYFRSFTVCYTTQMATSGWHYLEKGIAMGCSVSPILFTAAFEIILISGRQMVRGVRGQSGQRLPALRSYMDDVTILLQTAACTNRLMKRLEELLSWARMRIKPAKSRSLSIRKEARIDHIFFTVNSKKIPILADQPIWSLGKLYTADLSDKHMTNTIMLQLTEGLMRIDKSHLPGKFKIWCYQFILYRRLMWPLKMCEITTSNVQKMDSKANNYIRKWLGLPRGLSSVGLFGRNALQLPLRSILLGYRQEKARLVLELRDSPDPSVRNTKAPVRTGRKWRAELAVDQAISRLKHQEIVGRTQSGRTGLGWGTAPKRWSKATKKERKELVISEVVRTEEENYQIKALSQSQQGRWTTWEGVISRTVGWADMWRIPQARLSFLIRSTYDTLPSPSNLCLWYGSEECCQLCNAPNPNLQHILSSCKTALTQGRYRWRHDRVLRKLAEILEVRRAESARERRPLKLRRPIHFVREGGGATKITQPQRSALAGSCDWNLRADLDRQLRFPTEITTTNLRPDIILWSAMKVLAEEAEQGSFWLWLRRKDQAWGKQGS

SEQ ID NO: 26719 - protein, 1087 aa, Myripristis murdjan
MQTCTAQAGQTRRSQSQVEHHSATDAVIASGESDQVHPSQKDSQQPQPIPQEVHQIRTPTREPSIGSTEKPARKPRIKWPKAGDKDGWSSFDETLHTILQGTLKGSATSKLNIFGHIIYEEGRERFGEMPQKNISPRGMGRREREILQLVRERRLLRKAWRRAEEEEKDGLQNLWSQIRCRLVHLRRAEQIRKRRSRKEKARASFFRDPFKYARGLLEEKKSGTLQSSEQELEEHIKDQVSDRLKESPLGPPGHIPRPPEPTSPFDVSPPKWFEVKQVVERARAASAPGPNGVPYSVYKNCPRTLKLLWRLMCTAWRTLSIPPVWSRAVTTFIPKEKDSCNITQFRGIALLNVEGKIFFSVMAKRMTSYLLANNYIDTSCQKAGVPGFPGCVEHSAMIWEQIQSARQNKSDLHVVWLDLANAYGSVPHQLIHFALDFFHIPSHIQSLVARYFDNFHICYTTQEISTGWYRLEKGIAMGCSISPILFTAAFEIILIGGRQMVRGIRSKSGQRLPALRSYMDDVTTLLQTAACTARLLKRLEELLTWARMRIKPAKSRSLSIRKGVRNDNISFSVDGENIPLLVDQPVRSLGRLYTSDLSDKHMAASVGSQLLDGLGKIDQSLLPGKFKVWCYQFTLYQRLMWPLKLCDISLSTAQKLDSKANSYIRKWLGLPRCLSTTALFGRTTLKLPLKSISLGYRQEKVRLLFELRESPDPSVRNAKAQVRTGRKWDAAKAVDQAITRLKHLEVVGLQQQGKAGFGWGPTPKMWSKASRKERKDLVISEVVKIEEESYRIKAVSQQQQGKWMTWEAVVDRTVTWADMWRMPQARLSFMIRATYDTLPSPRNLHLWFNTEEICQLCSSSNPSLQHILSGCKVALTQGRYRWRHDRVLRKLAEILETRRLEANASPQTSQRRIQFIRQGSGSRSTSTKQRSLLSPGGGWSMRADLDQQLKFPQDITSTTLRPDIVLWSVPTRTVIMAELTVPWEDGMDTAFERKKERYTDLADACSQAGWKAAVFPVEIGCRGFAGTSTQRLMVSLGVTGSKLRKALKDLAEEAEKTEHGGSKELRTPKAAWYAVTLDSGNGRPCHA

SEQ ID NO: 26720 - protein, 1141 aa, Myripristis murdjan
MLIMSGPPRGGMEDGPIRTDDMATTGTETTKEQRILRECSCGWSKTTTYQGLRIHQGRIKCGGGSQMQTCTAQAGQTRRSQSQVEHHSATDAVIASGESDQVHPSQQDSQQPQPIPQEVHQIRTPTREPSVGSTEKPARKPRIKWPKAGDKDGWSSFDETLHTILQGTLKGSATSKLNIFGHIIYEEGRERFGEMPQKNISPRGMGRREREILQLVRERRLLRKAWRRAEEEEKDGLQNLWSQIRCRLVHLRRAERIRKRRSRKEKARASFFRDPFKYARGLLEEKKSGTLQTSEQELEEHIKDQVSDSLKESPLGPSGHIPRPPEPTSPFDVSPPKWFEVKQVVERARAASAPGPNGVPYSVYKNCPRTLKLLWRLMCTAWRTLSIPPVWSRAVTTFIPKEKDSCNITQFRGIALLNVEGKIFFSVMAKRMTSYLLANNYIDTSCQKAGVPGFPGCVEHSAMIWEQIQSARQNKSDLHVVWLDLANAYGSVPHQLIHFALDFFHIPSHIQSLVARYFDNFHICYTTQEISTGWYRLEKGIAMGCSISPILFTAAFEIILIGGRQMVRGIRSKSGQRLPALRSYMDDVTTLLQTAACTVRLLKRLEELLTWARMRIKPAKSRSLSIRKGVRNDNISFSVDGENIPLLVDQPVRSLGRLYTSDLSDKHMAASVGSQLLDGLGKIDQSLLPGKFKVWCYQFTLYQRLMWPLKLCDISLSTAQKLDSKANSYIRKWLGLPRCLSTTALFGRTTLKLPLKSISLGYRQEKVRLLFELRESPDPSVRNAKAQVRTGRKWDAAKAVDQAITRLKHLEVVGLQQQGKAGFGWGPTPKMWSKASRKERKDLVISEVVKIEEESYRIKAVSQQQQGKWMTWEAVVDRSITWADMWRMPQARLSFMIRATYDTLPSPRNLHLWFNTEEICQLCSSSNPSLQHILSGCKVALTQGRYRWRHDRVLRKLAEILETRRLEANASPQTSQRRIQFIRQGSGSRSTSTKQRSLLSPGGGWSMRADLDQQLKFPQDITSTTLRPDIVLWSVPTRTVIMAELTVPWEDGMDTAFERKKERYTDLAEACSQAGWKAAVFPVEIGCRGFAGTSTQRLMVSLGVTGSKLRKALKDLAEEAEQGSFWLWLRRKDRAWGKQGA

SEQ ID NO: 26721 - protein, 1130 aa, Myripristis murdjan
MEDGPIRTDDMATTGTETTKEQRILRECSCGWSKTTTYQGLRIHQGRMKCGGGSQMQTCTAQAGQTRRSQSQVEHHSATDAVIASGESDQVHPSQQDSQQPQPIPQEVHQIRTPTREPSIGSTEKPARKPRIKWPKAGDKDGWSSFDETLHTILQGTLKGSATSKLNIFGHIIYEEGRERFGEMPQKNISPRGMGRREREILQLVRERRLLRKAWRRAEEEEKDGLQNLWSQIRCRLVHLRRAERIRKRRSRKEKARASFFRDPFKYARGLLEEKKSGTLQTSEQELEEHIKDQVSDSLKESPLGPPGHIPRPPEPTSPFDVSPPKWFEVKQVVERARAASAPGPNGVPYSVYKNCPRTLKLLWRLMCTAWRTLSIPPVWSRAVTTFIPKEKDSCNITQFRGIALLNVEGKIFFSVMAKRMTSYLLANNYIDTSCQKAGVPGFPGCVEHSAMIWEQIQSARQNKSDLHVVWLDLANAYGSVPHQLIHFALDFFHIPSHIQSLVARYFDNFHICYITQEISTGWYRLEKGIAMGCSISPILFTAAFEIILIGGRQMVRGIRSKSGQRLPALRSYMDDVTTLLQTAACTARLLKRLEELLTWARMRIKPAKSRSLSIRKGVRNDNISFSVDGENIPLLVDQPVRSLGRLYTSDLSDKHMAASVGSQLLDGLGKIDQSLLPGKFKVWCYQFTLYQRLMWPLKLCDISLSTAQKLDSKANSYIRKWLGLPRCLSTTALFGRTTLKLPLKSISLGYRQEKVRLLFELRESPDPSVRNAKAQVRTGRKWDAAKAVDQAITRLKHLEVVGLQQQGKAGFGWGPTPKMWSKASRKERKDLVISEVVKIEEESYKIKAVSQQQQGKWMTWEAVVDRTITWADMWRMPQARLSFMIRATYDTLPSPRNLHLWFNTEEICQLCSSSNPSLQHILSGCKVALTQGRYRWRHDRVLRKLAEILETRRLEANASPQTSQRRIQFIRQGSGSRSTCTKQRSLLSPGGGWSMRADLDQQLKFPQDITSTTLRPDIVLWSVPTRTVIMAELTVPWEDGMDTAFERKKERYTDLADACSQAGWKAAVFPVEIGCRGFAGTSTQRLMVSLGVTGSKLRKALKDLAEEAEQGSFWLWLRRKDRAWGKQGA

SEQ ID NO: 26722 - protein, 1083 aa, Myripristis murdjan
MKCGGGSQMQTCTAQAGQTRRSQSQVEHHSATDAVIASGESDQVHPSQQDSQQPQPIPQEVHQIRTPTREPSIGSTEKPARKPRIKWPKARDKDGWSSFDETLHTILQGTLKGSATSKLNIFGHIIYEEGRERFGEMPQKNISPRGMGRREREILQLVRERRLLRKAWRRAEEEEKDGLQNLWSQIRCRLVHLRRAERIRKRRSRKEKARASFFRDPFKYARGLLEEKKSGTLQTSEQELEEHIKDQVSDSLKESPLGPPGHIPRPPEPTSPFDVSPPKWFEVKQVVERARAASAPGPNGVPYSVYKNCPRTLKLLWRLMCTAWRTLSIPPVWSRAVTTFIPKEKDSCNITQFRGIALLNVEGKIFFSVMAKRMTSYLLANNYIDTSCQKAGVPGFPGCVEHSAMIWEQIQSARQNKSDLHVVWLDLANAYGSVPHQLIHFALDFFHIPSHIQSLVARYFDNFHICYTTQEISTGWYRLEKGIAMGCSISPILFTAAFEIILIGGRQMVRGIRSKSGQRLPALRSYMDDVTTLLQTAACTARLLKRLEELLTWARMRIKPAKSRSLSIRKGVRNDNISFSVDGENIPLLVDQPVRSLGRLYTSDLSDKHMAASVGSQLLDGLGKIDQSLLPGKFKVWCYQFTLYQRLMWPLKLCDISLSTAQKLDSKANSYIRKWLGLPRCLSTTALFGRTTLKLPLKSISLGYRQEKVRLLFELRESPDPSVRNAKAQVRTGRKWDAAKAVDQAITRLKHLEVVGLQQQGKAGFGWGPTPKMWSKASRKERKDLVISEVVKIEEESYKIKAVSQQQQGKWMTWEAVVDRTITWADMWRMPQARLSFMIRATYDTLPSPRNLHLWFNTEEICQLCSSSNPSLQHILSGCKVALTQGRYRWRHDRVLRKLAEILETRRLEANASPQTSQRRIQFIRQGSGSRSTSTKQRSLLSPGGGWSMRADLDQQLKFPQDITSTTLRPDIVLWSVPTRTVIMAELTVPWEDGMDTAFERKKERYTDLADACSQAGWKAAVFPVEIGCRGFAGTSTQRLMVSLGVTGSKLRKALKDLAEEAEQGSFWLWLRRKDRAWGKQGA

SEQ ID NO: 26723 - protein, 1132 aa, Sebastes schlegelii
MEDGPTRTDNMVTTGTTTTNDQRILRKCGCGWSKVTTYRGLRIHQGKARCGGSNQMQTCTAQAGQTRRNHSQVEHHSAIDPTIAAGEREQLQPSQQVLQQHQHGPEQELQSETPRREPTIETSEKPARKPKVKWPKASDKEAWRSFDESIHITLQNTLRGSTTSKLNIFAHIIYEEGTGRFGEMPQRRIVPRQTGRREREILQLVKERWLLRKAWRRAENEEKEGLQNLWNQIRTRLNHLRRAERIRKRRSRKEKARASFFRDPFKYARGLLEEKKTGKLQTTEQELEEYIKDQLSDSQKENPLGSLGHVPLPPEPSSQFDTTPPRWSEVQQVVERARAASAPGLNRVPYRVYKSCPMILKLLWRLMGIAWKNQSIPPAWSRAITTFIPKEKDSHNISQFRSIALLNVEGKIFFSVMAKRMTSYFLANNYIDTSCQKAGIPGFPGCVEHSDLLCFAVWICSQIIADLHVVWLDLANTYGSVPHQLINFALNFFHIPSCIQSLVTSYFNNFRVCYTTQEISTGWHQLEKGIAMGCSISPILFTAAFEIILIGGRQMVRGVRSQTGLRLPALRSYMDDVTTLLQTAACTARLLKRLEELLSWARMKIKPAKSRSLSIRKGARIDNITFSVDGEKIPLLAEQPVRSLGRLYTANLSDKHMAASVLAQLTDGLSKIDQSPLLGKFKVWCYQFALYQRLMWPLKLCDITSTTVLKLDEKKPTITSVNWLGLPRCLTNTALFGRTTLKLPLKSINLGYRQEKVRLVFELRDSPDPSVQNTKVQIRTGRKWDVTQAVDQAINRLKHQEIVGQLQQGRAGFGWGPAPKMWSKASKKERKDLVISEVTKMEEEGYKIRAISQQQQGRWTTWVAVINRTITWADMWKMPQARLSFLIRATYDTLPSPRNLHLWYGTEETCQLCNSKDPTLRHILSGCKAALTQGRYRWCHDRVLRKLAEILETHRLEVNKANTATSQRLIQFVQQRGKGQSSSARGRSLLCLGGEWNMRADLDRQLKFPHEITLTSLRPDIVLWSTSTRTVIMAELTVPWEEGIEAAFERKKEKYSELAAECTQAGSRAVTRPVEVGCRGYAGTSTQRLLRSLGITGSKLRTALKELAEEAEQGSFWLWLRRKDKAWGKGGS

SEQ ID NO: 26724 - protein, 774 aa, Sebastes umbrosus
MILKLLCRLMGIAWKNQSIPPAWSRAITTFIPKGKDSHNISQFRGIALLNVEGKIFFSVMAKRMTSYLLANNYIDTSCQKAGIPGFPGCVEHSAMIWEQIQTAKRSKSDLHVVWLDLANAYGSVPHQLINFALNFFHIPSCIQSLVTSYFNNFRVCYTTQEISTGWHQLEKGIAMGCSISPILFTAAFEIILIGGRQMVRGVRSQTGLRLQALRSYMDDVTTLLQTAACTARLLKRLEELLSWARMKIKPAKSRSLLIRKGARNDNITFSVDGEKIPLLAEQPVRSLGRLYTANLSDKHMAASVLAQLTNGLSKIDQSPLPGKFKVWCYQFTLYQRLMWPLKLCDITSTTVLKLDGKANNYIRKWLGLPRCLTNTTLFERTTMKLPLKSINLGYKQEKVRLVFELRDSPDPSVQNTKVQIRTGCKWDVTQAVDQAINRLKHQEIVGQLQQGRAGFGWGPAPKMWSKASKKERKDLVISEVTKIEEEGYKIRAVSQQQQGRWTTWEAVINRTITWADMWKMPQARLSFLIRATYDTLPSPRNLHLWYGTEKTCQLCNSKDPTLRHILSGCKAALAQGRYRWRHDRVLRKLAEILETRRLEVNKASPAKSQRLIQFVRQGGKGQSSSARGRSLLCLGGEWNMRADLDRQLKFPHEITPTSLRPDIVLWSTPTRTVIMAELTVPWEEGIEAAFERKKEKYSELAAECTQAGWRAVTRPVEVGCRGYAGTSTQRLLRSLGITGSKLRKALKELAEEAEQGSFWLWLRRKDKAWGKGGS

SEQ ID NO: 26725 - protein, 948 aa, Sebastes umbrosus
MQQRRIVPRQTGRREREILQLVKERRLLRKAWRRAENEEKEGLQNLWNQIRTRLNHLRRAERIRKRRSRKEKARASFFRDPFKYARGLLEEKKTGKLQTTEQELEEYIKDQLSDSQKENPLGSPGHVPLPPEPSSQFDTTPPRWSEVQQVVERARAASAPGLNGVPYRVYKNCPMILKLLWRLMGLAWKNQSIPPAWSRAITTFIPKEKDSHNISQFRGIALLNVEGKIFFSVMAKRMTSYFLANNYINTSCQKAGIPGFPGCVEHSAMIWEQIQTAKRSKSDLHVVWLDLANAYGSVPHQLINFALNFFHIPSCIQSLVTSYFNNFRVCYTTQEISTGWHQLEKGIAMGCSISPILFTAAFEIILIGGRQMVRGVRSQTGLRLPALRSYMDDVTTLLQTAACTARLLKRLEELLSWARMKIKPAKSRSLSIRKGARNDNITFSVDGKKIPLLPEQPVRSLGRLYTADLSDKHMAASVLAQLTNGLSKIDQSPLPGKFKVWCYQFTLYQRLMWPLKLCDITSSTVLKLDGKANNYIRKWLGLPRCLTNTALFGRTTMKLPLKSINLGYKQEKVRLVFELRDSPDPSVQNTKVQIRTGRKWDVTQAVDQAINRLKHQEIVGQLQQGRAGFGWGPAPKMWSKASKKERKDLVISEVTKIEEEGYKIRAVSQQQQGRWTTWEAVINRTITWADMWKMPQARLSFLIRATYDTLPSPRNLHLWYGTEETCQLCNSKDPTLRHILSGCKAALAQGRYRWRHDRVLRKLAEILETRRLEVNKASPATSQRLIQFVQQGGKGQSSSARGRSLLCLGGEWNMRADLDQQLKFPHEVTPTSLRPDIVLWSTPTRTVIMAELTVPWEEGIEAAFERKKEKYSELAAECTQAGWRAVTRPVEVGCRGYAGTSTQRLLRSLGITGSKLRKALKELAEEAEQGSFWLWLRRKDKAWGKGGS

SEQ ID NO: 26726 - protein, 1076 aa, Sebastes aleutianus
MQTCTAQAGQTRRNHSQVEHHSAIDPTIAAGEREQLQPSQQVLQQHQHGPEPEHQSETRRREPTIETSEKPARKPKVKWPKASDKEAWRSFDESIHITLQNTLRGSTTSKLNIFAHIIYEEGTGRFGEMPQRRIVPRQTGRREREILQLVKERRLLRKAWRRAENEEKEGLQNLWNQIRTRLNHLRRAERIRKRRSRKEKARASFFRDPFKYARGLLEEKKTGKLQTTEQELEEYIKDQLSDSQKENPLGSPGHVPLPPEPSSQFDTTPPRWSEVQQVVERARAASAPGLNGVPYRVYKSCPMILKLLWRLMGLAWKNQSIPPAWSRAITTFIPKEKDSHNISQFRGIALLNVEGKIFFSVMAKRMTSYFLANNYIDTSCQKAGIPGFPGCVEHSAMIWEQIQTAKRSKSDLHVVWLDLANAYGSVPHQLINFALNFFHIPSCIQSLVTSYFNNFRVCYTTQEISTGWHQLEKGIAMGCSISPILFTAAFEIILIGGRQMVRGVRSQTGLRLPALRSYMDDVTTLLQTAACTVRLLKRLEELLSWARMKIKPAKSRSLSIRKGARNDNITFSVDGEKIPLLAEQPVRSLGRLYTADLSDKHMAASVLAQLTNGLSKIDQSPLPGKFKVWCYQFTLYQRLMWPLKLCDITSTTVLKLDGKANNYIRKWLGLPRCLTNTALFGRTTLKLPLKSINLGYKQEKVRLVFELRDSPDPSVQNTRVQIRTGRKWDVTQAVDQAINRLKHQEIVGQLQQGRAGFGWGPAPKMWSKASKKERKDLVISEVTKIEEEGYKIRAVSQQQQGRWTTWEAVINRTITWADMWKMPQARLSFLIRATYDTLPSPRNLHLWYGTEETCQLCNSKDPTLRHILSGCKAALVQGRYRWRHDRVLRKLAEILETRRLEVNKASPATSQRLIQFVQQGGKGQSSSARGRSLLCLGGEWNMRADLDQQLKFPHEITPTSLRPDIVLWSTPTRTVIMAELTVPWEEGIEAAFERKKEKYSELAAECTQAGWRAVTRPVEVGCRGYAGTSTQRLLRSLGITGSKLRKALKELAEEAEQGSFWLWLRRKDKAWGKGGS

SEQ ID NO: 26727 - protein, 1131 aa, Sebastes aleutianus
MEDGPTRTDNMVTTGTTTTNDQRILRKCGCGWSKVTTYRGLRIHQGKARCGGSIQMQTCTTQAGQTRRNHSQVEHHSAIDPTIAAGEREQLQPSQQALQQHQHGPEQEHQSETRRREPTIETSEKPARKPKVKWPKASDKEAWRSFDESIHITLQNTLRGSTTSKLNIFAHIIYEEGTGRFGEMPQRRIVPRQTGRREREILQLVKERRLLRKAWRRAENEEKEGLQDLWNQIRTRLNHLRRAERIRKRRSRKEKARASFFRDPFKYARGLLEEKKTGKLQTTEQELEEYIKDQLSDSQKENPLGSPGHVPLPPEPSSQFDTTPPRWSEVQQVVERARAASAPGLNGVPYRVYKSCPMILKLLWRLMGIAWKNQSIPPAWSRAITTFIPKGKDSHNISQFRGIALLNVEGKIFFSVMAKRMTSYLLANNYIDTSCQKAGIPGFPGCVEHSAMIWEQIQTAKRSKSDLHVVWLDLANAYGSVPHQLINFALNFFHIPSCIQSLVTSYFNNFRVCYTTQEISTGWHQLEKGIAMGCSISPILFTAAFEIILIGGRQMVRGVRSQTGLRLQALRSYMDDVTTLLQTAACTARLLKRLEELLSWARMKIKPAKSRSLSIRKGARNDNITFSVDGEKIPLLAEQPVRSLGRLYTANLSDKHMAASVLAQLTNGLSKIDQSPLPGKFKVWCYQFTLYQRLMWPLKLCDITSTTVLKLDGKANNYIRKWLGLPRCLTNTALFGRTTLKLPLKSINLGYKQEKVRLVFELRDSPDLSVQNTKVQIRTGRKWDVTQAVDQAINRLKHQEIVGQLQQGRAGFGWGPAPKMWSKASKKERKDLVISEVTKTEEEGYKIRAVSQQQQGRWTTWEAVINRTITWADMWKMPQARLSFLIRATYDTLPSPRNLHLWYGTEETCQLCNSKDPTLRHILSGCKAALAQGRYRWRHDRVLRKLAEILETRRLEVNKASPAKSQRLIQFVRQGGKGQSSSARGRSLLCLGGEWNMRADLDRQLKFPHEITPTSLRPDIVLWSTPTRTVIMAELTVPWEEGIEAAFERKKEKYSELAAECTQAGWRAVTRPVEVGCKGYAGTSTQRLLRSLGITGSKLRKALKELAEEAEQGSFWLWLRRKDKVWGKGGS

SEQ ID NO: 26728 - protein, 1131 aa, Sebastes aleutianus
MEDGPTRTDNMVTTGTTTTNDQRILRKCGCGWSKVTTYRGLRIHQGKARCGGSTQMQTCTAQAGQTRRNHSQVEHHSAIDPTIAAGEREQLQPSQQVSQQHQHGPEPEHQSETRRREPTIETSEKPARKPKVKWPKASDKEAWRSFDESIHITLQNTLRGSTTSKLNIFAHIIYEEGTGRFGEMPQRRIVPRQTGRREREILQLVKERRLLRKAWRRAENEEKEGLQNLWNQIRTRLKHLRRAERIRKRRSRKEKARASFFRDPFKYARGLLEEKKTGKLQTTEQELEEYIKDQLSDSQKENPLGSPGHVPLPPEPSSQFDTTPPRWSEVQQVVERARAASAPGLNGVPYRVYKSCPMILKLLWRLMGLAWKNQSIPPAWSRAITTFIPKEKDSHNISQFRGIALLNVEGKIFFSVMAKRMTSYFLANNYIDTSCQKAGIPGFPGCVEHSAMIWEQIQSAKRSKSDLHVVWLDLANAYGSVPHQLINFALNFFHIPSCIQSLITSYFNNFRVCYTTQEISTGWHQLEKGIAMGCSISPILFTAAFEIILIGGRQMVRGVRSQTGLRLPALRSYMDDVTTLLQTAACTARLLKRFEELLSWARMKIKPAKSRSLSIRKGARNDNITFSVDGEKIPLLAEQPVRSLGRLYTADLSDKHMAASVLAQLTNGLSKIDQSPLPGKFKVWCYQFTLYQRLMWPLKLCDITSTTVLKLDGKANNYIRKWLGLPRCLTNTALFGRTTLKLPLKSINLGYKQEKVRLVFELRDSPDPSVQNTKVQIRTGRKWDVTQAVDQAINRLKHQEIVGQLQQGRAGFGWGPAPKMWSKASKKERKDLVISEVTKIEEEGYKIRAVSQQQQGRWTTWEAVINRTITWADMWKMPQARLSFLIRATYDTLPSPRNLHLWYGTEETCQLCNSKDPTLRHILSGCKAALAQGQYRWRHDRVLRKLAEILETRRLEVNKASPATSQRLIQFVQQGGKGQSSSARGQSLLCLGGEWNMRADLDQQLKFPHEITPTSLRPDIVLWSTPTRTVIMAELTVPWEEGMEAAFERKKEKYSELAAECTQAGWRAVTRPVEVGCRGYAGTSTQRLLRSLGITGSKLRKALKELAEEAEQGSFWLWLRRKDKAWGKGGS

SEQ ID NO: 26729 - protein, 1131 aa, Sebastes aleutianus
MEDGPTRTDNMVTTGTTTTNDQRILRKCGCGWSKVTTYRGLRIHQGKARCGGSIQMQTCTAQAGQTRRNHSQVEHHSAIDPTIAAGEREQLQPSQQVLQQHQHGPEPEHQSETRRREPTIETSEKPARKPKVKWPKASDKEAWRSFDESIHITLQNTLRGSTTSKLNIFAHIIYEEGTGRFGEMPQRKIVPRQTGRREREILQLVKERRLLRKAWRRAENEEKEGLQNLWNQIRTRLNHLRRAERIRKRRSRKEKARASFFRDPFKYARGLLEEKKTGKLQTTEQELEEYIKDQLSDSQKENPLGSPGHVPLPPEPSSQFDTTPPRWSEVQQVVERARAASAPGLNGVPYRVYKSCPMILKLLWRLMGLAWKNQSIPPAWSRAITTFIPKEKDSHNISQFRGIALLNVEGKIFFSVMAKRMTSYFLANNYIDTSCQKAGIPGFPGCVEHSAMIWEQIQTAKRSKSDLHVVWLDLANAYGSVPHQLINFALNFFHVPSCIQSLVTSYFNNFRVCYTTQEITTGWHQLEKGIAMGCSISPILFTAAFEIILIGGRQMVRGVRSQTGLRLPALRSYMDDVTTLLQTAACTARLLKRLEELLSWARMKIKPAKSRSLSIRKGARNDNITFSVDGEKIPLLAEQPVRSLGRLYTADLSDKHMAASVLAQLTNGLSKIDQSPLPGKFRVWCYQFTLYQRLMWPLKLCDITSTTVLKLDGKANNYIRKWLGLPRCLTNTALFGRTTLKLPLKSINLGYKQEKVRLVFELRDSPDPSVQNTKVQIRTGRKWDVTQAVDQAINRLKHQEIVGQLQQGRAGFGWGPAPKMWSKASKKERKDLVISEVTKIEEEGYKIRAVSQQQQGRWTTWEAVINRTITWADMWKMPQARLSFLIRATYDTLPSPRNLHLWYGTEETCQLCNSKDPTLRHILSGCKAALAQGRYRWRHDRVLRKLAEILETRRLEVNKASPATSQQLIQFVQQGGKGQSSSARGRSLLCLGGEWNMRADLDQQLKFPHEITPTSLRPDIVLWSTPTRTVIMAELTVPWEEGIEAAFERKKEKYSELAAECTQAGWRAVTRPVEVGCRGYAGTSTQRLLRSLGITGSKLRKALKELAEEAEQGSFWLWLRRKDKAWGKGGS

SEQ ID NO: 26730 - protein, 765 aa, Danio kyathit
MGTAWKSKTIPLAWNKAVTTFIPKEKDSHDISQFRGIALLNVEGKIFFSVMAKRMTSYLLANNYIDTSCQKAGVPGFPGCVEHSAMIWEQIQSTKRSKLDLHVVWLDLANAYGSVPHQLISFALDFFYVPSCIQSLINSYFSNFHVCYTSAGISTGWHRLEKGIAMGCSISPILFTAAFEIVLIGGRQMVRGVKSESGQRLPAIRCYMDDITTLLQTAACTNRLLKRLEELLNWARMKIKPAKSRSLSIRKGTRRDNISFSVNGEEIPRLVEQPVRSLGRVYTADMSDKHMAAVVTSQLSGGLEKIDQSLLPGKLKVWCYQFTLYYRLMWPLKLCDIALSVVQKMDSKANNYIRKWLGLPRCLSNAALFGSDILRLPLKSISLGYKLEKVRLVFEIKDSSDPIVQNTNTQIKTGKRWKASYEVHQAINRLKHQEVVGFVQQGRAGLGWGTSPRMWSKASKTERKKLVISEVMREEKESYKIKAISQSQQGRWTTWEAVVDRVVSWTDLWRMPQARLSFLIRATYDTLPSPKNLHLWYGAEESCQLCGHPNPSLQHILASCKAALSQGRYRWRHDQVLRKLAEVIEARRVEANRATPVTSHGLFQFVREGGEALSSTTKMWSLLSPGSNWELRADLDHQLKFPQQIAVTTLRPDILLWSTVAKIVITVELTVPWEDGLEAAFERKKERYADLADTCNDAGWRALTYPVEIGCRGFPGTSTQRLLKSIGVRGTKLSRALKELAEEAEKGSFWLWLRRKDRAWGREGS

SEQ ID NO: 26731 - protein, 1164 aa, Danio kyathit
MSLEQKLQRLPKATTSRTKKKQPGGPPRGGMEDGPNRTDNTVPIGMETTTGQRILRECSCGWSKVTTYLGLRIHQGKAKCGGSSRMQACTAVAGQTRRNHSQVEHHSVMGPTTATGEKNQAQPTHQDSNQPLQIPQCVSPEQRSIQNREATDDTPSKSIWKGKVKWPKANDKQEWRSFDQSLHTVLQNSLKGSTTGKLNIFGDVIYEEGKGRFGELLQRKISPPKQSGRREREILQLVKERRLLRKAWRKANDHEKEGLKNLWAQIRTKLSNLRRAERIRNRRSRKRKARSSFFSDPFKYARGLLEEKKNGRLNITEQELEDYGRTQISDSLRDIPLGPPGHVPRPPEPATQFDISPPKWLEVKQVVERSRSASAAGPNGVPYKVYKNCPLVLKLLWKLMGTAWKSKTIPLAWNKAVTTFIPKEKDSHDISQFRGIALLNVEGKIFFSVMAKRMTSYLLANSYIDTSCQKAGVPGFPGCVEHSAMIWEQIQSTKRSKLDLHVVWLDLANAYGSVPHQLISFALDFFYVPSCIQSLINSYFSNFHVCYTSAGISTGWHRLEKGIAMGCSISPILFTAAFEIVLIGGRQMVRGVKSESGQRLPAIRCYMDDITTLLQTAACTNRLLKRLEELLNWARMKIKPAKSRSLSIRKGTRRDNISFSVNGEEIPRLVEQPVRSLGRLYTADMSDKHMAAVVTSQLSGGLEKIDQSLLPGKLKVWCYQFTLYYRLMWPLKLCDIALSVVRKMDSKANNYIRKWLGLPRCLSNAALFGSDILRLPLKSISLGYKLEKVRLVFEIKDSSDPIVQNTNAQIKTGKRWKASYEVHQAINRLKHQEVVGFVQQGRAGLGWGTSPRMWSKASKTERKKLVISEVMREEKESYKIKAISQSQQGRWTTWEAVVDRVVSWTDLWRMPQARLSFLIRATYDTLPSPKNLHLWYGAEESCQLCGHPNPSLQHILASCKAALSQGRYRWRHDQVLRKLAEVIEARRVEANRATPVTSQGLFQFVREGGEALSSTTKMWSLLSPGSNWELRADLDHQLKFPQQIAITTLRPDILLWSTVAKIVIMVELTVPWEDGLEAAFERKKERYADLADTCNDAGWRALTYPVEIGCRGFPGTSTQRLLKSIGVRGTKLSRALKELAEEAEKGSFWLWLRRKDKAWGREGS

SEQ ID NO: 26732 - protein, 1164 aa, Danio kyathit
MSLEQKLQRLPKATTSRTKKKQPGGPPRGGMEDGPNRTDNTVPIGMETTTGQRILRECSCGWSKVTTYLGLRIHQGKAKCGGSSRMQACTAVAGQTRRNHSQVEHHSVMGPTTATGEKNQAQPTHQDSNQPLQIPQCVSPEQRSIQNREATDDTPSKSIWKGKVKWPKANDKQEWRSFDQSLHTVLQNSLKGSTTGKLNIFGDVIYEEGKGRFGELLQRKISPPKQSGRREREILQLVKERRLLRKAWRKANDHEKEGLKNLWAQIRTKLSNLRRAERIRNRRSRKRKARSSFFSDPFKYARGLLEEKKNGRLNFTEQELEDYGRTQISDSLRDIPLGPPGHVPRPPEPATQFDISPPKWLEVKQVVERSRSASAAGPNGVPYKVYKNCPLVLKLLWKLMGTAWKSKTIPLAWNKAVTTFIPKEKDSHDISQFRGIALLNVEGKIFFSVMAKRMTSYLLANSYIDTSCQKAGVPGFPGCVEHSAMIWEQIQSTKRSKLDLHVVWLDLANAYGSVPHQLISFALDFFYVPSCIQSLINSYFSNFHVCYTSAGISTGWHRLEKGIAMGCSISPILFTAAFEIVLIGGRQMVRGVKSESGQRLPAIRCYMDDITTLLQTAACTNRLLKRLEELLNWARMKIKPAKSRSLSIRKGTRRDNISFSVNGEEIPRLVEQPVRSLGRLYTADMSDKHMAAVVTSQLSGGLEKIDQSLLPGKLKVWCYQFTLYYRLMWPLKLCDIALSVVQKMDSKANNYIRKWLGLPRCLSNAAFFGSDILRLPLKSISLGYKLEKVRLVFEIKDSSDPIVQNTNAQIKTGKRWKASYEVHQAINRLKHQEVVGFVQQGRAGLGWGTSPRMWSKASKTERKKLVISEVMREEKESYKIKAISQSQQGRWTTWEAVVDRVVSWTDLWRMPQARLSFLIRATYDTLPSPKNLHLWYGAEESCQLCGHPNPSLQHILASCKAALSQGRYRWRHDQVLRKLAEVIEARRVEANRATPVTSHGLFQFVREGGEALSSTTKMWSLLSPGSNWELRADLDHQLKFPQQIAITTLRPDILLWSTVEKIVIMVELTVPWEDGLEAAFERKKERYADLADTCNDAGWRALTYPVEIGCRGFPGTSTQRLLKSIGVRGTKLSRALKELAEEAEKGSFWLWLRRKDKAWGREGS

SEQ ID NO: 26733 - protein, 1164 aa, Danio kyathit
MSLEQKLQRLPKATTSRTKKKQPGGPPRGGMEDGPNRTDNTVPIGMETTTGQRILRECSCGWSKVTTYLGLRIHQGKAKCGGSSRMQACTAVAGQTRRNHSQVEHHSVMGPTTATGEKNQAQPTHQDSNQPLQIPQCVSPEQRSIQNREATDDTPSKSIWKGKVKWPKANDKQEWRSFDQSLHTVLQNSLKGSTTGKLNIFGDVIYEEGKGRFGELLQRKISPPKQSGRREREILQLVKERRLLRKAWRKANDHEKEGLKNLWAQIRTKLSNLRRAERIRNRRSRKRKARSSFFSDPFKYARGLLEEKKNGRLNITEQELEDYGRTQISDSLRDIPLGPPGHVPRPPEPATQFDISPPKWLEVKQVVERSRSASAAGPNGVPYKVYKNCPLVLKLLWKLMGTAWKSKTIPLAWNKAVTTFIPKEKDSHDISQFRGIALLNVEGKIFFSVMAKRMTSYLLANSYIDTSCQKAGVPGFPGCVEHSAMIWEQIQSTKRSKLDLHVVWLDLANAYGSVPHQLISFALDFFYVPSCIQSLINSYFSNFHVCYTSAGISTGWHRLEKGIAMGCSISPILFTAAFEIVLIGGRQMVRGVKSESGQRLPAIRCYMDDITTLLQTAACTNRLLKRLEELLNWARMKIKPAKSRSLSIRKGTRRDNISFSVNGEEIPRLVEQPVRSLGRLYTADMSDKHMAAVVTSQLSGGLEKIDQSLLPGKLKVWCYQFTLYYRLMWPLKLCDIALSVVQKMDSKANNYIRKWLGLPRCLSNAALFGSDILRLPLKSISLGYKLEKVRLVFEIKDSSDPIVQNTNAQIKTGKRWKASYEVHQAINRLKHQEVVGFVQQGRAGLGWGTSPRMWSKASKTERKKLVISEVMREEKESYKIKAISQSQQGRWTTWEAVVDRVVSWTDLWRMPQARLSFLIRATYDTLPSPKNLHLWYGAEESCQLCGHPNPSLQHILASCKAALSQGRYRWRHDQVLRKLAEVIEARRVEANRATPVTSHGLFQFVREGGEALSSTTKMWSLLSPGSNWELRADLDHQLKFPQQIAITTLRPDILLWSTVAKIVIMVELTVPWEDGLEAAFERKKERYADLADTCNDAGWRALTYPVEIGCRGFPGTSTQRLLKSIGVRGTKLSRALKELAEEAEKGSFWLWLRRKDKAWGREGS

SEQ ID NO: 26734 - protein, 962 aa, Sinocyclocheilus rhinocerous
MPSRKAKIKWPKASEKDEWRSFDQSLQTILQSSLRGSIIAKLNIIGDIIYSEGRERFGELQQRKAPPKQSGRREKEILQLVKERRCLRKLWRKAKYHEKEGLKNLWNQIRDRLSHLRRAERIRKRRSRKEKARSSFHRDPFKYARSLLEEKKTGTLHTTKQELENYIKTQSSDSLRESPLGSPGYIPQPPEPSSQFDTITPKWSEVNQVVQRSRGASAAGPNGVPYKVYKNCLTVLKLLWRQMCVAWKTKAIPIAWCRAVTVFIPKEKDSCNISQFRGIALLNVEGKIFFSVMATRMPSYLLANKYIDTSCQKAGIPGFPGCVEHSVMIWDQIQTAKRNKSDLHVLWLDLANAYGSVPHQLIRFALNFFHIPPCIQSLITNYFDNLQVCYATSEFITGWHQVEKGIAMGCSISPILFTTAFEVILIGGRQTVRGVRSPSGQRLPALRSYMDDVTTLLQTAACTNRLLKRLEDLFKWARMKIKPSKSRSLSIRKGARRDHISFSVSGEKIPRLIDQPVKSLGRLYTADLSDKHMALSVTTQLTGGLKKINEIPLPGKFKVWCYQFTLFHRLLWPLKLCDITSSTVLKMDTKANNYIRKWLGLPRCLSTSALFGKNTLRLPMKTISLGYKLEKVRLLFELKDSPDPVVQNANAQVRTGRKWDAPQAVHQAITSLKHQEVVGLIQHGRAGFGWTTSTSMWSKATKIERKILIVQEVMKEEGESYRVKAVSQSQQGKWTTWEAVIDRTITWADLWKLPQARLSFLIRATYDTLPSPQNLHRWYSIEEFFQLCGHQSPSLQHILSGCKTALTQGRYGWRHDRVLRKLAEVIEARRLEVNKASLSTSYQPVQFVRQGGEALSSFVRERSLLSPGGEWDLRVDLGRQLKFPQQIVITSLRPDIVIWSTTTKTVIMAELTVPWEDGMEAAFDRKREKYAELASACTQAGWRAYTFPVEVGLIGFTGTSTQ

SEQ ID NO: 26735 - protein, 1084 aa, Corydoras sp.
MVCASCTASAGQTRRHHSQVEHHRASEPNIAAGTGEKHQSSVQILQQQNTPQQENSIVSLEQQDGNITRTQPVTVPPEKYAQKPQVRWPKSSEKEVWRRFDESTCITLQNSLKGNATTKLNIFGHLTHEEGRNRFGVKPVKRPSPKQRGRREKEIFQLVKERRLLRKSWRKAEPEEKEGLKDLWGKIKERLVHLRRAERIKKRRSRREKARTCFFRDPFKFARSLLEENKTGRLQVTKQELEQFISDQLSDNLRAKPLGAPGYIPRPSEPSTEFDASPPRWAEVKQVVERARSASAPGPNGVLYKVFKNCPGLLKVLWRLMVAAWKTESIPSAWCQAVTTFIPKEKDSQHLSQFRGIALLNVEGKVFFSILARRMMSYLLANQYIDTSCQKAGVSGFPGCVEHSAVIWDQIQLAKRRKEDLHVVWLDLANAFGSVPHQLIKYTLNFFHVPSCVQNLVATYFDNLYVCYITRDISTDWHRLEKGIAMGCAISPILFTMAFEILLIGGRQMVRGVRAETGQRLPAMMCYMDDVTTLLQTAACTTRLLRRLEELLAWARMKVKPPKSRSLSIQKGNRNDNIIFAVAGERIPLLAEAPVRSLGRMYTADLSDKIMAVTAQLQEGLHKIDQCPLPGKFKVWCYQFTLYHRLMWPLKLSDITMTTVLKLEAKANNFIRKWLGLPRSLSTTALFGRNMLQLPLQSISLGYKKEKVRLHFELRNSMDPAIRAANPQIRSGWKWNVSQAVDQAAERLKHQEIVGVTQSGRSGLGWAAAPKSWSKATRKERKDLVISEVAKMEEETYKITAVSQQQQGRWTTWEAVLNRTITWADLWRTPQARLSFQIRATYDTLPSPRNLLTWFGTEERCHLCSSPNPTLKHILSGCKTALSQGRYRWRHDKVLRKLAEILEVRRQQVNHTARLPTSPKWIQFTRPGTTARRSTGTERSLFSLGAEWQFAADLSRQLKFPAEITVTSLRPDIVLWSEPAKVVIMVELTVPWEEHMESAYERKKDKYTELAATCSQAGWRPFIFPVEVGCRGFTGTSTQRLLKTLGVTGSNRRRALRDLAEEAEEGSFWLWLRRKDSTWGKEGS

SEQ ID NO: 26736 - protein, 773 aa, Thalassophryne amazonica
MVLKLLWRLMRAAWKTQAIPSEWTRAITTFIPKEPDSRNINQFRGIALLNVEGKIFFSVVANRVTSYRLENNYIDTSCQKAGIPGFPSCVEHSTMIWNQIQSAKREKSDLHVVWLDLENAYGSVPHQLITFALEFFYIPTCIQKLVSNYFNSLQVCYATQDATTNWQQLEKGIAMGCSISPIIFMAAFKVILIGSRQMGRGIRTWSGQRLPALRSYMDDVTSLLQTAPCTARLLRRFEELLRWARMRIKPSKSRSLSIRKGARNDLISFTVDGGKIPLLADQPVQSLGRLYTAELSDTHMPATIMQQLTDGLERINKCHLPGKLKVWCYQFTLYQRLMWPLKLCEITSSTVMKMDAKANSFICKWLGLPRSLSNIGLGKNTLQLPLKSINLGYRQEKAKLMLEIRDSTDPFVRNIKAPVRTGHKWKAEDAVDQAISRFEHKEVVGRVQSGRAGLGWGTAPKFWSKATRKERKELVIEEVVRHEEEQYKIKALSQPQQGRWTTWEGVISRTIKWSDLWKMPQARLSFLIRATYDTLPSPSNVSQWYGSEESCQLCNAPNPSFQHILSSCKTALAQGRYRWRHDLVLRKLAEVLEARRMEAAKDPPSKTWTFISFVRQGAGAQTISQRERSLLTPGCNWNLRVDLDQQLKFPPEITTTSLRPDVILWSSDVKTAILAELTVPWEGGMEAACERKRDKYTDLVAECREAGWSTTIYPVEVGCRGIIRTSIQRLLRKIGVSGTRLKRASRDLAEEAERASFWLWLRRKDRSWGKEGS

SEQ ID NO: 26737 - protein, 1010 aa, Oryzias sinensis
MEKPIRQPKVKWPKASDKERWRSFDHDLHAILGKSLQGSTISKLNIFGKIIYEEGKERFGEIVQRKNTPREPGRREKEIHNLIKQRRSLRKAWRKAADDGKEGLKVLWVQVRDRLAALRTADRIRRRRSRKEKERAKFFQDPFKFAKSLLEEKKSGRLNATVQELEEHIKSQLSDQDRNTPLGLPGYVPRPAEPRLQFDTIPPRWAEIRQVVDKARSASARGPNGVPYKVYKNCPAVLKLLWKLVRVAWKTQAIPTEWSKAISTFIPKEQDSRNINQFRGIALLNVEGKIFFSVVAKRMANYLLENNYIDTSCQKAGIAGFSGCVEHSTMIWNQIQAAKREKSDLHVVWLDLENAYGSVPHQLITFALEFFYIPICIQRLIGNYFSSFQLCYTTQEATTSWHHLEKGIAMGCSISPIIFTAAFEVILIGGRQMGRGTKSQSGQRLPALRSYTDDVTSLLQTAPCTTRFLKRFEDLLGWARMRIKPSKSRSLSIRKGVRNDHISFAVNGERIPLLAEQPVRSLGRLYTAELSDNHMPATIMLQLRDGLERIDKSQLPGKFKVWCYQFILYPRLMWPLKLCEITSSTVAKMDAKANNFIRKWLGLPRSLSNTGLFGRNTLQLPLKPISLGYRQEKTRLVLELRDSTDPVVRNTKAPVRTGSKWKAEEAVDQAISKLKHNEIVGKTQSGRAGLGWGTAPKFWSKATRNERKELVIEEVTRSEENQYKIKALSQPQQGRWTTWEGVFNRTIGWSDIWKMPQARLSFLIRATYDTLPSPSNLSLWFGSEENCHLCKTPSATLQHILSGCKTALAQGRYRWRHDQVLRKLAEVLEVRRMEAAKDPPTKTPSLIHFVGEGAGAQNTNQRGTTSLLTPGCDWNLRVDLDRQLKFPPEITTTALRPDIILWSSAAKAVILAELTIPWEGGMDAAYERKKDKYTELVAECRDAGWSTIICPVEVGCRGFVGTSTQLLLRKMGVTGSKLKKASKDLAEEAEKASFWLWLRRKDSSWGKDGS

SEQ ID NO: 26738 - protein, 1149 aa, Thalassophryne amazonica
MSTRKERQPEGPPRGGMEDGSNWTDNMVRTGTTITNEQRTLRKCSCGWAKVTTFRGLRIHQGKMKCGGVSQMQSCTASADQTSRRQSLVEHHSVAVSNVADGQRGEEYLSQQQEYQLYQEPISHNEQYEDIPRSETPTRIRRENPIQQPKVMWPRANDKEAWRGFDHDLYVSLKSVRGNVSTKLNLFGNIIYEVGRARFGEKVGRKNTAREPGRREKEIFNLVKERRSLRKAWRKAGENEKEGLKVLWVQIRRRLITLRRAERIRKRRRRKESERARFFRDPFKFARSLLEEKKNGRLEATAQELEEHLKSQLSDPARNIPLGSPGYVPRPSEPEVEFDITPPRWVEIRQVVDKARSASAPGLNGVPYRVYKSCPTVLKFLWRLMRVAWKTKVIPTEWTRAITIFIPKEQDSRSINQFRGIALLNVEGKIFFSVVAKRVTSYLLENNYIDTSCQKAGIPGFPGCVEHSTMIWNQIQSAKREKRDLHVVWLDLENAYGSVPHQLIAFALEFFHIPSCIQKLVSSYFNSLQVCYATQGITTNWQQLEKGIAMGCSISPIIFTAAFEVILIGSRQMGRGLKTGSGQRLPALRSYMDDVTSLLQTAPCTVRFLRRFEELLRWARMRIKPAKSRSLSIRKGVRNDRISFTVDGGKIPLLVDQPVRSLGRLYTAELSDTHMPAVILQQLTDGLERIDKCHLPGKLKVWCYQFTLFQRLMWPLKLCEITSSVVMKMDAKANTFIRKWLGLPRSLSDVALFGKTVLQLPLKSINLGYRQEKARLVLELRESADPLVKNSKVPVRTGRKWKAEEAVNQAISRLEHKEVVGRIQSGRAGLGWGIAPKLWSKATRKEKKGLVIEEVVRHEEEKYKIKALSQSRQGQWTTWEGVVSRTIKWSEVWKMPQARLSFLIRATYDTLPSPSNVSLWYGLEESCQLCNVPNPSLQHILSSCKTALAQGRYRWRHDLVLRKLAEVLEVQRTEVIKELPPTSWTFINFVRQGAGVQPVAQRTRSLLKPGCSWNLRVDLDRQLKFPPEIVTTSLRPDVVLWSADAKSVILVELTVPWEGGMEAACERKRDKYTDLVAECREAGWSAVIYPVEVGCRGFIGTSTQRLLRKIGVSGTRLKRACRELAEEAERASFWLWLRRKDRSWGKEGS

SEQ ID NO: 26739 - protein, 1149 aa, Phylloscopus trochilus
MNHQNENAAEDNGAGRGPLTRRAAARGETKEEISQFPDKANGEQEAISSGRGPVTRRAAARGKTKEEINQYPDKAKGQQEAISSGRGPVIRRAAAGKKTKEDIDHPTDKANGQQVAISTRRGCLNRGVTAGVETIEGSSHLPDKDSDGQGTPSREKEGQLQAHYQEVIGAWLSDGRINTFPEAFKGLLGKREIQATINQSILDCFGGIDSKSQVNKMNRGKKDKKPGRPPQKWMKKRAIKRGSYLRFQRLFHLDRGKLAKIVLDNIECLTCDIPPSEIYSVFKARWETAGKFTSLGDFKFTEKADNSAFRDLITAKEIEKNMQEMSKGSAPGPDGITLRDIQKTDPKLSRTTEIFNLWLAAGKIPDGVRECRTVLIPKSTKPERLKDINNWRPITIGSTLLRLFSRILTARLGKACPLNPRQKGFIQAAGCSENLQLLQSIIWSAKREHRSLGVVFVDIAKAFDTVSHQHILHLLQQRGVDPHIIGLASDMYENIHTSITTKKARTDRIQIRVGVKQGDPMSPLLFNLAMDPLLCELETNGRGHHHGTNCITAMAFADDLVLLSDSWEDMKSNIKILEAFCDLTGLKTQGEKCHGFYIKPTKDSYMVNDCAAWTINSTPLNMILPGESEKYLGLQIDPWTGLAKSDLSTKLDSWLEQIDRVPLKPLQKIELLKTYTIPRLTYVADHSDLKVSFLETLDQKIRTIVKDWLHLPACTCDAILYSSTKDGGLGITKLAKLIPSVQARRLHRIAQSSDETMKQFLHRDKMEAMYQKLWIQAGGDREKVPAIWEARPTIESPNLQEVGVSSEWEAPTLKSKFPKPCNWRKIEFEKWTTLISQGRGIGNFKGDQISNNWLQHYRNIPHRKLLTAVQLRANVYPTREFLARGRQDKYIRTCRHCHAANETCTHIIGNCPITQDARIKRHNYICQVLSEKAIGKDWIVYKEPHIRDSNKELYKPDLIFVKDNRAYVVDVTVRYESDETSLEMAATEKVDKYKHLTKEIQKITNAKDIVFMGFPLGARGKWYQGNFELLKALGLSKSDREKTAWSLSSIALMSSVDIVHIFASKSRTCTTLLCCLFLYILLFYLFPLYIRFNKLRRVLGRRAATSQVSQARRTWTVSRDGTYYFITRQLPSDLDQFTGFVQGGRATFT

SEQ ID NO: 26740 - protein, 1262 aa, Daphoenositta chrysoptera
MESCRLPEVYDQPTPLTSTRRDDGDESGERETKGASKTLPPKPGNCELPATPPHPPVSGEKQAQEGIVTVTIPVKNPPCPRCKTRMNSISGLIEHLKRSHGEKKVCFRCAKCGREDNNYHCIVCHVPKCKGKTEKESVGEWHCEVCGRDFNTKIGLGQHKRLAHPMTRNQERMAASHPKETSNRGAHKRCWTKEEEEMLIKLVTLFEGHKNINKLIADQITTKTAKQISDKRRLLSRNPVEADGTEPGVSHRTERTRAGRGTTSEMDPHPVNAAEEDNEAGACHPPKGTAAEGNARPEGTTGDNGPGVSHPPRRPAAGEKPEPKKSPHPDKAREQMENTNRRKEGQLRAHYERTLGEWLSTGKLYTFQQAFKQLLEGQDMQLLVNESAQDCFGCLEPTSHTATQTREKKRERTQERKQKRPPQKWMKKRAIKRGAFLRFQRLFHRDRGKLARIILDDVESLSCEIPPSEIYSVFKSRWETPGNFNSLGDFKINGKADNSAFRDLITAKEIEKNIREMNRTSAPGPDGITLGDIRKMDPEYSRTMEMFNLWLTSGKIPDTVRGCRTVLIPKSTNPERLKDVNNWRPITISSILLRLFSRIITARLTKACPLNPRQRGFIRAAGCSENLKLLQTIIRTAKREHRTLGVVFVDIAKAFDTVSHQHILYGLQQRRVDPHIVNLVSDMYKDTSTYIATKRTRTDHIQIQVGVKQGDPMSPFLFNLAMDPLLCKLEESGKGFHRGRGSVTALAFADDLVLLSDSWENMTENIKILEAFCDLTGLKTQGAKCHGFYIKPTKDSYTVNDCAAWNIKGTPLNMIHPGEAEKYLGLQIDPWTGIAKPNIATKLDLWLERIKKAPLKPLQKIDILRTYTIPRLTFLADHSEVTAAFLDSLDQKIRTVVKDWLHLPACTCDAILYSSTRDGGLGITKLAGLIPSVQARRLHRLAQSSDDTMKLFLEKDQMEKMYKKLWIQAGGNKERIPSIWEMKPVSVPSYSYNADETSEWEAPSFKNKFPKPCNWRKKEFKNWTNLVSQGRGIENFEGDKISNHWLQYYKGIPHRKLLTALQLRANVYPTREFLARGRKDKYVKSCRHCKADTESCAHIIGNCPVTQNARIKRHNYICGVLSKEAKKKDWVVFQEPHIRDTNKELYKPDLVFVKDDRAFVVDVTVRYESAVTTLEEAAAEKVNKYKHLEGEIQELTNARDIVFVGFPLGARGKWYPENFELLGELGLSKSRREKIARTLTSTALTSSVDIIHMFISKSRNCT

SEQ ID NO: 26741 - protein, 1233 aa, Sylvia borin
MGARRPPCPCCGIRVNGVSGLIEHLRGVHRWRDVCFRCAKCEKENNNYHSIICHFPKCRGKAETSAPAGEWICEVCGRDFNTKIGLGQHKRVAHPAVRNQERVDASHPKENSKRGAHKKCWTEEEVELLIKLEAQFEGHANINKLIAEHITTKTAKQISDKRRLLPKKVETEVDAEPGPSHRTRSATAERGKGVSTEIHQTEDIVEDNRPSRGPLTRRAAARERTKEEISRHPDKTNGNQETISSGRGPVTRRAAAGKKTKEEINHHSDKANDEQTIISSGRGLTTGKARARGGAIEATNQLPDKDNDEQGFLNRHREGKLKSHYQEIIETWLSAGKINTFTEAFKQLLGEQETQITINQSIQDCFGSSKTKSQLRKINRDKVNEEQRRPPQKWMKKRAIKRGTFLRFQRLFHLDRGKLAKIILDDIECLTCDIPPNELYSVFKARWETPGKFNSLGNFKIVGEADNNAFRALITAKEVEKNIQEMSKGSAPGPDGITLRDIQKMDPKYSRITEIFNLWLTAGKIPDSVRECKTVLIPKSTRPDRLKDVNNWRPITIGSTVLRLFSRILMARLTKACPLNPRQKGFIQAAGCSENLQLLQSIIWSAKREKRPLGVVFVDIAKAFDTVSHQHILQGLQQRGVDPHIIGLVSNMYDNIHTYITTKKTRTDHIQIRVGVKQGDPMSPFLFNLAMDPLLCELEANGRGHHRDTGCITAMAFADDLVLLSDSWEGMKRNIAILEAFCDLTGLKTQGEKCHGFYIKPTKDSYTVNDCDAWTVNGTPLNMILPGESEKYLGLQIDPWTGIAKSDLSTKLESWLEKIDKVPLKPLQKIELLKTYTIPRLTYLADHSDLKVSFLETLDQKIRNVVKEWLHLPPCTCDAILYSSTKDGGLGITKLARLIPSVQARRLHRIAQSSDETMKQFLDRDRMEKMHRKLWTQAGGDKEKAPAIWETKPRIEPPLMQDVDVSSEWEAPSLKSKFPKPCNWRKKEFEKWTSLVSQGRGIGNFKGDQISNNWLQYYRNIPHRKLLTAVQLRANVYPTREFLARGRQDKYNKTCRHCDASTETCAHIIGNCPITQDARIKRHNYICQVLSEKAVEKDWLVFKEPHIRDSKKELYKPDLIFVRDTKAYVVDVTVRYESDETSLEMAAAEKVDKYKHLTKEIQKLTNAKDIVFMGFPLGARGKWYHGNFELLKILGLSKSDREKTARSLSCTALMSSVDIVHIFASKSRVCTIL

SEQ ID NO: 26742 - protein, 1391 aa, Pachycephala philippinensis
MEMLESPANKLLQNLGETNFRKKPPGFIPKTSPHGFHDGQVVCGMREATTRLKPKVQYSDCSGSVRGPPIRLYQVSVGTQTSNRDWVDVVSENRLKPDSMSKSWVDLVSDSHQVDLVSKFRQIDLAPKNKVDLISQNLPSDSSELAMNELGMANLEFYRSDVLVINDCVHFSVSHESLSRLPEVYLDLTPQPCAGEDDCTPRTNKPFVLVDGGNSGEEEKDSTPGTWPPVPECNTPPATSPPPRESSQKPTPEDIPTVTVPDKSPPCPCCGTRVNSITSLIEHLKRAHGKKRFCFRCAKCGREGSNYHSIVCHVPKCRPVAESIPAGEWKCEVCGRDFKTKIGLGQHKRLAHPVIRNQERIAASHPKETSNRGAHKRCWTKEEEELLIKLVAQYENSKNINKLIAEHIPTKTVKQISDKRRLLPRIKPAEGDSSEPGISQRTRGAAAAVGTEHGRNRRPDKEEKHLEEQREGQLRAHYRRTLGEWLAAGRINVFQEAFRQLINDREITATVNESAQDCFGCLELLSQLKIATREKKTKGTQEGNKIRPRQKWMDKRAIKRGTFLRFQKLFYLDRGKLARIILDDIECLSCEIAPSEIFSVFKTRWETPGEFESLGNFQINGKADNSAFRALITAKEIERNVQEMSKNSAPGPDGITLRDIKKMDPEYSRTAEIFNLWLTAGKIPDSVRGCRTVLIPKSTQPERLKDLNNWRPITIGSILLRLFSRILTARLTKACPLNPRQRGFIRAAGCSENLKLLQTIIRSAKREHRPLGVVFVDIAKAFDTVSHQHILHVLQQRNVDPHIIGLVNDMYKNINTCITTKKSQTDPIQIRVGVKQGDPMSPLLFNLAMDPLICKLEESNNGFHQGPNSVAAMAFADDLVLLSDSWENMKRNIEILETFCNLTGLKTQGQKCHGFFIKPTKDSYTINDCAAWMINGTPLNMIDPGDSEKYLGLQIDPWTGLAKSNLDTKLDLWLQKIGKAPLKPLQKIDILKTYTIPRLTYLADHSNLKAGFLEALDLKIRSTVKEWLHLPACTCDAIMYSSTKDGGLGITKLAGLIPSVQARRLHRLAQSSDETMKMFLEKDQMEQMYKKLWIQAGGDKEKIPSIWDSKPIREPANTGGTTTTSEWEAAPSKNKFPKPCNWRKTEFNNWTKLVSQGRGIGNFEGDKISNHWLENYRGIPHRKLLTALQLRANVYPTREFLARGRQGKYIKACRHCKADNETCAHIIGNCPVTQDARIKRHNYICEVLSREAKKEDWVVYQEPHLRDNNKELYKPDLVFVKDTRAFVVDVTVRYESATTSLEEAAAEKVDKYKHLEKEIQELTNAKDIVFVGFPLGARGKWFHGNFELLGALGLSKTRQKRTARTLTSIALTSSVDIVHMFASRSRNCNQE

SEQ ID NO: 26743 - protein, 1353 aa, Certhia americana
MGPPIRLFRVSVGTQTSNRDWVDLLSRDFYPDNWSPFGSKVDLVSLVSNCRVDLLTKNRVDLIPQNFPSKSPCLAENELALLVNLEFFRSDLVVNNWERVRFSVNWEGLRGFPEVYEQLAPQLTAGEKNCLPRDCELTVLGNDEDIGEREKEGTAETSPPEPEKNTSPASPPAQPGNPGEQTSEDITAVTVPDKNPPCPCCNTRMNSILGLIEHLKKVHGKRGVCFRCAKCGRENPKYHSIVCHFPKCKGITETAPVGEWICEVCGRDFKTNIGLGQHKRLAHPEIRNQERIAASHPKETSKRGAHKRCWTKEEEELLIRLSAQFEGNRNINKLIAEHITTKTAKQISDKRRGLPTKSEEDLEKDPGLCHHTRRAAESLRTELELNHQPKIATVDKEPGRSYLPGRTAAGENNGSEISRRPVKDKGRQRTIKQQRKGQLQDHYQRTLKERLSAGTINTFPEAFRQLLDGREMQAPVNQSAQDCFGCLESISLIKNATRDKNKRGTQGKRPAQKWMKKRAVKRGKYLRFQRLFHQDKGKLAKIILDDIECLSCDIPPSEINSVFRARWETPGTFDGLGDFKINGKADNSAFRDLITAKEIEKNVREMNKNSAPGPDGITLGDIRKMDPGYSRTTEIFNLWLTSGRIPDMVRGCRTVLLPKSTKPERLKDINNWRPITIGSILLRLFSRILTARLTKACPLNPRQKGFISAAGCSENLKLLQTIIRTAKNEHRPLGVVFVDIAKAFDTVSHQHILYGLQQREVDPHIVSLVSNMYENINTYITTKKSQTDHIQIRVGVKQGDPMSPFLFNLAMDPLLCMLEESGEGHHRGASSITAMAFADDLVLLSDSWKGMESNIRILETFCNLTGLKTQGEKCHGFFIKPTKDSYTVNDCAAWTINGTPLNMIHPGESEKYLGLQIDPWTGIAKSDISTKLDFWLEQIGKAPLKPMQKIEILKLYTIPRLTYLADHSELKAGYLENLDQKIRTRVKEWLHLPTCTCDAIIYSRTKDGGLGLTRLAGLIPSVQARRLHRIAQSSDETMKMFLEKDQMEQMHKKLWIQAGGDREKIPSIWEAKPVNEPSHMCSADISTEWEAPSLKSKFPKPCNWRKIEFNKWTKLVSQGRGIENFEGDQISNHWLQHYRRIPHRKLLTALQLRANVYPTREFLARGRQDKYIKACRHCKADNETCAHIIGNCPITQDARIKRHNYICEVLSKEAKTKDWVVFKEPHLRDTNKELYKPDLIFVKDTRAFVVDVTVRYEVSKTSLEEAAAEKVNKYKHLEKEVQNLTNAKDVVFMGFPLGARGKWYQGNFDLLGALGLSKSRQEKTARSLSSIALLSSVDIVHMFASRSRTCNAL

SEQ ID NO: 26744 - protein, 1342 aa, Acrocephalus scirpaceus
MPPNSDNTIPLTMEKLLPLSGPPVRLCRRSISTQTSISDFYKTDIVPPDIPPKPPDPAENKIDCLVNLEFYRSDFSATNCVYFSVNWEGLSGFPEVYEQLAPQTTAGEKICPTRDGEVPVLEEGERNTEGEEERKTEGEKEKAETPPSDPVTTASPAPPASPITSNKQTPEDITMVTVPDKNPPCPHCGIRMNCVSGLIEHLWGVHGRKRVCFRCAKCGKENNNCHSVICHFSKCRGKVEESAPAGEWICEVCGRDFTTKIGLGQHKRLAHPAVRNQERVAASHPKPTSNRGAHKKCWTEEEEKLLIELEAQFEGHKNINKLIAEHIPTKTAKQISDKRRLLPKKDVVDLSDTEKGPYQRTRRAAARGKTMEEISSHPDKANGQQETPSKGRGPRTRRTAAGGRTKDKISPHPDKDNGEQMPGNQREVQLQAHYQETIGAWLSAGKIKTFSGAFKQLLGKQEIQVTVNQSTQDCFRNLEPKSKLKTINQEKTDKGPTRPPQKWMKKRAVKRGNYLRFQRLFHLHRGKLAKIILDDVECLTCDIPPSEIYSVFKARWETPGKFESLGNFKITGKADNSAFRDLITAKEIEKNIQEMSKGSAPGPDGITLGDIRKMDPKYSRITEIFNLWLTSGKIPDMVRGCRTVLIPKSTKPERLKDINNWRPITIGSSLLRLFSRILTARMTKACPLNPRQKGFIQAAGCSENLKLLQTIIWSAKREHRPLGVVFVDIAKAFDTVSHQHILHGLQQRGVDPHIVNLVRNMYENIYTHITTKRTQTDRIQIRVGVKQGDPMSPFLFNLAMDPLLCELEERGKGHHRGSSCITAMAFADDLVLLSDSWEDMKKNIKILEDFCELTGLKTQGEKCHGFYIKPTKDSYTVNDCAAWIINGTPLKMIQPGESEKYLGLQIDPWTGIAKSNISTNLDSWLERIDRAPLKPLQKIDLLKTYTIPRLTYLADHSDLKAGFLETLDQKIRTTVKEWLHLPSCTCDAILYSSTKDGGLGITKLAKLIPSVQARRLHRIAQSSDETMKMFLDRDQMELMHKKLWIQAGGDKEKIPEIWETKPTIEPPTSHDTDTTSEWEAPTLKSKFPKPCNWRKVEFSKWTSLVSQGRGIVNFKGDQISNHWIKYYRSIPHRKLLTALQLRANVYPTREFLARGRQDKCTKTCRHCEADNESCAHIIGNCPITQDARIKRHNYICGVLSEEARKLDWLVFQEPHIRDTNKDLYKPDLIFVKDTRALVVDVTVRYESDKTSLEHAAAEKVDKYKHLTKEVQRLTNAKDITFIGFPIGARGKWYHKNFELLETLGLSKHDQIQTARSLSCTALMSSVDIVHIFASKARTCTIL

SEQ ID NO: 26745 - protein, 1070 aa, Phylloscopus trochilus
MNHQNENAAEDNGAGRGPLTRRAAARGETKEEISQFPDKANGEQEAISSGRGLVTRRAAARGKTKEEINQYPDKANGQQEAISSGRGPVIRRAAAGKKTKEDIDHPTDKANGQQVAISTRRGCLNRGVTAGVETIEGSSHLPDKDSDGQGTPSREKEGQLQAHYQEVIGAWLSDGRINTFPEAFKGLLGKREIQATINQSILDCFGGIDSKSQVNKMNRDKKDKKPGRPPQKWMKKRAIKRGSYLRFQRLFHLDRGKLAKIVLDNIECLTCDIPPSEIYSVFKARWETAGKFTSLGDFKFTEKADNSAFRDLITAKEIEKNMQEMSKGSAPDGITLRDIQKTDPKLSRTTEIFNLWLAAGKIPDGVRECRTVLIPKSTKPERLKDINNWRPITIGSTLLRLFSRILTARLSKACPLNPRQKGFIQAAGCLENLQLLQSIIWSAKREHRPLGVVFVDIAKAFDTVSHQHILHVLQRRGVDPHIIGLVSDMYENIHTSITTKKARTDRIQIRVGVKQGDPMSPLLFNLAMDPLLCELETNGRGHHRGTNCITAMAFADDLVLLSDSWEDMKSNIKILEAFCDLTGLKTQGEKCHGFYIKPTKDSYTVNDCAAWTINGTPLNMILPGESEKYLGLQIDPWTGLAKSDLSTKLDSWLEQIDRVPLKPLQKIELLKTYTIPRLTYVADHSDLKVSFLETLDQKIRTIVKDWLHLPACTCDAILYSSTKDGGLGITKLAKLIPSVQARRLHRIAQSSDETMKQFLHRDKMEAMYQKLWIQAGGDREKVPAIWEARPTIESPNLQEVGVSSEWEAPTLKSKFPKPCNWRKIEFEKWTTLISQGRGIGNFKGDQISNNWLQHYRNIPHRKLLTAVQLRANVYPTREFLARGRQDKYIRTCRHCDAANETCAHIIGNCPITQDARIKRHNYICQVLSEKAIGKNWIVYKEPHIRDSNKELYKPDLIFVKDNRAYVVDVTVRYESDETSLEMAATEKVDKYKHLTKEIQKITNAKDIVFMGFPLGARGKWYQGNFELLKALGLSKSDREKTARSLSSIALMSSVDIVHIFASKSRTCTIL

SEQ ID NO: 26746 - protein, 1256 aa, Xiphorhynchus elegans
MVQALRVLRVSTGTQTCPLDWREALPGSRKCNTLKIPEECTAFELPLLTFVNSEFVSEREGQNPPCRWEVLAGYPEVYEVSPPSEAAPGSTPPPAETAARSGGAVEEGDCVAVTSASTREKGSADPTPGATPVVKVPDRNPPCPCCGTRVDTVSKLVDHLKTAHGKRRILFQCAKCGKKSEKCHSIACHHPHCKGTVEQLTPAGEFTCEVCGRSFSSKIGLGQHKRLSHPAIRNTERIAVSRPKEKSNRGAHRRCWTDEEEELLRTLIIQFQGKRNVNKLIAEHIPTKTAKQISDKRRLLLEPAKDKGEEPEPEPPEQDEWEQLPGGESSREGPLRAHYLRTARDWLSSNKIHTYQGAFRELLEGQQDPLSVINRASQDCYECLGTVCQISESPSTRRGNCKNSTRGPDRGKTSQKWMKKRAIKRGHYLRFQQLFHLNRGRLAKILLDDLDSMRCEIPLKELYSVFQKRWEPPGNFKSLRGFSSKGQADNTAFHVLITAKEISRNVMEMSKNSAPGPDRITLGDLIKMDPEFSLTTEIFNLWLTSGMIPDMVRGCRTVLIPKSTRPERLKDVNNWRPITIGSMILRLFSRIMTARLAKACPINPRQRGFIQAAGCSENLKLLQLLIHRAKREHRELGVVFVDIAKAFDTVSHQHILMGLKQRGVDPHIINLISNMYENIHTTISTKEGEAERIQMRVGVKQGDPMSPLLFNLALDPLLCKLEECGDGLREGNNIITAMAFADDLVLLSGSWKGMEKNIKILETFCKLTGLRTQGEKCHGFFIKPTKDSYTINDCAAWTVNGTPLNMIDPGSSEKYLGLQIDPWTGITKPEISEKLRLWLERIDKAPLKPLQKIDLLRTFTIPRIIYSLDHTEATAAFLESLDAQIRITVKDWLHLPPSTCDAILYSSTKDGGLGITRLTGLIPSVQARRLHRLAQSSDEAVRTILREERIERAYEKLWVKAGGDRKKMPSIWEAKPVMDSVDCGTEGVTSEWEVRRQKPSYPRPCNWRKREFKNWTDLVSQGRGVENFESDKISNFWLERYRGIPHRKLLTALQLRANVYPTREFLARGRRETNIKSCRHCHSENETCSHIIGNCPVVQDARIKRHNYICQMLSEAAKRKEWVVFQEPHIRDKNKELFKPDLIFVKDSKAYVVDVTVRYEYDASTLEAAAKEKRLKYQHLRSQIQELTNATDVNFVGFPLGARGKWFSKNFELLAALGLSKSQQEKTARALASRALFSSVDIIHIFASKARTVVAS

SEQ ID NO: 26747 - protein, 1135 aa, Certhia familiaris
MGKGGFVFDVLNVGGKILSITVLFVIFLNAREHQKRLQLGSGYVRYAVVTSKLISAWDNIKDWHTQKSGIRKGLLLPAQKKSSKRGAHKRCWTKEEEELLIRLSAQFEGNRNINKLIAEHITTKTAKQISDKRRGLPTKSEEDLEKDPGLCHHTRRASESLRTELELNHQPKIATVDKEPGRSYLPGRTAAGENNGSEISRRPVKDKGRQRTIKQQRKGQLQDHYQRTLRERLSAGTINTFPEAFRQLLDGREMQAPVNQSAQDCFGCLESMSLIKNATRDKNKRGTQGKRPAQKWMKKRAVKRGKYLRFQRLFHQDKGKLARIILDDIESLSCDIPPSEINSVFKARWETPGTFDGLGDFKINGKADNSAFRDLITAKEIEKNVREMNKNSAPGPDGITLGDIRKVDPEYSRTTEIFNLWLTSGRIPDMVRGCRTVLLPKSTKPERLKDINNWRPITIGSILLRIFSRILTARLTKACPLNPRQKGFINAAGCSENLKLLQTIIRTAKNEHRPLGVVFVDIAKAFDTVSHQHILYGLQQREVDPHIVSLVSNMYENINTYITTKKSQTDHIQIRVGVKQGDPMSPFLFNLAMDPLLCMLEESGEGHHRGASSITAMAFADDLVLLSDSWKGMESNIRILETFCNLTGLKTQGEKCHGFFIKPTKDSYTVNDCAAWTINGTPLNMIHPGESEKYLGLQIDPWTGIAKSDISTKLDFWLEQISKAPLKPMQKIEILKLYTIPRLTYLADHSELKAGYLENLDQKIRTRVKEWLHLPTCTCDAIIYSHTRDGGLGITRLAGLIPSIQARRLHRIAQSSDETMKMFLERDQMEQMHKKLWIQAGGDREKIPSIWETKPVNEPSNMCSADISTEWEAPSLKSKFPKPCNWRKIEFNKWTKLVSQGRGIENFEGDQISNHWLQHYRRIPHRKLLTALQLRANVYPTREFLARGRQDKYIKACRHCKADNETCAHIIGNCPITQDARIKRHNYICEVLSKEAKTKDWVVFKEPHLRDTNKELYKPDLIFVKDTRAFVVDVTVRYEASKTSLEEAAAEKVNKYKHLEKEVQNLTNAKDVVFMGFPLGARGKWYQGNFELLGALGLSKSRQEKTARSLSSIALLSSVDIVHMFASRSRTCNAL

SEQ ID NO: 26748 - protein, 1352 aa, Zosterops pallidus
MGPSIRLYQVSIGTQTSHLDWVDLVSENFKTDSWSAKRVDLVSQNLTSEPPDLAKNEIELVNLEFYRTDMLCFANENVRFSLNWECLSRLPEVYEQLTPQPTAGGGDNDPPRTDVLVNEGGSGEGEGVCALEPVPPEPENASLPATPPAPPESSGNETPEDIPTVTVPDKHPPCPRCGTRLDCMKSLIEHLKRAHGVKWTRFRCSKCGREGFNFHSIACHVPKCKVATVETAPARGWTCEECGRDFNSKIGLGQHKRHAHPLIRNQERIEASRPKEINNTGAHKKCWTKEEEEMLMKLVTQLRDCKNINKLIAEHITTKTAKQISDKRRLLPKEPAGEDNDPGVSHHTRGAVADLKTIGGLSKQPGKVEMGGEPLTSRQHRGATAGGRTMPEACQQPRDPAGSVGTSSERNHRPDKRRKHLEKLMVTDHRQREGQLRAHYQRTLGEWLSAGKINTFPEVFQQLFNGQEISSLVNKTAQDCFEDLELISQARTSTRGSTSKKGTQEVQSRRPRQKWMSKRAIKRGNYLRFQRLFHLDRGKLAKIILDDVESLSCDIPPSEIYSVFNARWNTPGKFESLGDFQIHGKADNSAFRDLITAKEIEKNVQEMSKSSAPGPDGITLGDIKKMDPEYSRTMELFNLWLTSGRIPDMVRGCRTVLIPKSTRPERLKDINNWRPITIGSILLRLFSRILTARLTKACPLNTRQRGFIKAAGCSENLKLLQTIIRSAKKNHRPLGVVFVDIAKAFDTVSHEHILHVLRQREVDPHIVDLVSNTYENISTFIDTKTAQTENIQIRIGVKQGDPMSPLLFNLAMDPLLCKLEECGKGFHQGPNSVTAMAFADDLVLLSDSWEEMKQNIKILETFCHLTGLQTQGAKCHGFFIKPTKDSYTINNCAAWTINGTPLNMIDPGDSEKYLGLQIDPWTGVAKSDLSTKIDFWLQRIGSAPLKPLQKIDILKTYTIPRLTYLADHSELKVAFLETLDQKIRATVKEWLHLPACTCDAILYSSTKDGGLGLIKLAGLIPSVQARRLHRLAQSSDETMKAFLERDQMERRYEKLWVQAGGDKGNIPSIWETKPMKEPIGSYSADTTSEWEAPSLKNKFPKPCNWRKIEFTKWTKLISQGRGISNFEGDKISNHWLEKYRGIPHRKLLTALQLRANVYPTREFLARGRRDKYTTACRHCKADNETLAHIIGNCPITQDARIKRHNYICEGLIREAKKKEWVVFQEPRLRDTNKELYKPDLVFVKDDRAFVVDVTVRYESAETSLEEAAAEKVNKYKHLETEIRELTNAKDVVFAGFPLGARGKWLHENFRLLGALGLSKTRQDKVARSLTTIALTSSVDIVHIFASRAKSSE

SEQ ID NO: 26749 - protein, 1392 aa, Cicinnurus regius
MEPLDSPPNELLLNFGETNLRTKPRGFKPETSPHGFHDGQMVRGMREATTRPKIKIHYSNALNREGSSKLGPPIRLYQVSVGTQTSSHDWVDLVSENYSKSDTLSKSWVDLVSKNHQVDLVTKSRQVDLAPKNEVDLVSQNLPSGSPELAINELVMANLEFYRSDVLGINECVHFSVSREGLSRLPEVYEDPIPQPCAGEGDCPPRTNELFVLEKGENSGEQEKDSTPGALPLVPECNTPPVTSLPPRESSEKPAPEDVPTVTVPDKNPPCPCCETRVNSITSLIEHLKRAHGKKRVCFRCAKCGREGNNFHSIVCHVPKCRPIAKETPAGEWICEVCGRDFKTKIGLGQHKRLTHPVIRNQERIAASHPKEISNRGAHKRCWTKEEEELLIKLIAQFEGNKNINKLIAEHITTKTVKQISDKRRLLPKKPAAGNNSEPKIDHQSRRTAAAVGTDPGRNHRPDKEEEHLEEQWEGQLQAHYRRTLGEWLSAGRIQDFQEAFRQLINDREITATVNQSAQDCFGCLELLSQMRTSTRERRTKGTQEGTQIRPRQKWMTKRAIRKGTFLRFQRLFYLDRGKLARIILDDIECLSCEIPPKDIYSVFKAGWETPGVFEGLGNFQINGKADNSAFRDLITAKEIEKNVQEMSKNSAPGPDGITFRDIKKMDPEYSRTAEIFNLWLTAGKIPDMVRGCRTVLIPKSSQPERLKDLNNWRPITIGSILLRLFSRILTARLTKACPLNPRQRGFIKAAGCSENLKLLQTIIRSAKREHRPLGVVFVDIAKAFDTVSHQHILHVLQQRKVDPHIIELVRDMYKNINTCITTKKTQTDPIQIRVGVKQGDPMSPLLFNLAMDPLLCKLEESNNGYHQGPNSVTAMAFADDLVLLSDSWENMKRNIEILETFCNLTGLKTQGQKCHGFYIKPTKDSYTVNDCAAWTIGGTPLNMIDPGDSEKYLGLQIDPWTGVAKSNLDTKLDFWLQQIGKAPLKPLQKIDILKTYTIPRLTYLADHSELKAGFLEALDLKIRSTVKEWLHLPACTCDAILYSSTKDGGLGITKLAGLIPSVQARRLHRLAQSSDETMKVFLEKDQMEQAYKKLWVQAGGDREKIPSIWDTKPVSVSSRLNGATETSEWEAASSKNKFPKPCNWRKTEFNNWTKLVSQGRGIGNFEGDKISNHWLENYRGIPHRKLLTALQLRANVYPTREFLARGRQDKHIKACRHCKADNETCAHIIGNCPATQDARIKRHNYICEVLSREAKKKNWVVFQEPHLRDNNKELYKPDLVLVKDARAFVVDVTVRYESAKTSLEEAAAEKVDKYKHLEKEIQELTNAKDIVFVGFPLGARGKWYHNNFELLEALGLSRTRQEKTARTLTSIALTSSVDIVHMFASRSRNCG

SEQ ID NO: 26750 - protein, 1360 aa, Motacilla alba
MVKNPNFPFFGGGVWGPPVRLSRVSVGTQTSYSDWVDLLSRNVRDTKSQGVDLVSLFPRYRVDLLPEKSQVDLVSQNLSSKFTTNLAENELDLLVNFSLELYRSDLHVHVHEHENVKSHFSVNWEVLNGLPEVYEQLAPQTGVGETLDSRLPQDCEPVVIEEGIGERVGENSPKTSPPAPEKPSQGEQAPEGTVRVTIPDKNPTCPCCSTRANSVLNLIEHLKRSHGKNLRVCFQCIKCGRENNNYHSVVCHFAKCRGPVLENSAPAGEWICEVCGRDFKTKIGLGQHKRLAHPLIRNQERIAASQPKETSNRGAHKRCWTKEEEELLIKLEAQFEGNRNINKLIAEQIPTKTAKQISDKRRLLPRKPTEEAGKEPGVYSRTRGATTSVGTGKNHQIQAETADNEPPGGRAARGRTIDKIRQHPDKSNGRKASTNQQMAGQLQAHYQKTIKELLSAGTINAFPRAFQQITDGRETQLMINQTSQECFGCLESISQIRSATRGKMKGSQEKQPKKPFQKWMKDRAIKRGNYLRFQRLFHLDRGKLAKIILDDMERLSCDIPPSEIYSVFKARWETPGRFDGLGNFEITAKTDNAAFRDLITAKEIEENVQEMTKGSAPGPDGITLGDIRKMDPGYSRTAEIFNLWLTSGKIPDIVRGCRTVLIPKSTKPERLKDINNWRPITIGSILLRLFSRIITARMSKACPLNPRQKGFIKAAGCSENLKLLQAIIQSAKREHKPLGVIFVDIAKAFDTVSHQHILHVLQQRGVDPHIVGLVNDMYKDISTYITTKRNTHTDRIQIRVGVKQGDPLSPLLFNLAMDPLLCKLEENGKGYRRGQSSITAMAFADDLVLLSDSWENMKVNIEILETFCNLTGLKMQGEKCHGFYIKPTKDSYTINNCTAWSINGTSLNMINPGESEKYLGLQFDPWTGIAKTKLSTKLESWLERIDQAPLKPLQKLDILKTYTIPRLAYVADHSEIKTGSLEALDQKIRTAVKDWLHMPPCTCDAIMYSSTKDGGLGVTKLASLIPSVQARRLHRIAQSSDEKMKDLLEKAQIERLYEKLWTQAGGKREEMPSIWETPPISNTPPNSTGTTSEREAAVENKKIPKPCNWRKEEFKKWSKLLSQGLGIKNFEGDKISNNWIQYYRRIPHRKLLTALQLRANVYPTREFLSRGREDNYIRTCRHCDADNETCAHIIGNCPVTQDARIKRHNYICELLTEEAKKKGWVAYQEPNIKDINNELYKPDLIFVKDARAIVVDVTVRYEASITSLEEADAEKVNKYKHLELEVRHLTNAEVVTFMGFPLGARGKWYEGNSELLDTLGLSKSRQEKIAKTFTTIALLSSVDIVHMFASRARKAMRNVG

SEQ ID NO: 26751 - protein, 1358 aa, Motacilla alba
MVQNPNFPFFGGGVWGPPVRLSRVSVGTQTSYSDWVDLLSRNVRDTKSQGVDLVSLFPRYRVDLLPERSQVDLVSQNLSSKFTNLAENESDLLVNFSLELYRSDLHVHVHEHESVKSHFSVNWEVLDGLPEVYEQLAPQTGVGETLDSRLPQDCDPVVIEEGIGEKVGENSPKTSPPAPEKPSQGEQAPEGTVRVTIPDKNPTCPCCSTRANSVLNLIEHLKRSHGKKRVCFQCIKCGRESNNYHSVVCHFAKCRGPVLENSAPAGEWICEVCGRDFKTKIGLGQHKRLAHPLIRNQERIAASQPKETSNRGAHKRCWTKEEEELLIKLEAQFEGNRNINKLIAEQIPTKTAKQISDKRRLLPRKPTEEADKEPGVYSRTRGATTSVGTGKNHQIQAETADNEPPGGRTARGRTIDKIRQHPDKSNGRKASTNQQMAEQLQAHYQKTIKELLSAGTINAFPRAFQQITDGRETQLMINQTSQECFGCLESISQIRSATRGKIKGSQEKQPKKPFQKWMKDRAIKRGNYLRFQRLFHLDRGKLAKIILDDMECLSCDLPPSEIYSVFKARWETPGRFDGLGNFEITAKTDNAAFRDLITAKEIEENVQEMTKGSAPGPDGITLGDIRKMDPGYSRTAEIFNLWLTSGKIPDIVRGCRTVLIPKSTKPERLKDINNWRPITIGSILLRLFSRIITARMSKACPLNPRQKGFIKAAGCSENLKLLQAIIQSAKREHKPLGVIFVDIAKAFDTVSHQHILHVLQQRGVDPHIVGLVNDMYKDISTYITTKRNTHTDRIQIRVGVKQGDPLSPLLFNLAMDPLLCKLEENGKGYRRGQSSITAMAFADDLVLLSDSWENMKVNIEILETFCNLTGLKMQGEKCHGFYIKPTKDSYTINNCTAWSINGTSLNMINPGESEKYLGLQFDPWTGIAKTNLSTKLESWLERIDQAPLKPLQKLDILKTYTIPRLAYLADHSEIKAGSLETLDQKIRTAVKDWLHMPPCTCDAIMYSSTKDGGLGVTKLASLIPSVQARRLHRIAQSSDEKMKDFLEKAQIERLYEKLWTQAGGKREEMPSIWETPPISNTPPNSTGTTSEREAAVENKKFPKPCNWRKEEFKKWSKLLSQGLGIKNFEGDKISNNWIQHYRRIPHRKLLTALQLRANVYPTREFLSRGREDNYIRTCRHCDADNETCAHIIGNCPVTQDARIKRHNYICELLIEEAKKVGWVAYQEPNIKDINNELYKPDLIFVKDARAIVVDVTVRYEASITSLEEADAEKINKYKHLELEVRHLTNAEVVTFMGFPLGARGKWYKGNSELLDTLGLSKSRQEKIAKTFTTIALLSSVDIVHMFASRARKAMRNVG

SEQ ID NO: 26752 - protein, 1332 aa, Polioptila caerulea
MGPPIRLSRVSIGTQVSWVDLVSWNFTPDPWSPFCKVDLLSLIQDCQVDLLSKNRVDLVPQNLPSKSSCLAECGLASLVNLEFYRSDLFVDNLKCVHFSMDWEGLSVFPEVYLQVAPNTGDDCLPRDKDLLVLGDGERNGERENDGPPETPLPEQEENTLPTACPAVPENREEQTPEDIVSVTVPDKNPPCPCCGTRVSSMLSLIEHLKRTHGKKRVCFRCAKCGKENSNYHSIVCHFPKCKIRAETAPVGEWICEVCGRDFKTKIGLGQHKRLAHPSVRNQERIVASHPKEISKRGAHKRCWTKEEEELLIRLEAQFEGNKYINKLIAEHITTKTAKQISDKRRLLPKKPTEDVDEKPELKYNTRRAAASGKAAGSVRAAASVRKDSERTMANEPEIRSCPGKDKERLGNIKQRRKGQLQAHYQRALNERLSDGTINTFPEAFRQLLDGQEMQSTVNQLAQDCFGCLESISQIKKATRDKNMKGPQEKRPMRPSKKWMKKRAIKKGKYLRFQRLFHLDKGKLAKIILDDIECLSCDIPPSEIYSIFKTRWETPGNFESLGDFKFKGAADNSAFRDLITAKEIEKNVQEMSKNSAPGPDGITLRDIKKMDPEYSRTTEIFNLWLISGKIPDMVRGCRTVLIPKSSKPERLKDINNWRPITISSILLRLFSRILTARLTKACPLNPRQRGFIRAAGCSENLKLLQTIIRTAKREHRPLGVVFVDIAKAFDTVSHQHILHGLQERGVDPHIVSLVSNMYENICTYITTKKTQTDHIQIRVGVKQGDPMSPFLFNLAMDPLLCALEQNGKGYHRGPDCITAMAFADDLVLLSDSWENMNKNIEVLETFCNLTGLKTQGEKCHGFYIKPTKDSYTINDCAAWTINGTPLNMIHPGESEKYLGLQIDPWTGIAKSDLSTKLEFWLERIGTAPLKPLQKIDILKTYTLPRLTYLADHSDLKAGFLETLDQKIRTTVKEWLHLPSCTCDAILYSSTRDGGLGITKLTGLIPSVQARRLHRLAQSSDETMKRFLERDQMEQTHRRLWIQAGGDEEKIPSIWEAKPASEPSDADTTSEWEAPSFKNKFPKPCNWRKNEFNKWTKLVSQGRGIINFEGDKISNHWLQHYRSIPHRKLLTALQLRANVYPTREFLARGRQDKYIKACRHCKADNETCAHIIGNCPVTQDARIKRHNYICEVLSREAKKKDWVVFKEPHIRDTNRELYKPDLVFVKDARAFVVDVTVRYEAAKTSLEEAAAEKVNKYKHLEKEIQNLTNAKDVVFMGFPLGARGKWHHGNFELLGALGLAKTRQEKTARALSTIALMSSVDIVHMFASRSRVVV

SEQ ID NO: 26753 - protein, 1107 aa, Taeniopygia guttata
MQGPETEKAPAGEWIYEVCNRNFTTKIGLGQHKRLAHPAVRNQERIVASQPKETSNRGAHKRCWTKEEEELLIRLEAQFEGNKNINKLIAEHITTKTAKQISDKRRLLPRKPAEETREEPGVCHRTRRAASGLRMEPEMSHHAQAEARDNGPGRRPLPGRAAARGRTMDEIRHHPDKGNRRQRTTKQKSEGQLQAYYKKTLEERLSAWALNTFPRAFKQVTEGRDIQLVINQTAQSCFGCLESISQIRTATRDKKDTVTREERPKKPFQKWMKDRAIKKGNYLRFQCLFYLDRGKLAKIILDDIECLSCDIPPSEIYSVFKTRWETTGNFKSLGDFKTYGKADNTAFRELITAKEIEKNVQEMSKGSAPGPDGITLGDVVKMDPEFSRTMEIFNLWLTTGKIPDMVRGCRTVLIPKSTKPDHLKDINNWRPITIGSILLRLFSRIVTARLSKACPLNPRQRGFIRAAGCSENLKLLQTIIWSKREHRPLGVVFVDIAKAFDTVSHQHIIHALQQREVDPHIVGLVSNMYENISTYITTKRNTHTDKIQIRVGVKQGDPMSPLLFNLAMDPLLCKLEESGKGYHRGQSSITAMAFADDLVLLSDSWENMNTNISILETFCNLTGLKTQGQKCHGFYIKPTKDSYTINDCAAWTINGTPLNMIDPGESEKYLGLQFDLWIGIARSGLSTKLDFWLQRIDQAPLKPLQKTDILKTYTIPRLIYIADHSEVKTGLLETLDQKIRTAVKEWLHLPPCTCDAILYSSTRDGGLGITKLAGLIPSVQARRLHRIAQSSDETMKCFMEKEKMKQLHKKLWIQAGGDRENIPSIWEAPPSIEPPNNVSTNSEWEAPTQKDKFPKPCNWRKNEFKKWTELASQGRGIVNFERDKISNPWIQYYRRIPHRKLLTALQLRANVYPMREFLARGRQDQYIKACRHCDADIESCAHIIGNCPVTQDARIKRHNYICELLLEGAKKKDWVVFKEPHIRDSNKELYKPDLIFVKDARALVVDVTVRYEAAKSSLEEAAAEKVRKYKHLEMEVRHLTNAKDVTFVGFPLGARGKWHQDNFKLLTELGLSKSRQVKMAETFSTVLLFSSVDIVHMFASRARQMVM

SEQ ID NO: 26754 - protein, 1181 aa, Erithacus rubecula
MMVTVPDKNPPCPCCGTRENSVLALIEHLKGSHGKKRICFQCVKYGKEGTNYHSIVFHFPKCRGPVTETAPAGEWICEVCGRDFQTEIGVGLHKRHAHPLIRNQERIVASHPKETSNRGAHKRCWTKEEEEMLIKLEAQFEGQKNISKLIAEHITTKTAKQISDKRRLLPRKPDKEVEEEPAVSTRTRRAAAGLRKEPELSHQNQAAVEDNGPGRSEPPGKPAARKKTIGVKSRGLEEANGRRGTIKQQMAGQLQAHYHRTLGERLSAGTINTFPGAFKQLMEGREMQETVNQSAQDCFGCLESISQIRTATRDKNKGAQEKQPRKPFQKWMKDRAIKKGDYLRFQRLFHLDRGKLAKIILDDIETLSCDIPPSEIYSVFKDRWETPGNFNGLGDFQNNGKADNSAFRDLITPKEIEKNVQEMSKGSVPGPDGITLGDIKKMDPEYSQTAEIFNLWLTSGKIPDSVRGYRTVLIPKSTEPEGLKDANNWRPITIGSILLRLFSRIVTARLSKACPLNPRQRGFIRAAGCSENLKLRQSLMRSAKKEHRPLGVVFVDIAKAFDTISHQHIIQALQQREVDPHIISLVSNMYKDTSTYITVKKNTRTQQIHFRVGLKQGDPMSPLLFNLAVDPLLCKLEESGKGYHRGRSSITAMAFADDLVLVSDSWENMVTNIKILETFCDLTGLKTQGAKCHGFYIKPTKDSYTVNDCAAWTIKGTPLKMIDPGKTEKYLGLQINPWTGIAKSNLSTKLEFWLQRIDEAPLKPLQKIDILKTYTIPRLTYLADHSDLKAGFLESLDQKIRTAVKDWLHLPSCTCDAILYSSTKAGGLGITKLAGLIPSVQARRLHRIAQSSDETMKMFLEKDQMQEMYKKLWIQAGGDREKIPSIWDALTPSEPSNDAGTTSEWEAPSLKTKFPKPCNWRKNEFKNWIKLVSQGHGIANFEWDKISNHWLQYYRSIPHRKLLTAVQLRANVYPTREFLARRRQDKYIKSCRHCDADIESCADIIGNCPVTQDARIKRHNYICEVLLEEAKKKDWLVFKEPHLRDTTKELYKPDLIFVKAACALVVDVTVRYEAAKTSLEDAAAEKVNKYKHLETEVRNLTNAKDVVFMGFPLEARGKWHQKNFELLETLGLSKSRQEKIARTLSTTELMSSVDIVHMFASRLENYVVRNSLFLFVAVLIL

SEQ ID NO: 26755 - protein, 1340 aa, Cercotrichas coryphoeus
MSPVSGLTTHYRPTAHDGPIPMGENPDLGGGVWFKVPVCLSRVSVGSQTSPSDWVNLAPQNLPSKLSPDSAENEFALLANLEFYRSDLHMYEGVHFSANWEGLRGLPEVYEQLAPQPCAGDILHTSIPRDTKLFVLEQDFCREEKETEDAPKTSPPEPGKPGEQAPEETVTVTVPDKNPPCPCCGTRVNSVLSLIEHLKGSHGKKRTCFRCVKCGKEGTNYHSVICHFAKCRGPKTETAPAGEWICEVCGRDFNTKIGLGQHKRHAHPAIRNQERIVASHPKETSNRGAHKKCWTKEEEEMLIRLEAQFEGNRNINKLIAEHITTKTAKQISDKRRLLPRKPAEDIDDEPGVSTRTRRAAAGLRKEPEGSHLTQAAGEDNRPGRSHASRKPAAGKKTMDEISHRPDKGNGQRGNIKQQKAEQLQAHYHNALGERLSDGTINTFPRAFKQLIEGQEMQATVNQAAQDCFGCLESISQIRTATRDKRTTGVQEKRPRRPFQKWMKDRAIKKGDYLRFQRLFHLDRGKLAKIILDNVETLPCDIAPSEIYSVFKDRWETPGNFNSLGDFQIYGKADNSAFRDLITAKEIEKNVQEMSKGSAPGPDGITLGDIKKMDPKYARTAEIFNLWLTSGKIPDMLRGCRTVLIPKSTEPERLKDTNNWRPITIGSILLRLFSRIITARLSKACPLNPRQRGFIRAAGCSENLKLLQSVMRSAKKEHRPLGVVFVDIAKAFDTVSHQHILHTLQQREVDTHIIDLVSNMYKDINTYITVKKNTHTDKIHIRAGVKQGDPMSPLLFNLAMDPLLCKLEESGKGFHRGRSSITAMAFADDLVLLSDSWENMKTNIRILETFCNLTGLKTQGVKCHGFYIKPTKDSYTVNDCAAWIINGTPLHMIDPDECEKYLGLQIDPWNGIAKSNLSTKLEYWLEQIDQAPLKPLQKIDILKTYTIPRLMYLADHSELKAGFLESLDQKIRTAVKDWLHLPSCTCDAILYSSTKDGGLGITKLAGLIPSVQARRLHRIAQSSDETMKMFLEKDQMEQMHKKLWVQAGGDREKIPSIWEAPPVSEPSSSAGATSEWEAPSLKTKFPKPCNWRKNEFKNWTKLVSQGRGIINFEGDKISNHWLQYYRSIPHRKLLTALQLRANVYPTREFLARGRQDKYIKVCRHCDADIESCAHIIGNCPVTQDARIKRHNHICEVLLEEAKKKDWVVFKEPHIRDTTKELYKPDLIFVKDARALVVDVTVRYETAKTSLEDAAAEKVNKYKHLETEVRNLTNAKDVAFMGFPLGARGKWHQKNFELLGALGLSKSRQEKIARTLSTTALMSSVDIVHIFASRARKLCNTK

SEQ ID NO: 26756 - protein, 1417 aa, Urocynchramus pylzowi
MGPLGITSPMKPLPNFGDTNSSAEATRLSCSKPCPPVSAGVTSSESGVTTRSVLSLECGPNSMTNSGSVLWGGGLGPMVRLSSVSVGTQTSNSDWVDLVSRNLPGAASKSQGVDLVSLYLKHWVDLCSKIDQVDLLFLKLTSKLPPDLAENELAELVNLEFYRSDLHGHEGVHFSANWEGLKWLPEVYEQLAPRPCAGGNLKPSPLQNIESKVEDSGMKVSGETPKILPPTPGKQGERPPELDIVLVNVPDKNPPCPCCGTRENSMLSLLEHLKGSHGKKRVCFRCVKCGKENNNYHSVVCHFAKCRGPKIETEPAGEWICEECGRDFKTKIGLGQHKRLAHPLLRNQERIAASQPKETSNRGAHKRCWTKEEEDALIRLEAQFEGNKNINKLIAEHITTKTAKQISDKRRMLSKKRAEDADKLEPGVCRRARKPAESVGTGAEMMSHRSQAGTATDGPGWNHLPGRSTARGKTMDKAGRLPDKGNGRKDSGEQQMAAQLRAHFRKALEDRLSAGAINTFPQAFKALLDNQEMQPLVNQATQDCFGCLESISQIRTATRDKGNKGLPVKQPKKPFQKWMKDRAVKRGNYLRYQRLFHLDRGKLAKIILDDVECLSCDIPPSQIYSVFKARWETPGTFNGLGGFEITGKADNSAFRVLISAKEIEKHVQEMTKGSAPGPDGITLGDVKKMDPEFSRTCELFNLWLTSGKIPDTVRRCRTVLIPKSTKPERLKDINNWRPITIGSILLRLFSRVVTARLSEACTLNPRQKGFIKAAGCSENLKLLQTIIWSAKREHRPLGVVFVDIAKAFDTVSHQHILHVLHQRGVDPHIIGLVNDMYKDISTYITTKRNTHTDKIQIRVGVKQGDPMSPLLFNLAMDPLLCKLEQSGKGHHRGRSSITAMAFADDLVLLSDSWEDMKANIKILEAFCDLTGLKTQGEKCHGFYIKPTKDSYTVNNCAAWTINGTPLNMIDPGESEKYLGLQFDPWTGITKSDLSAKLDFWLERIDRAPLKPLQRIDILKTYTLPRLTYLADHSELKAGHLEALDQKIRTVVKDWLHLPSCACDAILYANTKDGGLGITKLAGMIPSVQARRLHRIAQSSDETMKGFLEKDQMERMYRKLWIQAGGDGDEIPSIWEAPLVTKTPNITGETTEWEAAIRKNQFPKPCNWRKHEFDKWTKLISQGRGIVNFKGDKISNHWLQYYRSIPHRKLLTALQLRANVYPTREFLARGRQDKYNTACRHCGADNETCAHIIGCCPEVKDARIKRHNNICEMLLEEAKKKDWVVFKEPHLRDTNKELYKPDLIFVKDARALVVDVTIRYESTKTSLEEAATEKVNKYKHLETEVRNLTNVKDVVFLGFPLGARGKWYQGNFELFEALGLSKSRQETLARTLSTTALLSSVDIVHMFASRARKICNSG

SEQ ID NO: 26757 - protein, 936 aa, Passer montanus
MLISLEVQFEGNKNINKLIAEHITTKTAKQISDKRRMLAKKPAEGLKGAAAGVGMEPGMSHRSQAGVPNNGAGRSPPPGGPAAGGRTIDKIRRHPEKSHGHTSQQGAGLLRAHYQRTLAEGLSKGVINTYASAFRHITNGGEVETIINQAVQECFGCLESISQIRTATRVKKGTQEKQPKKPFQKWMKDRAIKRGNYLRFQRLFYLDRGKLAKIILDDMEHLSCDIAPGEIYSVFRDRWETPGDFKGLGDFEIFGGADNSAFKDLITAKEIEKNVQEMTKGSAPGPDGITLGDIKKMDPGYSRTAEIFNLWLTSGKIPDMVRGCRSVLIPKSTKPDRLKDINNWRPITIGSILLRLFSRIITARLSKACPLNPRQKGFIRAAGCSENLKLLHTIIRSAKREHKPLGVVFVDIAKAFDTVSHQHIIHALQQRGVDPHIIGLVKDMYKDICTHITTKRNTHTDKIQIRVGVKQGDPLSPLLFNLAMDPLLCKLEAKGKGYHRGQSSITAMAFADDLVLLSDSWENMKVNIEILETFCNLTGLKTQGEKCHGFYIKPTKDSYTVNNCAAWTINGTALNMIDPGESEKYLGLQVDPWTGIAKCNLSEKLELWLERIDQAPLKPLQKLDILKTYTIPRLIYLADHSEMKAASLEALDQKIRTAVKDWIHLPPCTCDAILYSSTRDGGLGVTKLAGLIPSVQARRLHGIAQSSDDTMKEFLERAEMERRYEKLWVQAGGKRKKIPSTWETPPASEPPGKEGTLSEWEAPTLKTKFPKPCDWRRKEFKKWTKLLSQGRGIKSFKSDKISNDWLQYYRRIPHRKLLTAIQLRANVYPTREFLSRGREDTYIKACRHCDADIESCAHIIGNCPVTQDARIKRHNNICEVLLEEAKKADWVVFKEPHIRDANKELYKPDLIFVKDTRALVVDVTVPGLSRVFQLCN

SEQ ID NO: 26758 - protein, 1430 aa, Nicator chloris
MRPEGSIPGLGPLIRLSRVSVGTQTSQLDWVDLVSRGFHPDSWSTFCKVDLVSLFPKYQVDLLAENQVDLVPRNLPSGLPDLAKNELASLVNLEFYRSDLLVDNLDCVHFSVNWEGLSRFPEVYEQLTLQPTAGEKIDLPRDSKTFVLGDGEGNNENSAVGTPETSPPEPENDISLPAESPALPLHGEQTPEDIPTVTIPDKNPSCPCCGTRMNCVSGLIEHLKGTHGKRTVCFRCVKCGKENDNYQSIVCHVPKCKGPKEPAPVGEWICEVCGRDFNSKSGLGQHKRSAHPLVRNQERIAASHPKETSNRGAHKRCWTREEEEMLIRLEAEFEGNKNINKLIAEHITTKTAKQISDKRRLLPRKTAEDEKEEPGISHRTRRAAAGLRTECGESQEPQSAAVNKEPERNHLSRGATARGRTIEKISHHPDKEPAEDEGNKPGVSHRIRRAVAGLRTEGGESQEPQSDAVDKEPGKNHLPKGATARGRTIAKISRHPDKDDGQLENIKQKKERQLQAHYQRILGEQLSAGTINTFQQAFKQLIDGQDAQSVINQSAQDCFGCLESRGKKRTTTRDKRKMGTQEKQPTRPSQKWMKKRAVKRGKYLRFQRLFHQDRGKLARIVLDDIECLSCDIPPSEIYSVFKSRWETPGKFNSLGDFQITGKADNNAFRDLITAKEIEKNVQEMSKNSAPGPDGITLGDIRKMDPGYSRTAEIFNLWLTSGKIPDTVRGCRTVLIPKSTKPERLQDINNWRPITIGSILLRLFSRIVTARLTRACPLNPRQRGFIRAAGCSENLKLLQTIIRSAKREHRPLGVVFVDIAKAFDTVSHQHIIHALQQRGVDPHIVGLVSNMYENICTCITTKKNSQTDSIQIRVGVKQGDPMSPFLFNQAMDPLLCKLEDKGKGYHQGASSVTAMAFADDLVLLSDSWENMKTNIKILETFCNLTGLKTQGEKCHGFYIKPTKDSYTVNDCAAWTINGTPLNMIDPGESEKYLGLQIDPWTGLAKSDLSKKLELWLEQIDRAPLKPLQKIDILKTYTIPRLTYLADHSELKAGFLESLDQKVRTTVKEWLHLPSCTCDAILYSSTKDGGLGITKLAGLIPSVQARRLHRIAQSSDETMKAFLEKDHMEQMHKKLWIQAGGDKEKIPSIWETKPASEPPMNAGTTSEWEAPSLKSKFPKPCNWRKIEFNKWTKLVSQGRGILNFEGDKISNHWLQYYRSIPHRKLLTALQLRANVYPTREFLARGRQDKYIKACRHCNADNETCAHIIGNCPITQDARIKRHNYICEVLLEEAKTKDWVVFKEPHIRDTNKELYKPDLVFVKDARALVVDVTVRYEAAKTSLEEAAAEKVNKYKHLEKEIQDLTNVKDVAFMGFPLGARGKWHHKNFELLGALGLSKTRQEKIARTLSTVALMSSVDIVHMFASRAKKCNSG

SEQ ID NO: 26759 - protein, 1040 aa, Phylloscopus whistleri
MLIRLEVQFEGNKNINKLIAEHIKTRTAKQISDKRRLLPRKTTDGGVKEPGMSHHTRRAAAGLRTKPEMNHQPQADKMDDGPGRSHLPGRPAAGGKTTGKARKRPDKDNGQRETMEQESIGQLQAHYHLALEERLSAGAINTLARAFKQLLDGQEVQSMVNETAQDCFGCLELISHLKTATRDKSNKGVQEKQPRRPFLKWMKTRAIRRGNYLRFQRLFHLDRGKLAKTVLDDIDCLSCDIPPSEIYSIFKARWETSGKFEGLGDFQVKGKADNTAFRDLISAKEIEKNMQEMSKGSAPGPGGIALRDIKKMDPGFSRTAEAFNLWLTSGKIPDMIRGCRTVLIPKSTEPDRLKDINNWRPITIGSILLRLFSRIVTARLSKACTLNPRQRGFIRAAGCSESLQLLQNIIRSAKRDHRPLGVVFVDIAKAFDTVSHQHIIQVLQQREVDPHIIGLVSDMYKDINTYITTKRNTHTDRIQIRVGVKQGDPMSPLLFNLAMDPLLCKLEESGKGHHRGRNSITAMAFADDLVLLSDSWEDMKTNIKILETFCNLTGLKTQGERCHGFFIKPTKDSYTVNDCTAWTINGTPLKMIDPGDSEKYLGLQFDPWTGLAKSNLSTKLDFWLERIDQAPLKPLQKIDILKTYTIPLLTYLADHSEAKAGFLEALDQKIHTVVKDWLHLPPCTCDAILYSSTKDGGLGITKLAGLIPSVQARRLHRIVQSSDETMKEFLEKDQLEHRHRRLWIQAGGSREKIPPIWETPPMNEPPVSTGATSEWEAPTSKSKFPKPCNWRKNEFQKWIKLVSQGRGIINFEGDSISNHWLQYYRRIPHRKLLTALQLRANVYPTREFLARGRQDECMKTCRHCDADNETCAHIIGNCPKMQDARIKRHNDICERLLEEAKKKDWVVFKEPHIRGNNKELYKPDLIFVKDARALIVDVTVRYEGTGTMLEEAAAEKVDKYKHLETEVRNLTNAKEVIFMGFPLGARGKWYRGNFELLTTLGLSKLRQEALARTLSTAALLSSVDIVHMFASEARRSRNVG

SEQ ID NO: 26760 - protein, 1452 aa, Lonchura striata
MASCPKPGPPVSAGAMSSESGPATHSVLAIERGPNSLAKYSRSDFGGGGLGLPIRLLRVSVGTQTSRSDWVDLVSWSHPGPESKSQRVDLVSLFPKHRVDLVSKNDQVDLVAQILPSKFPPNLAENELALLVNLEFYRSDLHVHECIRLSVDWEGLNGLPEVYEQRAPQPCVGENLHSSLPRDSEPFVPEEGSSEKGNEEAPKTSPPTPGKRGEQTGEDIVTVTVPDKNPPCPCCGTRVNSVLNLIEHLKVSHGKRGVCFRCAKCGKENNNYHSVVCHFPKCRGPEIEKAPAGEWICEVCNRDFTTKIGLGQHKRLAHPAVRNQERIVASQPKETSNRGAHKRCWTKEEEELLIRLEAQFEGNKNINKLIAEHITTKTAKQISDKRRLLPRKPAEEKIREEPGVSHRTRRAAANLRTEPGMSHHTQAEERDNGPGRSHLPGRAAAGERSMNKIRHHPDKEEPGVSHRTRRAAANLRTEPGMSHHAQAEDRDNGPGRNHLPGRATAGERPMDEMRHHPDKSNGQQRTTKRKEDGQLQAHYKKALEERLSAGVLNTFPRAFKQVMDGRDIQSVINQTAQSCFGCLESISQIRTATRNKKNTVTQEKRPQKPFQKWMKDRAIKKGNYLRFQKLFYLDRGKLAKIILDDIECLSCDIPPSEIYSVFKTRWETTGNFKSLGDFKIHGKADNTAFRELITAKEIEKNVQEMSKGSAPGPDGITLGDIVKMDPEYSRTVEMFNLWLTAGKIPDMVRGCRTVLIPKSTKPDRLKDINNWRPITIGSILLRLFSRIVTARLSKACPLNPRQRGFIRAAGCSENLKLLQTIIWSAKREHRPLGVVFVDIAKAFDTVSHQHIIHALQHREVDPHIVGLVSNMYENIDTYITTKRNTHTDKIQIRVGVKQGDPMSPLLFNLAMDPLLCKLEESGRGYHRERNSITAMAFADDLVLLSDSWENMNTNIRILETFCNLTGLKTQGEKCHGFYIKPTKDSYTINNCAAWTINGTPLNRIDPGESEKYLGLQFDPWTGIARSDLSTKLDFWLHRIDQAPLKPLQKTDILKTYTIPRLIYIADHSEIKTGLLETLDQKIRTAVKDWLHLPPCTCDAILYSSTRDGGLGITKLAGLIPSVQARRLHRIAQSSDDTMKCFLEKDRMEQLHKKLWIQAGGDSENIPSIWEAPPPSEPPNNVTTNSEWEAPTQKDKFPKPCNWRKNEFKKWTKLTSQGRGIVNFERDKISNHWLQYYRRIPHRKLLTALQLRANVYPTREFLARGRQDRYIKACRHCDADIESCAHIIGNCPVTQDARIKRHNYICELLLEEAKKKDWVVFKEPHIRDSNKELYKPDLIFVKDARALVVDVTVRYEAAKSSLEEAAAEKVNKYKHLESEVRNLTNAKDVVFVGFPLGARGKWHQGNFELLTELGLSKSRQVRLAETFSTVALFSSVDIVHMFASRAKKLCSSG

SEQ ID NO: 26761 - protein, 1103 aa, Onychostruthus taczanowskii
MKTVPAGEWICEVCGRDFQTKIGLGQHKRLAHPAIRNQERIVASQPKETSNRGAHKRCWTKEEEEMLIKLEVQFEGNKNINKLIAEHITTKTAKQISDKRRMLVRKPTGGGGDEPRPCHRTRGAAAGVGTEPGMSHHPQVGVVDNRPDENRLPGGPAAGRRTIDKRRRRPDKDNDQLISTNQQMAGVLQAHYQKTLGERLSAGTINNFADAFRHITDGREAETIINQAAQECFGCLESISQIRTATRGKKGTQEKQPKKPFQKWMKDRAIKRGNYLRFQRLFYLDRGKLAKIILDDMEQLSCDIPPNEIYSVFKARWETPGNFNGLGGFETSAVADNSAFRELITAKEIEKNVQEMTKGSAPGPDGITLGDIKKMDPGYSRTAETFNLWLTSGRIPDMVRGCRSVLIPKSIKPDRLKDINNWRPITIGSILLRLFSRIITTRLSKACPLNPRQKGFIRAAGGSENLKLLQTIIRSAKREHKPLGVVFVDIAKAFDTVSHQHIIHALQQRGVDPHIVGLVNDMYKGISTRITTKRNTHTDKIQIRVGVKQGDPLSPLLFNLAMDPLLRKLEEKGRGYHQGQSSITAMAFADDLVLLSDSWENMRINIEILETFCNLTGLKTQGEKCHGFYIKPTKDSYTVNNCAAWTINGTPLNMINPGESEKYLGLQFDPWTGIAKCNLANKLEIWLERINQAPLKPLQKLDILKTYTIPRLTYVADHAEVKTGTLEALDQKIRTTVKDWLHLPTCTCDAILYSSTRDGGLGVTKLAGLIPSVQARRLHRIAQSSDEVMKEFLEKAEMEKRYEKLWIQAGGKREKMPSIWEALPADQPSNNVGTISEWEAPTPKNKFPKPCNWRRKEFKKWTKLLSQGRGIKNFKGDKISNNWLQYYRRIPHRKLLTALQLRANVYPTREFLSRGREETSTKACRHCDAENETCAHIIGNCPVTQDARIKRHNNICEVLLEEAKKADWVVFKEPHIRDINKELYKPDLIFVKDNRAIVVDVTVRYETTKASLEEAAAEKVDKYRHLETEVRNLTNVKDITFLGFPLGARGKWHKGNFELLSTLGLSKSRQETIAKTLSADALLSSVDIVHMFASRARQIRNLG

SEQ ID NO: 26762 - protein, 1383 aa, Erithacus rubecula
MPLASGLTTHCQPTAQGGPIPMGSGSDLGGGVWFRAPVRLSRVSVGSQTSPSDWVDLVSWNFNFPGSKSNSQWVDLLPRHGVDLLPGHGVDLLSKFDQVDLVTRNLPSKLSPDLAENELALLANLEFYRSDLYVYEGVHFCADRVGLSGLPEVYEQLAPQPCTGDGSHSDLPRDTKLFVLEQKGSEEKEKVDAPKTSPQSPGKPGEQKPEETVMVTVPDKNPPCPCCGTRENSVLALIEHLRGSHGKKRICFRCVKCGKEGTNYHSIVCHFPKCRGPVTEAAPGGEWICEVCGRDFQTKIGLGQHKRHAHPVIRNQERIVASHPKETSNRGAHKKCWTKEEEEMLIKLQAQFEGQKNINKLIAEHITTKTAKQISDKRRLLPRKPDKEIEEEPPVSTRTRRAAAGLRKEPEPSHQSQAAVEDNGPGRSEPQGKPAAGKKTIGVKSRGLEEANGRRGTIKQQMAGQLQAHYHRTLGERLSAGAINTFPGAFKQLMEGREMQETVNQSAQDCFGCLESISQIRTATRDKNNKGVQEKQPRKPFQKWMKDRAIKKGDYLRFQRLFHLDRGKLAKIILDDIETLSCDIPPSEIYSVFKDRWETPGNFNGLGDFQNNGKADNSAFRDLITAKEIEKNVQEMSKGSAPGPDGITLGDIKKMDPDYSQTAEIFNLWLTSGKIPDSVRGCRTVLIPKSTEPERLKDANNWRPITIGSILLRLFSRIVTARLSKACPLNPRQRGFIRAAGCSENLKLLQSLMRSAKKEHRPLGVVFVDIAKAFDTISHQHIIQALQQREVDPHIISLVSNMYKDTSTYITVKKNTRTQQIHFRVGVKQGDPMSPLLFNLAMDPLLCKLEESGKGYHRGRSCITAMAFADDLVLVSDSWENMVTNIKILEAFCDLTGLKTQGAKCHGFYIKPTKDSYTVNDCAAWTIKGTPLKMIDPGETEKYLGLQIDPWTGIAKSNLSTKLEFWLQRIDEAPLKPLQKVDILKTYTIPRLTYLADHSDLKAGFLESLDQKIRTTVKDWLHLPSCTCDAILYSSTKDGGLGITKLAGLIPSVQARRLHRIAQSSDETMKMFLEKDQMQEMYKKLWIQAGGDREKIPSIWDALPPSEPSNSAGTTSEWEAPSLKTKFPKPCNWRKNEFKNWIKLVSQGRGIANFEGDKISNHWLQYYRSIPHRKLLTAVQLRANVYPTREFLARGRQDKYIKSCRHCDADIESCAHIIGNCPVTQDARIKRHNYICEVLLEEAKKKDWVVFKEPHLRDTTKELYKPDLIFVKDARALVVDVTVRYEAAKTSLEDAAAEKVNKYKHLETEVRNLTNAKDVAFMGFPLGARGKWHQKNFELLEALGLSKSRQEKIARTLSTTALMSSVDIVHMFASRARKLCSQE

SEQ ID NO: 26763 - protein, 1181 aa, Erithacus rubecula
MVTVPDKNPPCPCCGTRENSVLALIEHLKGSHGKKRICFRCVKCGKEGTNYHSIVCHFPKCWGPVTEAAPAGEWICEVCGRDFQTKIGLGQHKRHAHPLIRNQERIVASHPKETSNRGAHKRCWTKEEEEMLIKLEAQFEGQKNINKLIAEHITTKTAKQISDKRRLLPRKPDKEVEEEPAVSTRTRRAAAGLRKEPELSHQSQAAVEDNGPGRSEPLGKPAAGKKTIGVKSRGLEEANGRRGTIKQQMAGQLQAHYHRTLGERLSAGAINTFPGAFKQLMEGREMQETVNQSAQDCFGCLESISQIRTATRDKNNKGAQEKQPRKPFQKWMKDRAIKKGDYLRFQRLFHLDRGKLAKIILDDIETLSCDIPPSEIYSVFKDRWETPGNFNGLGDFQNNGKADNSAFRDLITPKEIEKNVQEMSKGSAPGPDGITLGDIKKMDPEYSQTAEIFNLWLTSGKIPDSVRGYRTVLIPKSTEPERLKDANNWRPITIGSILLRLFSRIVTAKLSKACPLNPRQRGFIRAAGCSENLKLLQFLMRSAKNEHRPLGVVFVDIAKAFDTISHQHIIQALQQREVDPHIISLVSNMYKDTGTYITVKKNTRTQQIHFRVGVKQGDHMSPLLFNLAMDPLLCKLEESGKGYHRGRSSIMAMAFADDLVLVSDSWENMVTNIKILETFCDLTGLKTQEAKCHGFYIKPTKDSYTVNDCAAWTIKGTPLKMIDPGETEKYLGLQIDPWTGIAKSNLSTKLEFWLQRIDEAPLKPLQKIDILKTYTIPRLTYLADHSDLKAGFLESLDQKIRTTVKDWLHLPSCTCDAILYSSTKAGGLGITKLAGLIPSVQARRLHSIAQSSDETMKMFLEKDQMQEMYKKLWIQAGGDREKIPSIWDALPPSEPSNDAGTTSEWEVPSLKTKFPKPCNWRKNEFKTWIKLVSQGRGIANFEGDKISNHWLQYYRSIPHRKLLTAVQLRANVYPTREFLARRRQDKYIKSCRHCDADIESCADIIGNCPVTQDARIRRHNYICEVLLEEAKKKDWVVFKEPHLRDTTKKLYKPDLIFVKAACALVVDVTVRYEAAKTSLEDAAAEKVNKYKHLETEVRNLTNAKDVVFMGFPLEARGKWHQKNFELLETLGLSKSRQEKIARTLSTTELMSSVDIVHMFASRLENYVVRNSLFLFVAVLIL

SEQ ID NO: 26764 - protein, 1171 aa, Agelaius phoeniceus
MPEVRSEQSPIDIVKVTVPDKNPPCPCCGTRLNSMLALIEHLKGSHGRKRVCFKCAKCGRENFNHHSTVCHYAKCKGPKDAGPPVGEWICEVCGRDFMTKIGLGQHKRLAHPLVRNQERIDASQPKETSNRGAHKRCWTKEEEELLVRLEVQFEGYKNINKLISEHLTTKTAKQISDKRRMLIKKNELGGRAAGTMDSEPGPSQQSQAGAVNNGLGGNHLPGGPAAGKGTIGTLGQHLDKDNGPRETVGRKRAGRLQARYHTRIKERLSEGTINNFPRAFEQLLEGHEMRPLLNQTAQDCFGCLESVSQIRTALRGKDKKKNGEEKPKKQFQKWMKDRAIKRGNYLRFQRLFHLDRGKLAKIILDDIECLSCDIPPGEIYSVFKARWETPGQFTGLGDFKIKGKAHNKAFRSLITAKEIEKNVREMSKGSAPGPDGIALGDIRKMDPGYTRTAELFNLWLTSGDIPDMVRGCRTVLIPKSTKPERLKDINNWRPITIGSILLRLFSRIVTARMTKACPLNPRQRGFISAPGCSENLKLLQTIIRTAKNEHRPLGVIFVDIAKAFDTVSHRHILHVLQQRRVDPHIIGLVDNMYKDISTYVTVKKNTHTDKIQIRVGVKQGDPLSPLLFNLAMDPLLCKLEESGKGFHRGGSSITAMAFADDLVLLSDSWENMNVNIKILEAFCDLTGLKTQGQKCHGFYIKPTKDSYTVNNCAAWTINGTPLNMINPGESEKYLGLQIDPWTGFAKTDLSTKLDVWLERIDQAPLKPLQKLDILKTYTIPRLTYLADHTEMKAGALEALDLKIRTAVKDWLHLPPCTGDAILYSSTRDGGLGVTKLAGLIPSVQARRLHRIAQSPDETMKTFLERAEMEKMYEKLWLQAGGKKKAMPSIWDALPAPVPLATTEALSEWEAPNPKSKFPRPCDWRKKEFKNWTKLECQGRGVKNFRGDTISNNWLQHYRRIPHRKLLTALQLRANVYPTREFLARGRGDNCVKFCRHCEADLETCSHIIGFCPVTKDARIKRHNRIGERLIEEAKKRDWVVFKEPHIRDATKELYKPDLIFVKEDRALVVDVTVRFESTKTTLEEAAMEKVNKYKHLETEVRSLTNAKDVVFMGFPLGARGKWYKGNFELLDTLGLPRSRQMTVARTLSMDALISSVDIVHMFASRARKSNV

SEQ ID NO: 26765 - protein, 1057 aa, Zonotrichia albicollis
MHAMVRNQERIDASQPKETSNRGAHKRCWTKEEEELLMKLEVQFENHKNINKLIAEQLTTKTAKQISDKRRMLLKKGRGTTGNLETEPGMSHQSQAKVKDNGLGGDHLPGGPVVDKGTIGKPGQHLDTDNSHQITAGKKKGGGLQARYRRRIMKRLAAGTINIFPKVFKELINDQEARPLINQTTEDCFGLLDSACQIRTALREKGKSQEERPRKQYQKWMKKRAIKRGDYLRFQRLFHLDRGKLARIILDNTESLSCDISPSEIYSVFKARWETPGHFNGLGDFEIKGKANNKAFRDFITAKEIEKNVREMSKGSAPGPDGIALGDIKKMDPGYSRTAELFNLWLTAGDIPDMVRGCRTVLIPKSTTPERLKDINNWRPITIGSILLRLFSRIITARMTKACPLNPRQRGFISAPGCSENLKLLQSIIRTAKNEHKPLGVIFVDIAKAFDTVSHQHIIHVLQQRRVDPHIVGLVNNMYKDISTYVTTKKNTHTDKIQIRVGVKQGDPLSPLLFNLAMDPLLCKLEESGKGFHRGQSSITAMAFADDLVLLSDSWENMKENIKILETFCNLTGLKTQGQKCHGFYIKPTKDSYTINNCPAWTINGTPLNMINPGESEKYLGLQIDPWTGVAKYDLSTKLKIWLESIDRAPLKPLQKLDILKTYTIPRLTYLADHSEMKAGALEALDQQIRTAVKDWLHLPSCTCDAILYVSTRDGGLGVTKLAGLIPSVQARRLHRIAQSPDETMKDFLEKAQMEKMYEKLWVQAGGKKKGMPSIWEALPMTVPPTNTGNLSEWEAPNPKSKYPKPCDWRRKELKKWTKLESQGRGVKNFRNDTISNDWIQYYRRIPHRKLLTAIQLRANVYPTREFLARGRGDNYVKFCRHCEADLETCGHIIGFCPVTKDARIKRHNRICDRLCEEAAKREWVVFKEPHLRDATTELFKPDVIFVKEDRALVVDVTVRYESAKTTLEAAAMEKVDKYKHLEAEVKELTNAKDVVFMGFPLGARGKFYKGNFNLLETLGLPKTRQLSVAKTLSTYALMSSVDIVHMFASRSRKPNV

SEQ ID NO: 26766 - protein, 1460 aa, Calcarius ornatus
MVLNPDPSFGGGVWGPPVRLSRVSVGTQTSPTDWVDLVSRGLPGTKSSSQGVDLVSPFPRHWVDLLSKIDGVDLVSRGLPGTKSSSRGVDLVSSLSRHQVDLLSKTEQVDLVSQNYLTSKTTNLAENELDLLVNFSLELYRSDLHEHVHEGVHFSVDWEVLSGLPEVYEQLAPQPCVGENLDSSLPQDSEPFVLGEGSGEEVSEGTPEALPPVPGEHAGQSPDNIVKVTVPDKNPPCPCCGTRVNSVLSLIEHLKGLHGKRRVCFRCAKCGKENTNYHSVICHFAKCKGPETGRIPAGEWICEVCGRDFTTKIGLGQHKRLAHPLVRNQERIVASQPKETSNRGAHKKCWTKEEEDLLIRLEAQFEGNKNINKLIAEHITTKTTKQISDKRRLLPKKPTDGTDNEPGVSHRTRGAVGGVGTEPGLSQVSQAKLVDNGPGRSLRPRRAAGGVGTEPGSSQQSQAGAVNNGPGRSLRPRRAAGGVGTEPGSSQQSQAGAVNNGPGEDHLPGRPAAGGKTMEKLSRHPDKDNGRQETSGQQRPGQLQAHYQKTIKERLSAGAINNFPSAFKQVMDGQEMLTMINQTAQDCFGCLESISQIRTATRGKTGKETREKQHRKKFQKWMKDRAIKKGNYLRFQRLFHLDRGKLAKIILDDIECLSCDISPSEIYSVFKARWETPGNFAGLGDFEISGKADNSAFRELITAKEIERNVQEMSKGSAPGPDGITLGDIKKMDPGYSRTAELFNLWLTSGEIPDMVRGCRSVLIPKSTKPERLKDINNWRPITIGSILLRLFSRIVTARLSKACPLNPRQRGFIRAAGCSENLKLLQTIIRTAKSEHRPLGVVFVDIAKAFDTVSHQHIIHALQQREVDPHIIGLVNNMYRDISTYVTTKKNTYTDKIQIRVGVKQGDPLSPLLFNLAMDPLLCKLEESGTGFHRGQNVITAMAFADDLVLLSNSWENMRTNIRILEKFCKLTGLKTQGEKCHGFYIKPTKDSYTVNNCAAWTINGTPLNMINPGESEKYLGLQFDPWTGIAKTNLPTKLESWLERIDQAPLKPLQKLDILKTYTIPRLTYLADHSEMKAGALEALDQKIRTAVKDWLHLPPCTCDAILYSSTKDGGLGVTKLAGLIPSVQARRLHRIAQSSDETMKEFLEKDQMEQLYKKLWIQAGGESEKIPSIWEALPTNEPSNSADTESEWEAPILKTKFPKPCDWRKKEFKKWTNLVSQGRGIKNFEGDKISNNWLQYYRRIPHRKLVTALQLRANVYPTREFLSRGREENYTKVCRHCKADNETCAHIIGYCPVTQDARIKRHNHICERLIEEAKKKDWVVFKEPHIRDTIKELYKPDLIFVKDERAFVVDVTVRYEASKTSLEEAAAEKVNKYKHLETEVRNLTNVKDVVFMGFPLGARGKWYERNFELLDALGLSKSRQVTVAKTLSTDALLSSVDIVHMFASRARKLQDIG

SEQ ID NO: 26767 - protein, 892 aa, Rhodinocichla rosea
MEGQVMRTIVNQAAQDCFGCLESISQIRTATRGKNSGKESAREKPPRKPFQKWMKERAIKKGNFLRFQRLFHLDRGKLAKIILDDIECLSCDISPSEIYSVFRGRWETPGNFAGLGDFEINGKADNNAFRDLITAKEIERNVQEMSKGSAPGPDGITLGDIRKMDPGYSRTAELFNLWLTSGEIPDMVRGCRTVLIPKSTKPERLKDINNWRPITIGSILLRLFSRIITARLSKACPLNPRQRGFIRAAGCSENLKLLQTIIRTAKNEHRPLGVVFVDIAKAFDTVSHQHILHALQQRGVDPHILGLVNNMYKDISTYVTTKRNTHTDKIQIRVGVKQGDPLSPLLFNLAMDPLLCKLEASGKGFHRGHSSITAMAFADDLVLLSDSWENMKTNIKILETFCDLTGLKTQGEKCHGFYIKPTKDSYTVNNCAAWTINGTPLNMINPGESEKYLGLQFDPWTGIAKTNLATKLECWLERIDQAPLKPLQKLDILKTYTIPRLTYLADHSEMKAGALEALDQKIRTAVKDWLHLPSCTCDAILYSSTKDGGLGVTKLAGLIPSVQARRLHRIAQSSDETMKEFLERDQMEQLYRKLWIQAGGDSEKIPSIWEALPTSEQTGSVGTTSEWEAPTLKTKFPRPCDWRRKEFEKWTKLVSQGRGITSFKDDKISNDWLQYYRRIPHRKLLTALQLRANVYPTREFLSRGREENNIKACRHCNVENETCAHIIGYCPATKDARIKRHNHICDMLSEEARKKDWVVFKEPHIRDTIKELYKPDLIFVKEERAIVVDVTVRYETSKTSLEEAAAEKVNKYKHLGAEVRKLTNTKDVAFMGFPLGARGKWYAGNFELLNTLGLSKSRQARVAKTFSTAALLSSVDIVHMFASRAKRVHDLG

SEQ ID NO: 26768 - protein, 1313 aa, Geospiza fortis
MATHPVPADESGHESDPFLVGRSCGQPARLTRQSVGTQTSRDDILPSKTTKLTENELDLLVNFSLELYRSDLQGFVQEGIHFSVNREVLEGFPEVYEQPAPQPAVGDDLNTSLPPDNNICVLEKGSSEAVEDGTPEVAHPVPETQGKESPNNIVMVTLPNKNPPCPCCRVRLHSVLALIEHLKGSHGKKRACFRCVKCGRENFNYHSTVCHIAKCKGPKVEKAPVGEWICEVCGRDFTTKIGLGQHKRLAHPLVRNQERIDASQPKETSNRGAHKRCWTKEEEEMLIKLEVQFEGHRNINKLIAEHLTTKTSKQISDKRRLLPRKQLTDLSKGVAGQKVLDPGLSHQPQLGVVDNGLGGGHLPGGPAAEGRTIEPLGHHLDKDNGHREIADQHKAGRLQAHYRKKIRKRLSEGMISNFPEVFEQLLDCQEAQPLINQAAQDCFGCLDSASQIRKALRKQNTQKDQGDQPKRPAQKWMKKRAVKRGHFLRFQKLFHLDRGKLAKIILDDVECLSCDIPPSEIYSVFKARWETPGQFAGLGDFEINRKANNKAFRDLITAKEILKNVREMTKGSAPGPDGIALGDIRKMDPEYTRTAELFNLWLTSGEIPDMVRGCRTVLIPKSSKPERLKDINNWRPITIGSILLRLFSRIITARLTKACPLNPRQRSFISAAGCSENLKLLQTIIRTAKNEHRPLGVVFVDIAKAFDTVSHQHIIHVLQRRRVDPHIIGLVKNMYKDISTVITTKKNTYTDKIQIQVGVKQGDPLSPLLFNLAMDPLLCKLEEHGKGFHRGQSKITAMAFADDLVLLSDSWEDMNANIKILETFCDLTGLKTQGQKCHGFYIKPTKDSYTVNNCAAWTINGTPLNMINPGESEKYLGLQFDPWVGIAKTSLPEKLDFWLERIDRAPLKPFQKLDILKTYTIPRLTYVADHSEMKAGALEALDRTIRSAVKDWLHLPSSTCDAILYTSMKDGGLGVTKLVGLIPSVQARRLHRIAQSPEETMKDFLEKAQMEKMYEKLWVQAGGKRKRMPSIWEALPEVVPSIDTATTSEWEAPNPKSKYPRPCNWRRKEFKKWTKLIAQGWGIRCFKGDKISNNWIRHYRYIPHRKLLTAIQLRASVYPTREFLARGREDNCVKSCRHCEAAEESCAHIIGMCPVVRDARIKRHNRICERLMEEAGKRDWTVFQEPHIRDVTKELYKPDLIFVKEGLALVVDVTIRFESTKTTLEEAAAEKVNKYKHLETEVRNLTNAKDVIFMGFPLGARGQWYNKNFELLDTLGLPRSRQDIIAKTLSTDALISSVDIIHMFASRGRRQHA

SEQ ID NO: 26769 - protein, 1312 aa, Passer montanus
MVQALTLRYISTGTQTDPSDLWVKGKVDGGPHLESDGLVSRNLITFDNNNPDWLALLNASFEVYRSDLHVHKGTYFSGGSWEVLNGLPEVYEQLNLQPFVGENFLDSRLPGNSEEENSEKVDVGTSKTSPPTPGKHAEQAPDDIVTVTVPDKNPPCPCCGTRVNSVLCLIEHLKVLHGKRRVCFRCVKCGKENNNYHSIICHFGKCRGPVLETVPVGEWICEVCGRDFKTKIGLGQHKRLAHPSIRNQERIAASQPKETSNRGAHKRCWTKEEEEMLIRLEVQFEGNKNINKLIAEHIITKTAKQISDKRRTLAKKPTEKVHGEPGSHRRTTAAAAGVGTESGMSQHTLVGVADNGRSPLPGGPAAGVRNADKIRRHPDKVDGHLGTTGQQGTGRLRAHYHRTLEKGLSAGVITNYASAFRHIMDGREAETVINQAAKECFGCLESISQIRTATRVKKGTQEKQPKKPFQNWMKTRAIKRGHYLRFQRLFYLDRGKLAKIILDDVEHLSCAIPPGEIYSVFKARWETPGNFNGLGDFEISGGADNSAFKDLITAKEIEKNVQKMTKGSAPGPDGITLGDIRKMDPGYSRTAEIFNLWLTSGKIPDMVRGCRSILIPKSTKPDRLKDINNWRPLTIGSILLRLFSRIITARLSKACPLNPRQKGFVSAAGCSENLKLLHTIIRSAKREHKPLGVVFVDIAKAFDTVSHQHIIHALQQRGVDPHIIGLVNDMYKDIGTRITTKRDTHTDEIQIRVGVKQGDPLSPLLFNLAMDPLLCKLEAKGKGYHREQSSITAMAFADDLVLLSDSWENMERNIEILETFCNLTGLKTQGEKCHGFYIKPTKDSYTVNNCAAWTINGTPLNMIDPGESEKYLGLQFDPWTGIAKCNLSEKLELWLERIDQAPLKPLQKLDILRTYTIPRLTYQADHSEMKAASLEALDQQIRIAVKDWLHLPSSTCDAILYSRSTDGGLGITKLAGLIPSVQARRLHQIAQSSDETMKEFLEKAEMERRYEKLWIQAGGKRKKMPSIWEALPKEEPSSQKSTLSEWEAAAPKTKFPKPCDWRRKEFKKWTKLLSQGRGIKNFKKDKLSNNWLQYYRRIPHRKLLTAIQLRANVYPTREFLSRGREDTAIKACRHCDADIESCAHIIGNCPVTQDARIKRHNNICEVLLEEAKKADWVVFKEPHIRDISKELYKPDLIFVKDSHAIVVDVTVRYEAAKTTLALAAAEKVDKYKHLATEVRNLTNAKDVVFMGFPLGARGKWYRGNFELLNTLGLSKSRQETIARTLSVDALISSVDIVHIFASRARQLVRNVG

SEQ ID NO: 26770 - protein, 1423 aa, Agelaius tricolor
MEFGNGLTTHSVLTVECGPNSMVIPDPSFGGGVWGPPVRLSRVSVGTQTSPSDWVDLLSRGLPGARSNSQRVDLVSLFPRHRVDLLSKTQRVDLLSESQRVDLLSKRRRVDLLSDSQRVDLLSKTHRVDLLSKTDRVDLVSQIDLTSKTTNLAENELDLLVNFSLELYRSDLHVHEGVHFSVDWEVLNRLPEVYEELAPQPCVGENLDSSPPQDSEPLVLGEGSGEKAGGGTPEALPPVPGENGGQSPDNIVKVTVPDKNPPCPCCGTRVNSVVSLLEHLKGSHGKKRVRFRCAKCGKENVNYHSVICHFPKCKGAEIEKVPAGEWICEVCGRDFTTKIGLGQHKRLAHPLIRNQERIVASQPKETSNRGAHKRCWTKEEEELLIKLEAQFEGNKNINKLIAEHITTKTAKQISDKRRLLPKKLPEVTDKEPGVCLRTRRAAGSVGTEPGTSQQSQAGILDNGPGKCHLPGRPAAGEKTMEKLRRHPDKDNGRQKTSGQRREGLLQAHYQKTIKEGLSAGAINNFPGAFKQLMDGREMRTMINQTAQDCFGCLESISQIRTAMRGKNSGKKATMEQPARKFQKWMKDRAIKKGNFLRFQRLFHLDRGKLAKIILDDIECLSCDISPSEIYSVFRARWETPGNFAGLGDFKITGKADNNAFKDLITAKEIERNVQEMSKGSAPGPDGITLGDIVKMDPGYSRTAELFNLWLTSGEIPDMVRGCRSVLIPKSTKPERLKDINNWRPITIGSILLRLFSRIVTARLSKACPLNPRQRGFIRAAGCSENLKLLQTIIRTAKSEHKPLGVVFVDIAKAFDTVSHQHILHALQQRGVDPHIIGLVNNMYKDISTYVTTKRDTHTDKIQIRVGVKQGDPLSPLLFNLAMDPLLCKLEESGKGFHRGESSITAMAFADDLVLLSDSWENMQTNIKILETFCDLTGLKTQGEKCHGFYIKPTKDSYTINNCAAWTINGTPLNMINPGESEKYLGLQFDPWTGLAKTNLTTKLEFWLERIDQAPLKPLQKLDILKTYTIPRLTYLADHSEIKAGALEALDQKIRTAVKDWLHLPPCTCDAILYSSTKDGGLGVTKLAGLIPSVQARRLHRIAQSSDETMKEFLEKDQMEQLYRKLWVQAGGEREEIPSIWEALPTSEQSNRGDTTSEWEAPILKPKFPKPCDWRKKEFEKWTKLVSQGRGISSFKNDSISNDWLQYYRRIPHRKLITALQLRANVYPTREFLSRGREENSTKACRHCNVENETCAHIIGQCPVTKDARIKRHNHICDMLSEEARKKDWVVFKEPYIRDTTKELYKPDLIFVKDGHAFVVDVTVRYETTTTSLEEAAAEKVNKYKHLETEVRNLTNAKDVVFMGFPLGARGKWYTGNFELLNTLGLSKSRQVRVAKTLSTVALLSSVDIVHMFASRARRVQDSG

SEQ ID NO: 26771 - protein, 1313 aa, Camarhynchus parvulus
MATHPVPANESGHESDPFLVGRSCGQPARLTRQSVGTQTSRDDILPSNTTKLTENELGLLVNFSLELYRSDLQGFGQEGVHFSVNREVLEGFPEVYEQLAPQPVEGDDLNTSLPPDNNICVLEKGSSETVEDGTPEVAPPVPETQGKESPNNIVMVTLPDKNPPCPCCRVRLHSVLALIEHLKGSHGRKRACFRCVKCGRENFNYHSTVCHIAKCKGPKVEKAPVGEWICEVCGRDFATKIGLGQHKRLAHPLVRNQERIDASQPKETSNRGAHKRCWTKEEEELLIKLEVQFEGHRNINKLIAEHLTTKTSKQISDKRRILPREQLSNLSKGVAGQQGLDPGLSHQPQLGVADNGLGGGHLPGGPAAEGRTIEPLGHHLDKDNGRREIADQQKAGRLQAHYRKKIRKRLSEGMISNFPEVFEQLLDCQEAQPLINQAAQDCFGCLDSASQIRKALRKQNTKKDQGDQPKRPAQKWMKKRAVKRGHFLRFQKLFHLDRGKLAKIILDDIECLSCDIPPSEIYSVFKARWETPGQFAGLGDFEINRKANNKAFRDLITAKEVLKNVREMTKGSAPGPDGIALGDIKKMDPEYARTAELFNLWLTSGEIPNMVRGCRTVLIPKSSKPDRLKDINNWRPITIGSILLRLFSRIITARLTKACPLNPRQRGFISAAGCSENLKLLQTIIRTAKNEHRPLGVVFVDIAKAFDTVSHQHIIHVLQRRRVDPHIIGLVKNMYKDISTVITTKKNTYTDKIQIQVGVKQGDPLSPLLFNLAMDPLLCKLEEHGKGFHRGQSKITAMAFADDLVLLSDSWEDMNANIKILETFCDLTGLKTQGQKCHGFYIRPTKDSYTVNNCAAWTINGTPLNMINPGESEKYLGLQFDPWVGIAKTSLPEKLDFWLERIDRAPLKPFQKLDILKTYTIPRLTYVADHSEMKAGALEALDQTIRSAVKDWLHLPSSTCDAILYTSTKDGGLGVTKLAGLIPSVQARRLHRIAQSPEGTMKDFLEKAQMEKMYEKLWVQAGGKRKRMPSIWEALPVVAPSIDTATTSEWEAPNPKSKYPRPCNWRRKEFKKWTKLIAQGRGIRCFKGDKISNNWIRHYRYIPHRKLLTAIQLRASVYPTREFLARGREDNCVKSCRHCEAAEESCAHIIGMCPVVKDARIKRHNRICERLMEEAGKRDWTVFQEPHIRDVTKELYKPDLIFVKDGLALVVDVTVRFESTKTTLEEAAAEKVNKYKHLETEVRNLTNAKDVIFMGFPLGARGQWYNKNFELLDTLGLPRSRQDIIAKTLSTDALISSVDIIHMFASRSRRQHA

SEQ ID NO: 26772 - protein, 1048 aa, Chrysotoxum bicinctum
MIVTPPTEIHVQEQRILITETRPAENHIQPLTHSEVLLTEDISEPSSELRNTVTEEFYKLFAIFDKSNPLNRPPIAKIGTSSKACRIIQCLNEGVLYELTELSENLEDFQTLIYCAAQTVTTLMGKGPKPFPSTSREGPIKPPPWLGRIDKQIKMLRSKISKLTEFIRGNTSRRLKVSVNRICREYRNHTRYENNNNVIKRVLDTVKQKLGVVKTKRRKYLLSERRKRSNSTFFKNQKLFYRKLKENNASNQISLDIPTTGTIENYWSSIWANTAIHNNNAQWINHEKRRFSATSPMESYIVTTENLKSVLSRTQNWKAPGPDRIQNFWLKRFKTTHERLVELYNLAIQQPETFPSFLSQGVTYLLPKTDSFNGDPSKGRPITCLSTLYKVLTGCINNIIYEHLEVNNMMAEEQKGCVRAARGCKEQLTIDQVILEQATQTSRNLYVGYIDYQKAFDSIPHSWLIEVLHMHRVNETIISFLTYAMKLWKTSIEIHDGAENQKTNLIPIKRGIFQGDCLSPLWFCLALNPLSKMLNETGYGFTLRKDVEAIHKINHLLYMDDIKLYASTKAHLNRLLEITKFFSDDIKMTFGIDKCKTISINKGKVKETNTDELFGIAEMNQEDFYKYLGVAQSNRINQKKMKEKLINEVIGRIHKLAKSQLNGKNLFKAINAFAIPVLTYSFGIVKWSDTELQAIQRKIRTTLTKHQIHHPKACKERMVLPRRLGGPGLIDIHLLHDNQVEALRKYFSEAARTSNLIQGIVTVDETYTPLKLGKDQIQRTSKNNRDKLVEWSQKAIHGKYYYSLQNHNVDVNMSHRWLTNGSIYSETEGFMLAIQDEVIPTRNYQRYVMKSPDAAEDKCRRCGGNGETIDHIISACPVLTQSDYLKRHNNVAKIIYMEILNMYNITTEKQRYYLFDPEAVVENNDIKIYYDRTIFTAHRREHNRPDITIIHKKQKKAYLIDVAIPLSRNMERTYNEKISKYAELAVEMKNQWNLKNVQIVPIIMSSVGIVHNNLKNCLQQLNISEKVIGKIQKAVIIDTCHIVRKFMQ

SEQ ID NO: 26773 - protein, 1062 aa, Cantharis rustica
MKKREAVLTNPPPGTTARVTRSANAIPARDAHKNEKGEPGGGSPKPKPPPAIDDHAPDPGCSTILPTPGPTQPRAIGSARVAALTTKPRYSASPTPGPSRLAALATKPRYSASPTPGPSRLCVSSPLAEDPAAASKPKANISTRRRVTFKLDTGTRKAPAKTGCGGRTRGGARTTSPARTTITGGPAGPSPDRTHYAETHPPLPEPQAPNTPETAGESSATPGATLPHTPPLGPTPAPIAHADCQLGVDPVFTAGASSATPGATLPTFERRLSGYGLATPTDETPRPSRAHTTSPDTSDWRTDILRECAEIEQLLPFALQLRNISRTRIPAADEIDEAIASLVAAAKIDTRPPTRDRTSKRVSGSKRTAEKRTGYAKTQELFKKNPSQLANLIINGHAHELTGTVKSKPPYGDVARLYSELWERSSEAAPLQANTNDVPVPAITIAEVQKYIQKLKNKGAPGPDGVTKMGLRAPGMAEALVMVFNSILAREYYPAAWCVNRTTFIPKEGKDLTRPESWRPITIASVLARIFSSCVRARVENTTTISPRQRGFVSGNGCFINAMLLDEAVRQSKRSRLCAAQLDLTKAFDMIPHSAIAETLINKRVPRTLTNLILGMYESASTTITGTNHNIKIGRGVKQGDPLSPLLFNLVLDSTMRSLEAAEGFHIAPDKNLPVLAFADDLILLAGSPVDLQSLLNITSRGLGEVGLKISPGKSAAFSVRGVGRTWVAERIEASVQGGALRCYQVDEIFDYLGVSYTLAEGFSNREHLRQIVRAAEDCGRLALKPTQKAALLAQYLIPKYIHRFTIDSPSKTTLGQIDDAIRGACKAFLHLPACTTDHVFYTRKRDGGLGFPRLAHLVSLNSIKALSRMSRDGDPLVREIAARGDFGRRIRKHAILLGMQVPATHLQINKKKIDLKTAQHRLWEGQPTQGKGVANFRDNPLANAWLLKNSLREGEFIDLIKMRTNTYGVRETLKHSGFPHVDSACRHCHVKPETLGHVLGECTAGRRPRIHRHNEIVRSIAKRVEGKFSVYEEQAFRTEEGAWLKPDLVNKYNKYQYSNNK

SEQ ID NO: 26774 - protein, 1142 aa, Eurytoma brunniventris
MGEDAEKTPCRRAKDTKQNNQKMSNTNNSTASDVTLPDTLPGASRVDGEIDSTQMEGQNVTNNPIRVPFDGPTSCPNCLLGGKNFIHMTPKDLESHISTDHPTTKPKWQCKQCDKEFPRVHAWRCHYGKCKGRGNQQQPLPFSCPVCEASFASKIGLAQHERHMHPGVRNEKRRAGANKEPQRKGAPSSVWTDQETQRLIALEAQFQGERSINKLIAEQLRGKTAKQISDKRRMIRLKGAQGREAESELADSSSQTVSDPLVPPNSSEDEGDPERVAPIVPNAQAPPSPASSESEYSDAIDEMPDERTSLRWKEQLREAILIDRECPDVIKDIVSEIQALASRDNQPAEEIDRIYSVILGLLNSRKTEEQSRSKRKARGQANRRRNHGRPIGRPPNRAQRKAYVYARCQDLWNNDPKKLADMVASDNLIQVAHHKPPNKRDTEELYNELWGTAGPERVQFKQTAVGVTPREEILSPIFPLEVKKKIASIANGSAAGPDQISKSDLRKEGIEIVLACYYNLCLLGEHYPDAWRSNRTTLIPKAGKNPADVKNWRPITVGSMIGRIYSAMLDRRLRRVVNQNERQKGFTKENGCYANTKIVNAAIREAKRSGGVMGILDAAKAFDTVPHAAIKPALVRKGIHPAVAEYISSMYLNCCTVIRTSEGDVKIVLKRGVKQGDPLSPFIFNLCIDELLETLEEETQGISIGESEAAAAAFADDLVTMAKNAEEGKRQIQIVFDYLERLGMSLSLEKSNVIEFKPYQKTWYINDPHIEVNGVMIESISADDSVKYLGNKLSPWYGLLEGHEKEGLNEILKRLGRVPIKPIQRLDLFVTYLLPKFTYTLITNPPAHGKIKEIDTMVRTEVKKMLHLSIGTSTPFMYTPRRQGGLGLINLEQSVYIAALRSGLIALQSNDQVVTEAMENERCKLEKYAKALNIAWPTSIDDIDKYKNGIKERYRQQWAAQKVQGQGVRDFGCAVSNEWLRRKLLKHSRLADAIKLRTNTYPTKMCLNRQNKRGDVSCRKCGYEYETLGHILGSCIDTKNKRIRRHDEIKDLIADRLAKHSRVIVENTFTVNGENFKPDLVAIANDGKTKIIDVTVRFERGSYLLKGATEKIEKYDKIKKAIAEQLSVTDIEVVPIVVGTRG

SEQ ID NO: 26775 - protein, 865 aa, Eurytoma adleriae
MVDRECAQDLVELINEMRTVVSRGAPPVHEEIDRIYERILGLIRSTSENTNKTSKRRSRGQPNRRRNHGRPIGIPPNRAQRKAFSYSKCQELYNNDPKKLADMIATGNLSQIDHHKPPNKRDTERLYKELWGVEGPEKVVFKEQATTVTPIELTLSPISPLEVRRKINDIANGSAAGPDKIKKSDLKKKGLEIVLASFYNLCLMAEHYPDAWKVNRTTLIPKAGKDPSDVKNWRPITVGSIIGRIFSAMIDRRLRRVVKQSVRQKGFTSENGCYANTKILNAAIRRAKSKGGVFGILDAAKAFDTIPHAAIKPALMRKGIDLRTAEYIVKMYINCSTLIRTSEGDVQIILRRGVKQGDPLSPFIFNLCIEELLQILEEETIGVELEESTVAAAAFADDIVTMAKNAKEAEKQLRLVYEYLERLGMALSLEKSNVIEFKPYRKTWYIEDPKIVINGVQIASISASDSVKYLGNKLSPWYGLLEGHEKEGLQEILKRIGKVPIKPIQRLDLFVTYLLPKFTYTLITNPPSQEKLKQIDVMIRSEVKKMLHMSNATSTPFMYTPRRQGGLGLLNLEKSVLIAALRNGLKALESSDQVVIDAMSAERQKLESYAKALTLVWPTSIKEVDAYKNSIKENFRKQWAAQKVQGQGVRDFCCAVSNEWLRRKLLKHSRLADAIKLRTNTYPTKLCLNRQSRQGDVSCRKCDYAYETLGHILGACTSTKNKRIKRHDEIKDLIAEHLAKSSSVLKEATFTVDGENFRPDLVAIANEQALIIDVTVRYERGKYLLMGGKEKEIKYEKIRKEVMAKTGAKSAKVVPIVVGARGAIPSATVRELRALKVRREDQVTISMIALRSSIEIANAFIDYKD

SEQ ID NO: 26776 - protein, 987 aa, Denticeps clupeoides
MVTTIEIERLRQLEVTYKGARTINKLIATELGNKSHIQAAEKRRQLRESATPENTQVVGADPLAFLMTAPTMISVPSEIAESLKRETARLYGPAQEDGEDEVTTALRRWAIGNEPIEKTVEKVTAELLSETVSSCDKKTHYLREKRDKVRTYTSYEWMKRRARSRALFGRYQCQYFKNRARLAALILDGNVTSKCQIPASEVHDVYKKKWESSTQYGGLGSFTLGGCADNSVFEGLITAEEVGENLAAMNRTSATGPDKMNWKDVKDLCDGSTVVDLYNAWWATGKIPVAVKQCRSILLPKRADQEQLMEIGNWRPITIGSMLLRLFSRILTKRLARACPLNPRQRGFIQSPGCSENLMVLKSIMEQAKRERKHLAVVFIDVAKAFDSVSHNHIVDVLRRRGLDSHVIGVIQNSYEDCHTSIEVGGTKTPEISIRTGVKQGNPMSPLLFNLAIDPLLATLETHGVGFQTEGGKIAALAFADDLVLLSDGWEGMSHNLSILEKFCNLTGLTVQAKKCHGFMITPTHDSYTVNNCQPWSIERAELHMVGPEESEKYLGVRIGPWTGISKPDTESQLQTWIQKIDEAPLKPSQKVVILNDYALPRLIYRADHAEETSVRLARLDGLVKRAVKACLRLPHSTCDGLLYSWRRDGGMGLLKLADSVPSIQVRRIQRVAHSEDPTIRQLMSSAKAQKGFERAWKRAGGAPDTAPALTDPYTPSVSPEHVDCLTTPQKVNYPVPRDWRKDEYEYWCRLPVQGMGTVCFGNDNISNHWLRNHRGFRERHYIAALQLRANVYPTRESLNRGISGALLHCRKCSSKYESCSHILGQCPAVQAARIARHNKICDILVDEVKRLGWETHKEPRLYTTKGELRKPDIIFVREDVAIVIDVTVRWEFDSHSLAKAASEKVVYYQSLEQQVRDYTDTQTVHFFGFPVGERGKWHSPNNVVLQLLGVTKGRMKALGRLVARRALLYSLDMLVMFGGGTYSEQT

SEQ ID NO: 26777 - protein, 1270 aa, Denticeps clupeoides
MKVSDILSYRMARGPGYQRAMGGSQEAGSQPIITRPPRKLDMARVMFVSVGTQTNYEDAKPVASDDTQTWTGNENELIPFSLTIWNSSFQEPRPSESEIETDGADIGWLQTGESVEDLFDDNGEEDEAHLSELEASGYALEHSLLVEPVLGSENTSEGETVTITLPNSMIHCQLCGEVPGGPMKAQEHFVKFHRDVPVVFSCGKCGKGDQNPRSILSHHAKCKSGAPQTSPARGHECTLCGQSFGTISGLSQHKRHVHPTERNEERIVAASQPSKKKGRKLQLWSQQEIERLRQLEVTYKGARTINKLIATELGNKSHIQVAEKRRQLRESATPESTQVVGADPLAFLMTAPTMISVPSEIADSLRRETARLYGPAQEDGEDEVTTALRRWAVGNEPIEKTVEKVTAELLSEAVSSCDKKTHYLREKRDKVRTYTSYEWMKRRARSRALFGRYQCQYFKNRARLAALILDGNITSKCQIPASEVHDVYKKKWESSTQYGGLGSFTLGGCADNSVFEGLITAEEVGENLAAMNRTSATGPDKMNWKDVKDLCDGSTVVDLYNAWWATGKIPVAVKQCRSILLPKTADQEQLMEIGNWRPITIGSMLLRLFSRILTKRLARACPLNPRQRGFVQSPGCSENLMVLKSIMEQAKRERKHLAVVFINVAKAFDSVSHNHIVDVLRRRGLDSHVIGVIQNSYEDCHTSIEVGGTKTPEIAIRTGVKQGDPMSPLLFNLAIDPLLATLETHGVGFQTEGGKIAALAFADDLVLLSDGWKGMSHNLSILEKFCNLTGLTVQAKKCHGFMITPTHDSYTVNNCQPWSIERAELHMVGPEESEKYLGVRIGPWTGISKPDTESQLQTWIQKIDEAPLKPSQKVVILNDYALPRLIYRADHAEETSVRLARLDGLVKRAVKAWLRLPHSTCDGLLYSWRKDGGMGLLKLADSVPSIQVRRIQRVAHSEDPTIRQLMNSSRAQTRFDKAWKRAGGTPDTAPALTDPITQSVNLETVSDGSILPQKVNYPVPRDWRKDEFEYWCRLPVQGMGTVCFRGDTISNHWLRNHRGFRERHYIAALQLRANVYPTRESLNRGRKGALLHCRKCSSKYESCSHILGQCPAIQAARIARHNKICDILGDEAKKLGWETHKEPRLYTTMGELRKPDMIFVREGVAIVVDVTVRWEYDSLSLAKAASEKVEYYQNLEQQVRDYTSTHTVHFFGFPVGARGKWHSKNDLVLQLLGVTKGRMKALGMLVARRALLYSLDMLVMFGGGTYSEHI

SEQ ID NO: 26778 - protein, 892 aa, Denticeps clupeoides
MERMRLQPPLGVGLLAMSRSKKTVEKVTAELLSEAVSSCDKKTHYLREKRDKVRTYTSYEWMKRRARSRALFGRYQCQYFKNRARLAALILDGNITSKCQIPASEVHDVYKKKWESSTQYGGLGSFTLGGCADNSVFEGLITAEEVGENLAAMNRTSATGPDKMNWKDVKDLCDGSTVVDLYNAWWATGKIPVAVKQCRSILLPKTADQEQLMEIGNWRPITIGSMLLRLFSRILTKRLARACPLNPRQRGFVQSPGCSENLMVLKSIMEQAKRERKHLAVVFIDVAKAFDSVSHNHIVDVLRRRGLDSHVIGVIQNSYEDCHTSIEVGGTKTPEIAIRTGVKQGDPMSPLLFNLAIDPLLATLETHGVGFQTEGGKIAALAFADDLVLLSDGWKGMSHNLSILEKFCNLTGLTVQAKKCHGFMITPTHDSYTVNNCQPWSIERAELHMVGPEESEKYLGVRIGPWTGISKPDTESQLQTWIQKIDEAPLKPSQKVVILNDYALPRLIYRADHAEETSVRLARLDGLVKRAVKAWLRLPHSTCDGLLYSWRKDGGMGLLKLADYVPSIQVRRIQRVAHSEDPTIRQLMNSSRAQTRFDKAWKRAGGTPDTAPALTDPITQSVNLETVSDGSILPQKVNYPVPRDWRKDEFEYWCRLPVQGMGTVCFRGDTISNHWLRNHRGFRERHYIAALQLRANVYPTRESLNRGRKGALLHCRKCSSKYESCSHILGQCPAIQAARIARHNKICDILGDEAKKLGWETHKEPRLYTTMGELRKPDMIFVREGVAIVVDVTVRWEYDSLSLAKAASEKVEYYQNLEQQVRDYTSTHTVHFFGFPVGARGKWHSKNDLVLQLLGVTKGRMKALGRLVARRALLYSLDMLVMFGGGTYSEHI

SEQ ID NO: 26779 - protein, 1193 aa, Culicoides sonorensis
MEVNKRRKTGQTNRASGQPNNSRASDLGTGSEVINDPQPSTSRQSTTRDQQHQQVSPTESVSQSLETTSAGLPRRRIKWTTEMNECVVREYIRATRRPEDKINYRQELRRNFVVFYPELSHLTEQNLADRRAAIYRTKLVSLERIKEIEDEIRAAYVDDVTPATEQIEVLEAVEIGENTEIEPNTQENEEMVTKIKQRFEELMIAYEGSDPTTRPKLPKQYNSKQLNRIVKVANQHVLNFCPDELNNYQQLNDVIYCMAYTVIELNGGKINAENETPRTYQKKKPAWMKRLEEKIENLRKDIGVITAFKNGNKSKRMKNKVSKIIKKHPRHTRHDPPNTELDDVMDTLKQQLSVYSQRIKRYKKSHARKVDNRNFKINQKIFYRNITREETQEISTALPDKQQMQDYWKNIWSTETSMNTNASWLNRIEETAQNINEMVNHRIEMDVFHKVMKKLHNWKCPGIDGIHNFWYKKFSSLHNIMCNTINDFISGAQFIPDYLCEGITYMKPKEANSTNPAKYRPITCLNAFYKIMTSCIQNMIEQHCDKFNVIAEEQKGCRKGSLGCKEQLVIDSVIMGQATKKKRNLHTCFIDYKKAYDMVPHQWLVRILKIYKINDQIVRFLEMLTKKWCTKFIVTSGAESLTSDKIMIKRGIFQGDTLSPYWFCLALNPLSVLLNDEDKGFLVKKGTTQKFRISHLAYMDDFKLYAESSNGIEKLISVTEEFSNDINMEFGIDKCKIQAINKGKLTQQDSYQTTSSELITSIEPDEFYKYLGYTQNTTIDHTATKKALKEEFVNRVRLILKTSLNAKNTTKAINTYAIPIITYSLGIIKWSNTDIEDLQRVIRVLMTRARCHHPKAAIERIDTPRHLAGRGICNISNLRTRIINSMRKYFYDKMNSSPIHKIIIAADENLTPLNLDIAELNLNSPTLEEKLNTWKLKAMHGRYPAEISDRYVDVEWSLKWLTIGYLFPETEGFVIAIQDQVIATKNYLKYVIKDPTVQDDRCRMCGQGHESIQHVIAGCNVLAPTAYKERHDNVGKIIHLALAHKYKLLQNQDPYYQYQPNNVIENDNIKMYWDRGILTDRTVQHDRPDITILFKKEKKVLFVDFTIVLPNNIQSSFENKIQKYRELSQIIKEQWHVTDVKTIPIVMSATGIVPKNLKVAIKDLGLNQGIIIQIQKAVLLSTTTIVRKFLGEM

SEQ ID NO: 26780 - protein, 1193 aa, Culicoides sonorensis
MEVNKRRKTGQTNRASGQPNNSRASDLGTGSEVINDPQPSTSRQSTTRDQQHQQVSPTESVSQSLETTSAGLPRRRIKWTTEMNECVVREYIRATRRPEDKINYRQELRRNFVVFYPELSHLTEQNLADRRAAIYRTKLVSLERIKEIEDETRAAYVDDVTPATEQIEVLEAVEIGENTEIEPNTQENEEMVTKIKQRFEELMIAYEGSDPTTRPKLPKQYNSKQLNRIVKVANQHVLNFCPDELNNYQQLNDVIYCMAYTVIELNGGKINAENETPRTYQKKKPAWMKRLEEKIENLRKDIGVITAFKNGNKSKRMKNKVSKIIKKHPRHTRHDPPNTELDDVMDTLKQQLSVYSQRIKRYKKSHARKVDNRNFKINQKIFYRNITREETQEISTALPDKQQMQDYWKNIWSTETSMNTNASWLNRIEETAQNINEMVNHRIEMDVIHKVMKKLHNWKCPGIDGIHNFWYKKFSSLHNIMCNTINDFISGAQFIPDYLCEGITYMKPKEANSTNPAKYRPITCLNAFYKIMTSCIQNMIEQHCDKFNVIAEEQKGCRKGSLGCKEQLVIDSVIMGQATKKKRNLHTCFIDYKKAYDMVPHQWLVRILKIYKINDQIVRFLEMLTKKWCTKFIVTSGAESLTSDKIMIKRGIFQGDTLSPYWFCLALNPLSVLLNDEDKGFLVKKGTTQKFRISHLAYMDDFKLYAESSNGIEKLISVTEEFSNDINMEFGIDKCKIQAINKGKLTQQDSYQTTSSELITSIEPDEFYKYLGYTQNTTIDHTATKKALKEEFVNRVRLILKISLNAKNTTKAINTYAIPIITYSLGIIKWSNTDIEDLQRVIRVLMTRARCHHPKAAIERIDTPRHLGGRGICNISNLRTRIINSMRKYFYDKMNSSPIHKIIIAADENLTPLNLDIAELNLNSPTLEEKLNTWKLKAMHGRYPAEISDRYVDVEWSLKWLTIGYLFPETEGFVIAIQDQVIATKNYLKYVIKDPTVQDDRCRMCGQGHESIQHVIAGCNVLAPTAYKERHDNVGKIIHLALAHKYKLLQNQDPYYQYQPNNVIENDNIKMYWDRGILTDRTVQHDRPDITILFKKEKKVLFVDFTIVLPNNIQSSFENKIQKYRELSQIIKEQWHVTDVKTIPIVMSATGIVPKNLKVAIKDLGLNQGIIIQIQKAVLLSTTTIVRKFLGEM

SEQ ID NO: 26781 - protein, 1010 aa, Rotaria magnacalcarata
MRTKHGEAYEKSKKVAMKRIAWTTDEDLVLAKLEIKLKATQKGQILERLTTEYNKIASRSNSHIRSKEAIRGRRQQKEYKVVMEKMLSKDRTDLDTESDDDSKSNNSYNDASSDDSDASDATTNILDDNIQAIRRFVEDKLVTTKIQLTPSMHAAVDAFVNMNSTVDMLELSMAGIREAISNLRLKNAHRGTRAIRTNNNSVNGKPIRNAKRYEKARKLGYYQRLFYQNKEKLVAELIDGVQPNVEPPPIDVAVEHYEKIWSKKFVDSAIVEPKTSVGGAILLAPITIDEINWAITNTKKTSATGLDQITLLEAKAIATTQLLAAFNIWLGLQRIPLEVKQNKTVLIPKGTTCLDDIKNWRPITIASMILRLYNKVIGYRMNKVFKTSDKQAGFKPVNGCGINVAWLHSILKHARMTKTTLYTCLLDVSKAFDSVSHDSIIRALKRNGAPTEFIRLIADQYEDVSTTIKYKDISSKQIVILCGVKQGDPLSSILFNLVIDELFEVLGDQYGYAVEGIGKSNARCFADDLALASSSKLGMGELLSKTITFLEARGLAINPAKSISLGLVKGYKGKKSKIETEPAFSINGVQIPMLGYINNTTRYLGIQFTSLGAIGSGLIKTQINEVLDKLVKVKLKAQCKIELLRTHIIPKFIFKLINTELYPTMIRHVDIAVRQVIRKILHLSAGLSNEFFHLPAKEGGLEFPVLQELVGLAKVKLYRNIALQNDVFLRNIVEMQGSGMNERYLNHLKLGGQPTADDLRSRKDCLLKEKRTAYIQKVHSTGHEVFSTCALTNTWLLNGQRSMKTRMYINAIKLRTNSYETRVTTTRGLDVDKTCRKCHRADESLMHVLQCCESTKGPRYTRHHHVCSRVTMKLAEAGYTVYTEKSLPDPNNTGHLLRPDIIAVRAGQAIVLDVSCVYETSGAAFLNAYNRKVQKYKPLIPAIKEKYDCGQVEVHGLIIGSRGSYHHGQLHIWHNIGFTANDLKFLAINCMENSVRVAAFFGQSIRSSWT

SEQ ID NO: 26782 - protein, 1191 aa, Ormyrus nitidulus
MESLNGVASESAEAASQEVVGPPVSVEELVSEELGPTQRRETALSATRRGNLARRVRDAARQGVAGDIEDDSTNIPLSEGRQITLVAGSNNLQVCDLCVSAGGPPLQYIGSKALATHVRKEHATVSVTWQCAGCDRPCKTYHAYSCHVPYCKGRPVVEELPFKCEHCNLSFATKTGLSQHERHQHPVVRNDKRSAEAVPSNARGGRRPSVWSDEDFALLRELEGRYANTRHINVELAKHFPGKTNKQVSDARKRIRDGEQRGLEPVPSTSVQATTTEPPVRSPALQGDSSSEEDVFEDAVEELAYERTTSPPESDWKQPLEREICSGSEDAGCWTEWVRLIQDGVESNAITSQTDVDRLYDAFTAQLAPSIERDRSQTNLNAKERNARRKVGRRRDATQAEIRRFAYARCQMLWDNCPKRLAEMVVANDLSLIRKRGAPGKRETESLYKELWGVEGPTDVRFYEQKEEPLPVQNILLPVTPREVQGRISRLKNDSAAGPDGIVKSDLRGKAISIALSKLFNLIMLTGFYPKAWRMNRTTLLPKVGKDHSDVRNWRPITISSMVSRTFSGLLDRRLRASIRQQARQKGFTEENGCFSNIKLLESAISNAKQKGGVFAILDVSKAFDTIPHFVIPRCLEKRGVPPLVARLVASMYSECSTVIKARDGEVEIQLKRGVKQGDPLSPLLFNLAIEPLIERLDKTVGVPIEGENLPVLAFADDIACVAKDACEAQRQLTMVQDFLGTLCMSVSVDKCCVFEFVPKRKTWHVRKPEVTMEGKQLPYMEPDEVTSYLGAQVSSWKGLVRGREIDSLREVVMRVQTLPLKPLQKIELLRMYLLPKYTYGFIVNPPSRSVLREFDGIVRSKAKEILHLAQSTCDAFLFTPKRQGGLGLLETEKMVMIANLRASLKARQSPDPVVLAATSAEKVERQLSSYAEALGLSWPTSLRELDDYKYQLRDSYAQQWAKLKWQGQGVTEFADDALCNVWLRGGLLSHSRVIDAIKLRTNTYPTRALMNIVNERADPNCRKCRSARETLRHILGQCRYTKNKRIHRHNEIKDLVKAHLAKSNLVMDEPEVRVDGQRFKPDLVVKTAKGDVLVLDVSVRYEHRDYLSKAHDEKITKYQPVLVQLQRDLQSNAGQVLPIIIGSRGAIPKRTRDILSKLKIGKKDRLTLSMIALRSSIELINAFMDDEFDD

SEQ ID NO: 26783 - protein, 1191 aa, Ormyrus pomaceus
MERLNGEASESAEAASQEVVGPPVSVEELVSEELGPTQRRETALSANRRGNLARRVRDAARQSVAGEIERDSTNIPLSEGKQITLVAGSNNLQVCDLCVSAGGPPLQYIGSKALATHVRKEHVTVSVTWQCAGCDRPCKTYHAYSCHVPYCKGRPVVEELPFKCEHCNLSFATKTGLSQHERHQHPVVRNDKRSAEAVPSNVRGGRRPSVWTDDDFALLRELEGRYADARHINVELAKHFPGKTNKQVSDARKRIRDGEQRGLEPVPSTSVQVTTAEPPVLSPASQGDSSSEEDVFEDAVEELAYERTASPPESDWKQPLEREICSGSEDAGCWTEWVRLVQDGVESNAITSQNDIDRLYDAFTTQLAPSIERDRNQNNLNAKERNARRKVGRRRDATQAEIRRFAYARCQMLWDNCPKRLAEMVVANDLSLIRKRGAPGKRETESLYKELWGVEGPTDVRLYEQKEEPLPVQNILLPVTPREVQGRISRLKNDSAAGPDGIVKSDLRGKATSIALSKLFNLIMLTGFYPKAWRLNRTTLLPKVGKDHSDVRNWRPITISSMVSRTFSGLLDRRLRASIRQQARQKGFTEENGCFSNIKLLESAISNAKQRGGVFAILDVSKAFDTIPHFVIPRCLEKRGVPPLVARLVASMYSECSTVIKAQDGEVEIQLKRGVKQGDPLSPLLFNLAIEPLIERLDKTVGVPIEGENLSVLAFADDIACVAKDACEAQRQLTMVQDFLGTLCMSVSVDKCCVFEFVPKRKTWHVRKPEVTMEGKQLPYMEPNEVTPYLGAQVSSWKGLVRGREIDSLREVVMRVQTLPLKPLQKIELLRMYLLPKYTYGFIVNPPSRSVLREFDGIVRSKAKEILHLAQSTCDAFLYTPKRQGGLGLLETEKMVMIANLRASLKARQSPDPVVLAATSAEKVERQLSSYAEALGLSWPTSLRELDDYKYQLRDSYAQQWAELKWQGQGATEFADDALCNMWLRGGLLSHSRVIDAIKLRTNTYPTRALMNIVNERADPNCRKCRSARETLGHILGQCRYTKNKRIHRHNEIKDLVKAHLAKSNLVMDEPEVRVDGQRFKPDLVVKTAKGDVLVLDVSVRYEHRDYLSKAHDEKITKYQPVLVQLQRDLQSNAGQVLPIIIGSRGAIPKRTRDILSKLKIGKKDRLTLSMIALRSSIELINAFMDDEFDD

SEQ ID NO: 26784 - protein, 1018 aa, Ignelater luminosus
MNTRQSRRLSKRHTIERETLVDIIDDQIEEAYITYYMIDKGIPPRVRPPIPKIRNGRRVYNCIKSVNLFLVDEFNGSDSLEETDHIIYCTALTVSELLNIPIKEHSHIKHSKEPNWKIRLTRAINKIREKLGWLQNYIGKESEASKILRTKIKTLAKEANTKPNHPDYLQKLVQLQEKHKQKAAAYGCRLRRYNENSKRYQQNKQYYEKRQLFYRKMGEEEKNCKEMSMNMPKPEQVYNFWKGLWSEEVVHDEDTYWIKEEKKRSQQIPDMEELVITIEDIQQSTKKLLNWKAPGSDRIQNYWWKNFTNIHSVLVKQFQEVLDSPDKFPRMLSEGITYMLPKSNNTEEPSNYRPITCLLTLYKILTSIIANKVKIHVEANNILAPEQGGCKTNGRGCKELLLIDAAVTRCAKLRKRNMSVAWIDYKKVYDSIPHSWLINILRIYKVDIKVVRLLTYMMTTWRTSAMVNIGKETFTTKEISIRRGLFQGDSLSPLWFCLCLNPLSYMLNSTNYGFKVDKCQDRKITHLFYLDDLKIYANSSNQLQSQIELVNSFSKLVKMQFGLSKCAVLHVKRGKIQSMHGVNLLDGSEIKELGIEKVYKYLGIQQTLHIKDTDMRKSVSITFMRRVVDVLKTKLNAKPKISINTWVMLVIMYTFGILKWSTTDLQNLDKQVRTMLAKYKCHYSNASSNRLYVPRKYGGRGLLSLQVIHNNEISNLCKYLLTKNSPLVELYRRIDRYGPIKVQEVNTEAEEISIKRFAAIWKEKALHGRFPAMLEGEDVDFKASTTYLKVGELHTETEAVLTAIQDQVIPTRSYLKHIIKENIENEKCRMCNRVNESIQHIISGCTYLAPREYLQHHNNVAKIIHQAICNSKGLLDHVQPYYKYVPSPTWENNNYKILWDTPINTDRAVAHNKPDIIVFNKRENIVWLIEITIPVDENITKAYREKINKYQDLTYEIRDIYEVQWVETFPFVISASGLVHRKFVENLQQLSISGSLLKTAQKAVVLGTTRIVRKVVNQ

SEQ ID NO: 26785 - protein, 1404 aa, Androctonus mauritanicus
MCSVSANSSPSSSIHETSVDYTTDTIVFTCPEVGCSFFSFLSKGIQQHFTCHKRKLSINWSCSACDFQSKSRKVLIDHLFYEHNQSLRPAPLPIVPSVLPPDVQAVDYPISSDVKKYPCPFITVTSCEMTTDRIDTLCRHSLTAHKTYVRPIYQCSACSFRTVIIQDVKIHQSRDCPLPTLSSESEDDSNFTSNELTHLTECIELVGWRMADLKHMLSLKNIYKTSRSIEYATDQLTKRKNSIKLKKTVRGYRIPNDTASSVPAVVSSQSASQQNSNSQSITVSSNLPDDPAHNITNSANIVETTQQPPDWNYNRLTQTVSAGTQTELQITDEDLSTPDNLSPFSTNPDTSSSSTHQLHPPHNPSNNPNNFTMEHAVSNTSRRYFTTTSNSSSPHWLRADAEEFIPSTSLNGAIPTWQRQLRCPIFKSEHDREAAINIIKDLTLRFAIHGEDSWQDIETKEKELRKYLYQEIRQITYNRTTPNHNAQHTNSITQIYSSAQQGSSQPRRSEIDDLTAQLRDNRLTRRERGNLLRRRRNLLNDRSANFWRRKYQYRPKQVFQELIEGKTSPKCQINPLTLENIFSDRYSLDKHGSLPELPTQNQRIYNIRDPTLTDITKILKKVNPNSSAGHDGITYKIWRLFPPLHNWLLDLFNRCIKEKKTPSDWQFSKIILLYKKGDLNDANSWRPINLQLSIAKLYSSLIDLLLREVITEHHLISNNQKGFMPTQGCLEHDYVIHAATRRAKRLNTDLYICSYDFRDAFGSVDHSLIERTMEFHGFNNNCIQIIMSLYKNVSFWIESGQGQSNIIAQKRGVRQGDPSSPLIYNLIVETLSQRLNQCPKASIGFNHLLYADDLTTIAETPQHIRQLHNIVTDFCQNTGIQLNVKKCKLLANRGKGKGRGRRMVDDNIHLLIDNAPIPHCSNKESIKYLGNQLGLSKNCLYTSFKDMLKETKHLLSKTADCPLNIHQKHHIIRTFLIPKWEYFISLNGLGIYHADLLVRALRSAIRKYVKLPAHTHRSFFHASTTDGGLNIPDPWNWSCATQATHLINLLNSHDTTVSSLCKEEILTLLKLRYSIDNSQSIPSTEKIVNFLNSKYENSRKSRHIDCLDPTAQAPKSINVIQATISFSDNKFFLNTSDQSDPPTNIRTTTLQQLKKLSQRKLGEEWHSLSRQGKLMMTVKNQFSNKWLNTGEFNPSIYSFAVKARMDLLPTNANKFFWRMSPNDTCRYCHQKEDIQHILSFCPHYLHLRRERHDKILQRITKTINYNNRGENIIVRINQAVPDLANDTLRPDIIIEDNNNKTVKIIDLAITNQFGDDCLIKAREAKINKYRHIESHYKNKGYSTSLDALVFGMLGGTDEHNNTIFKALNSPWSYIKKMHQFIISDIIRSAHKIWRTRSSSNTTNN

SEQ ID NO: 26786 - protein, 939 aa, Tetramorium immigrans
MNQYLLRKRGGERTLEAIKGIRKRRDYKDLVIAYKDDWLADMAMTVQPGSGSVTGPSVAREDDGGRVGGESGALAVDWLRAKLDDILPEISGGIWIRTAISRVLEDHSPEEWLNQWWSGQFPDLDRAHSTRIARGAAPRLPQSRRKARRKEYRRMQDLWRRNMSKAARMVLDGDEAGRPHPTLTEQISFWRPVFESVAIRRGHGRRALARRCPNVDRLWAPVSEGEVINVRLPLSSAPGLDGMTVRRWMTEVPAILRATIFNIFMATGVVPAKFRDSRTVLIPKAGDPADPSNYRPISVASVILRHFHKILARRLLSLDIFDTRQRAFISADGCAENVAILSALLCDARNRHKEIHIISLDVRKAFDTISHEGIYEVLKNNGFPTEMISYIRTLYQTSSLRLEVDGAFSGDIHPGRGVRQGDPLSPLIFNLIMNEILRAVPDQVGYIMGDTGINALAFADDLLLVSGSGVGAQRSLDEVQAALGYYGLELAPAKCAAFSLVPAGKVKKVKVITEATFRAGDRLVPQQRVLDAMKYLGTEFDSRGQVMNKAVIMPSLDRITRAPLKPQQRMWIVSRHLIPRYIHGLVLGRTSRANLHRLDKQVRAAVRRWLRLPHDVPTAFFHAPVRFGGLGLMSFVTEIPRLVQERLERLGRSGLRMARIASESIWAERKKKWCGMMRRGIRDWAALLYSSVDGFELREAGKVPASTKWLTDPMVHIPPSDWLNYMKVWTNTLPSRMRTTRGSRRDGQDVNCRAGCGMRETAAHIVQQCFRTHGGRIMRHDAVAATLAEELDRRGYNVRREHRFTTREGIRKPDLVFKKDDRAHIIDVQVVTGSRPLEENHRRKRAYYADNKELIEGVGSLFQIPGSRVDVSTVTLTWRGIWAEESGDALAGLGIGKAVMRGITTRVLWGSYVNFSRFNQMTTAFHGRRRLRMGGWGPP

SEQ ID NO: 26787 - protein, 1139 aa, Owenia fusiformis
MRECPQADRKAGEDDLHPTGSMDFDQSSELRTTIRTQEDIDVIETRRRCGSCGGTFKNERGVKIHQGKTKCKEKLKQRQAGHSAEARAKAVDPANNSVKVCSQETHHSAPDLLVEANPLIQSLPSPIEHLVQGRKPRLKLPAATDKRWIELDEELDIILTNTLRGDAKGKVETMTRIVYETCEEKFGVSETSERKHHAGPSRRQQEIASLRKERRSLQRRWKASSLASERDGIRELQQILHKRLLHLRKVESLRKRQREKHRTRKAFFENPYQFTSDLLGKPKSGRLSSTQQEVEASIAAAHSDPDRELPLGEFPIDIPPDIPTAPFDQSDFKLDEVRAIVKKARAASAPGPTGVTYRVYKNCPKLLKRLWRLLRSIWIKKDLPRSWALAEGCFVPKELKSEGLNQFREISLLDVEGKILWAIVAKRLTSFLLVNQFIDPSIQKGGISGHSGCLEHTAAISQLVKEAKKGNKALSVVWLDLAKAYPSVPHQLILEALAHYHVPNDVINLTMGHMNSLMMRFTVGKFTTNWQRLEKGIMAGCTVSVVLFITAMNLLLKAGTMQCKGPKANDGTKHPPCRAFMDDITVMTVSAVGARWILSALERMANWARMQFKPTKSRSMVLVDGKLSPIQFKIQGELIPTVQDQRIRCLGKNYDRTLRDVNNTAEVARDLDKWLRAIDSSHLLGRFKVWCFQYGIIPRLQWPFQMYDIPLSSVQAMEKTCSKHLWKWLGLPPSFSSVNLYSSTSKLSLPVTSVVEEFKATKVRTVTTLEQSKDPKARKTGESITCGRVWKPQDAAAEASDRLSHQQIVGTVCKGRLGLGHYGPHQLTSNSRRTQITKQIRNKAEEDRLVKAVSLAKQGSWTNWEPALKRPLKWKDIWPMDQGRLSFLLRAFSDLLPSPSNLRCWGKEETANCPQCMAADCTLNHILSSCPKALGDGRYRWRHDRVLQEVAKWIDQQRLSHNTSRGNVRPRLIKFVKEGSKAHQKPSLPVLQPNTLTKATDWTLRTDLFQKLVFPQDIVVTKLRPDMLLISQLSRSIIIIELTVPWEDRLEISHQLKKAKYQDLVDEAITRGWHAVQYPIEVGCRGFPASSLRYLLSQLGLTPSKLKSAVKAVGAVAESSSRWLWLKRNDKWCPSASDV

SEQ ID NO: 26788 - protein, 1062 aa, Bostrychus sinensis
MSANHSNSDTSVSNQASTSNLLLTNNLCCEICGRICATRAGLASHRRSHKPDDITSQQGLNTNTSSALTHSCSLCPMSFKSKAGLSHHLRQMHRVEYNQNLLNIANNKQHRWSMVEDSILINVANEIWRECSSKKMLHQRLKEFLPERSIDAIRLRLQNMKWMPQSLAPIEPIEIVDLDAPELLEEIRSPISIHTEQVNHWQTRLVETAVNQLLTTSTNNSWNQDELKLIAMNILGKQEDINAIKLQLDNHAIQTFPHTWRETKHRLNRREGPLTKKAERRAQYAHIQRLYHLRIKDAAKTILDGNWKLAYRQSDNPVSGFNDYWRSILLTEHMHDIRPVHHVLPNNQMLIDPVTVDEVKLAIKDMSGVSPGLDRIRPSDLRKVKPEHIGAYFNLLLATSHLPAHLNCARITFVPKTSSPKEPGDFRPITVTSVITRCFHKIIAKRWVKSFPHDRAQFGFLERDGCAEATSVLHSVIRYSHVNCKHLALASIDISKAFDSVCHDSLIRCAEGFGAPQPLLDYIRNYYRTATVKFEQTFIHPERGVRQGDPLSPLLFIMTLDEALESTAGNGFFVDNISINHVAYADDLVLFSDRTANLQERLNYLSSALQMSGLSVNPSKSRYLNILANGKPHVTVIGDEKLLLNDRPITNITVSDEFKFLGIKFSAKGKLPTNGRTELTRMLNELNGAPLKPHQRIQLLRYYLIPRLSHSLALAVVHKKTLKSMDQLVRASVRKWLRLPKDTPIAFFHAAINDGGLQIPHLTSSTILSRQRRTEKLLSSTIPEVHWAMREPAAQPSLRLAQENADILGHQVSDKQEAAAEWAKALYASNDGAGLRDSHVTVMSHNWIRFPQNIFPSLYIRGIQLRAGVLNTKVRKSRGGRQVGDLRCRGNCGHHESLSHVMQNCQITHDARCRRHNDVFNNIAGMLKKKGFDVFVEPRIPTGRTFIKPDLIACRDGCAYILDVTITDESKMDVGHQAKIVKYGETSNHESISAWLNTTGVSFHTLQHCPIVINLRGIIHGNSARYLLRCGLTRRQIGYLCFQTIKGSLRIYDVYMRGTSTR

SEQ ID NO: 26789 - protein, 1475 aa, Metaphire vulgaris
MSDSLNHPDPQVRVIKHIPKSALFACSSKLTDILGSIAAHPENQELWRALLGFATTFLRQPSRAGRNRKLSQIIKNRLSNLSLEEINTAKSTKPHCFKPKPKSPDERLIAAVTAKLEDGNIRAATRILCDNDQPIEPNADSFAALLEKHPSNTYQEEMRLLPTPTTITTCLKVTVHDVEQAINSFPKGSAGGPDGFRPQHLVEMVKNKESAAELLRALTDFTNVILSGKCPQQVIPILFGGNLIALSKKTGGLRPIAIGYIWRRLVAKCANRYAVSKLAPDLIPIQIGVGCPGGCEAAVHAARTFITNMHHDQLFVKLDFANAFNSVRRDVMLRSVYEHIPELYPFIHQSYAYPSFLQFGPFAIRSEMGPQQGDPLGPLLFCLPLQPTLRSLQSQLKIGYLDDLTLGGSQEAVMNDLSKIIELEASLGVSLNRRKCEIYGESSAVSDAFSDFRRVEFGSLELLGAPLFKGSALDESLRKQCATLEDAIKRLCFLPTQHAIILLRSSFGAPKLTHLLRCSPCSEHPLLEVIDKIMRTGIQNILNVDLDDTQWLQATLPIREGGLGFRAVSTLAPYAYLASAASTERTKSAILGPLDTQDPIVSQLIINLKTPSSTIESLPTSQKAWERPAIEQARKQIWDSYTDPFNRARLTAVAAPHAGDWLHALPLASCGLFLDNEAIRVAVGLRLGLNICAPHKCQCGEIVDPRGQHGFVCRLSAGRSIRHCTLNDIIWQALQKAGVPSTKEPLGLLRSDGKRPDGATLIPWASGKYVAWDVTSVHTCAKSYLHLTSNSLGAAAENAAIRKHHKYSGLPVQYKFIPIAFETMGPLNAEGSEFIAEIGRRIACVTGDPREAFYLFQRLSACTQRFNNVAFKGTFSSNTKNLPELHPIAVSEPFLPTTPPIQVDALIKENCGIELNEFFSNESCKDMVCFDEETDNSYTTCHRDGKCAKMTDNEIGVSEFDKSLMNGCFSDKKFINYAEENSGPDLNLKNMPSAERILENSVDVSDLDLLKAVEDNDNLSYTKVEDSGYALPAYESFEDKASVTFIFDVRKVNGKDASLIVRSSQEILLRMVTSVENELPLLPYQCCLKFGNKCRFVENGCHIVVSERNVVLTIAKAEKSQVTWHVYFIGTSFQHLDVKDFTNVVGVKRHLDALDMVSASPPGCAYEDEKITKDTKVEEKELVDVVPGEFVVLHERSPKLHGILKQRSMSESSDDLSPWSFSLDRLVSAVTCSDTESEGCEDGPVRFRPCSKKSVSFCEQIDKAMFVVNQSVSQMHQTLENKRRRMRKRELKHELKEARRRYRSESCSIPDDQDFVNELLSAKKCRAFVYGDKAALNSTRNAARGTSDGEFHDDSGSESVSHTDEDCTGKKTDVDNEENVLNEDVVEDRSCRTAVNEPKSRKLKNRLTLEQSLPLDASASGTRRGPTVLVTRKTRSNASPAVTANIASRRKKSLAPSTPTCQRRVQRTASCHQTH

SEQ ID NO: 26790 - protein, 847 aa, Euura lappo
MKKKTRRKGVPNHIAIRGVIDKLVAKVNLARQLRAWRGGRLQPNLRNIAREIRRARLTPTAYIVTTEDRIKTLERSKQYQQERAKVQDIRNKFAERPAIATVQGKPAKVEVGVEAIEKFYTNLYTATEGDGRPSPNFNIWLKKLRDHQRSLPLEQPTPEDLAEAANAALKNMALWKAPGEDGIPAWVYKTIPSARKYLVRYVGETLQGVRVCDEKDVRGRVVLLHKSGDTSDPANYRPIALLNADYKVLTAVISTLIRRSLPEWAIPKEQLAREGVWGTVHGLLQDKAAWHAAKRSAHYSAWLDFKKAYDSISHKQLRRLIKTLPIHDTIAKVLLNITKKWSIRVSAGKRTKKPIYVKRGVYQGDTISPLMFILVTSFIVHQVNTSPEVNAAARGRQEILAYMDDIKIHAATKKGLAAAVDCVRECAKEVGLEMNRKKCGVYTTSADEEDEEDGVEREDAAFLPRIREGYKYLGIVQLDLDTELNIDLVKAKTLDKVRSILETKLAASQKIYLINSSAVSAATYVLGNLFSCKKRTTIMRICRELDTDIRRILVQQKIKTYTTSTASVYLDRNRGGLGLRAIADEVELHHTRKGRYLELHQDLGTARQRFQALGRGGYKNPITDLDRILEGHGLIREPGAEGDTVSDQVRRLVSKVREKQQDRWAAAWGEHLAYGRIATAERSNIAFHAYTSTFMDSWRVSMLHAAAEDQVQGLGANLDTRVMCPRGCNAQLTAYHVSSACLTPEFNTRHDIIVAKILRMMYTCHEAPAEAVGRCQFTRATATEEYRWGERTVKVRAGVTAKTSTELNHNKPDILIILHNPPEIYVVEVAISHLQNIRLQEKIKRKR

SEQ ID NO: 26791 - protein, 1330 aa, Ips nitidus
MYSRRESGNVGDEQPNQRLNAVTPREEVVERTTAQNTGSEKSPVLKSSRVVTETGVGITKGPPNTALGLKPAMASRALSQRSCPKGRRGVLTADGSDQSGSSAFFMTRFLAGSSRSETPPPASRGGESDMDGANSQRGNAGTGGRVLTGPPNHLHVCEDCHKTFPDAAKLLRHKRARECGDRMKCAWCDARFGAFKATRAHEKRVHPKEYQDHGKTLGADDESETLQVMARAEARGAYPPTRINKALSELTGWSVDQVRYGRKKRQYQVYLEEERRLERGTVSDVTVSDTPADTPTPADDVTRASLSQQHRLSGEDSPSSPPIVPPVRANKRPRDESPSLPSASVGGKRPRVDGGVPQERDAISNTNTSDTQTSAEVSRKRGLDQDGSCHGPTKRRAARRSPSLEIVEVESLTPVSEPSSVSTASAVGHGSERTETAALLPDGFEQCLRELVELVGGVSMPLRQIATLAISGTVAELQAAISSWLRPLIKPKDHGPRRAKPQRSYGQRRGGRDDRASTYKKAQDLFRRDPAGLVDTLFQGVSLDSDPETPSVEGVESLFGGIFETPSVADDREVGAGGAQEAPIRPITVEQVKAAKRGWQNSAPGLDGIRVADVKALNNIELAILFNALLGRRVVLPEWKQLRTTLVHKSGDRKDPANWRPITIGSAVQRLLHRVLLAALKSQHAHNEHQRGFARVDGTLANVVLLDTYIRYRKAEFLPFNVVSLDIRKAFDTVSHHSIRRALARAGVNPHMGSYILDGLDGATTTIKVGRQFTRPINLLRGVKQGDPLSPFIFNLVVDELLGKLDSGWHGGTLPRGRASCMAFADDLVLLADKARHIRSMLGETEKFFGLCGMSVNPAKCVAMATHAPREGNWPHLVQRSVFSIDGARVPQVSTLDTFKYLGQYFGPTGLLKPSVPHLREWLERVIRAPLKPGQKLSRSVVKTYLIPRLLFGLQNTEVTGSALKDADRLIKRTVKRILHLSTHTPDHMIHASVRDGGLGVPELRRVIPQQLLARLTKILNNTEDPVVSGTVGSEVFRRNIERISNLAGACPASQVWREALASGAYSRGLEKAAEDSSSRSWVMTKPNGWSGRDYVRAIQLRTNNLPSKGLPYSRPSRCRGTGCLETESIPHILQKCSVVHGERIHRHNEIASKIIRHARAKGWEVEDEPHVRHDCGTLFKPDIAVHLPGNRTLVCDVHVPWDGGASLDEARRRKKEVYSGAVFREAAASRWPGRELLIEPLTVGARGIWPRSNEPVTSLLEITGPLKASCVHSALKWASTLHRTFMSRVWRNEARPPGSAGARSQRREQNATGGAGSQSSHTPPTDSLT

SEQ ID NO: 26792 - protein, 992 aa, Ips nitidus
MSRRLCRLLRWAVRDPELTEVSLQERDAISNTNTSDTQTSAEVSRKRGLDQDGSCHGPTNRRAARRSPSLEIVEVESLTPVSEPSSVSTASAVGHGSERTETAALLPDGFEQCLRELVELVGGVSMPLRQIATLAISGTVAELQAAISSWLRPLIHPKDHGPRRAKPQRSYGQRRGGRDDRASTYKKAQDLFRRDPAGLVDTLLQGVSLDSDPETPSVEGVESLFGGIFETPSVADDREVGAGGAQEAPIRPITVEQVKAAKRGWQNSAPGLDGIRVADVKALNNIELAILFNALLGRRVVLPEWKQLRTTLVHKSGDRKDPANWRPITIGSAVQRLLHRVLLAALKSQHAHNEHQRGFARVDGTLANVVLLDTYIRYRKAEFLPFNVVSLDIRKAFDTVSHHSIRRALARAGVNPHMGSYILDRLDGATTTIKVGRQFTRPINLLRGVKQGDPLSPFIFNLVVDELLGKLDSGWHGGTLPRGRASCMAFADDLVLLADKARHIRSMLGETEKFFGLCGMSVNPAKCVAMATHAPREGNWPQLVLRSVFSIDGARVPQVSTLDTFKYLGQYFGPTGLLKPSVPHLREWLERVIRAPLKPDQKLIVVKTYLIPRLLFGLQNTEVTGSALKDADRLIKRTVKRILHLSTHTPDHMIHASVRDGGLGVPELRRVIPQQLLARLTKILNNTEDPVVSGTVGSEVFRRNIERISNLAGACPASQVWREALASGAYSRGLEKAAEDSSSRSWVMTKPNGWSGRDYVRAIQLRTNNLPSKGLPYSRPSRCRGTGCLETESIPHILQKCSVVHGERIHRHNEIASKIIRHARAKGWEVEDEPHVRHDCGTLFKPDIAVHLPGNRTLVCDVHVPWDGGASLDEARRRKKEVYSGAVFREAAASRWPGCELLIEPLTVGARGIWPRSNEPVTSLLEIRLKASCVHSALKWASTLHRTFMSRVWRNEARPPGSAGARSQRREQNATGGAGSQSSHTPPTDSLT

SEQ ID NO: 26793 - protein, 1324 aa, Ips typographus
MYSRRESGNVGDDHRNQRLNAVTPREEVVERTTAQNTGSEKSPVLKSSRVVTETGVGIIRGPPNTALGPKPAMARRALSLRSCPKGNRGVLSADGSDQSGSSAFFMTRFLAGSSRSETPPPASRGGESDMDGAISQRGNAGTGGRVLTGPPNHLHVCEDCHKTFPDAAKLLRHKKVRECGDRTKCAWCDARFGAFKATRAHEKRVHPKEYQDHRKNLGADDESETLQVMARAEARGDYPPTRINKALAELTGWSVDQVRYGRKKRQYQVYLEEERTLERGTVSDATVSDTPADTLTPADDVTRASLSQQHRLSGEDSPSSPPIVPPVRANKRPRDESPSLPSASVDGKRPRVDGGVPQERDAIINTNTSGAQTSAEASRKRGLDQDDSHHGPTKRRTARRSPSLEIVGVESLTPVSEPSSILTASAVGHGSERTETAALLPDGFEQCLRELVEVVGGVSMPLRQIATLAISGTVAELQAAISSWLRPLIKPKDHGPRRAKPQRSYGQRRGGRDDRASNYKKAQDLFRRDPAGLLQGVSLDSDPETPSVEGVESLFGGIFETPSVADSREVGVEGAQEAPIRPITVEQVKAAKRGWQNSAPGLDGIRVADVKALNNIELAILFNALLGRRVILPEWRQLRTTLVHKSGDRKDPANWRPITIGSAVQRLLHRVLLAALKSQHAHHEHQRGFARVDGTLANVVLLDTYIRYRKAEFLPFNVVSLDIRKAFDTVSHHSIRRALARAGVNPHMGNYILDGLEGATTTIKVGRQFTRPINLLRGVKQGDPLSPFIFNLVVDELLGKLDSGWHGGTLPRGRASCMAFADDLVLLADKARHIRSMLGETEMFFGLCGMSVNPAKCVAMATHAPREGNWPQLVLRSIFNIDGARIPQVSTLDTFKYLGQYFGPTGLLKPSVPHLREWLERVIRAPLKPDQKLIVVKTYLIPRLLFGLQNNEVTGSALKDADRLIKRTIKRILHLSTHTPDHMIHASVRDGGLGVPELRRVIPQQLLARLTKILNNTEDPVVSGTVGSEVFRRNIERISNLAGACPASQVWREALASGAYSKGLEKAAEDSSSRSWVMAKPHGWSGRDYVGAIQLRTNNLPSKGLPYSRPSRCRGTGCLETESIPHILQKCSVVHGERIHRHNEIASKIIRHARAKGWEVEDEPHVRHDCGTLFKPDIAVHLPGNRTLVCDVHVPWDGGASLDEARRRKKEVYSGAVFREAAASRWPGRELLIEPLTVGARGIWPRSNEPVTSLLEITGPLKASCVHSALKWASTLHRTFMSRVWRNEARPPGSAGARSQRREPNATGGAGSQSSHTPPADSHN

SEQ ID NO: 26794 - protein, 829 aa, Ips nitidus
MPLRQIATLAISGTVAELQAAISSWLRPLIKPKDHGPRRAKPQRSYGQRRGGRDDRASTYKKAQDLFRRDPAGLVDTLLQGVSLDSDPETPSVEGVESLFGGIFETLSVADDREVGAGGAQEAPIRPITVEQVKAAKRGWQNSAPGLDGIRVADVKALNNIELAILFNALLGRRVVLPEWKQLRTTLVHKSGDRKDPANWRPITIGSAVQRLLHRVLLAALKSQHAHNEHQRGFARVDGTLANVVLLDTYIRYRKAEFLPFNVVSLDIRKAFDTVSHHSIRRALARAGVNPHMGSYILDGLDGATTTIKVGRQFTRPINLLRGVKQGDPLSPFIFNLVVDELLGKLDSGWHGGTLPRVRASCMAFADDLVLLADKARHIRSMLGETEKFFGLCGMSVNPAKCVAMATHAPREGNWPQLVLRSVFSIDGARVPQVSTLDTFKYLGQYFGPTGLLKPSVPHLREWLERVIRAPLKPDQKLIVVKTYLIPRLLFGLQNTEVTGSALKDADRLIKRTVKRILHLSTHTPDHMIHASVRDDGLGVPELRRVIPQQLLARLTKILNNTEDPVVSGTVGSEVFRRNIERISNLAGACPASQVWRKALASGAYSRGLEKAAEDSSSRSWVMTKPNGWSGRDYVRAIQLRTNNLPSKGLPYSRPSRCRGTGCLETESIPHILQKCSVVHGERIHRHNEIASKIIRHARAKGWEVEDEPHVRHDCGTLFKPDIAVHLPGNRTLVCDVHVPWDGGASLDEARRRKKEVYSGAVFREAAASRWPGRELLIELLTVGARGIWPRSNEPVTSLLEITGPLKASCVHSALKWASTLHRTFMSRV

SEQ ID NO: 26795 - protein, 1327 aa, Ips nitidus
MYSRRESGNVGDEQPNRRLNAVTPREEVVERTTAQNTGSEKSPVLESSRVVTETGVGITRGPPNTALGPKPAMARRALPQRSCTKGGRDVLTAGGSDQSGSSAFFMTRFLAGSGRSEAPPPASRGGESDMDGAKSQRGNAGTGGRVLTGPPNHLHVCGDCNKTFPDAAKLVRHKRARECGDRTKCAYCDARFGAFKATRAHEKRVHPKEYQDHGKNLGADDESETLQVMARAEARGAYPPTRINKALSELTGWSVDQVRYGRKKRQYQVYLEEERRLERGTVSDVTVSDTPVDTPTPADDVTRASLSQQQHRLSGEDSPSSPPIVPPVRANKRPRDESPSLPSASVGGKRPRVDGGVPQERDAIINANTSDAQTSANVSKKRGLDQDGSCHGPTKRRAARRSPSLEIVEVESLTPESEPSPILTASAVGHGSERTETAVLLPDGFEQCLRELVEVVGGVSMPLRQIATLAISGTAAELQAAISSWLRPLSKPKDHGPRRAKPQRSYGQRRGGRDDRASNYKKAQDLFRRDPAGLVDTLLQGVSLDSDPETPSVEGVESLFGGIFETPSVADNREVGAGGAREAPIRPITAEQVRAAKRGWQNSAPGLDGIRVADVKALNNIELAILFNALLGRRVVLPEWKQLRTTLVHKSGDRKDPANWRPITIGSAVQRLLHRVLLAVLKTEHAHNEHQRGFARVDGTLSNVVLLDTYIRYRKAEFLPFNVASLDIRKAFDTVSHHSIRRALARAGVNPHMGSYILDGLDGATTTIKVGRQFTRPINLLRGVKQGDPLSPFIFNLVVDELLGKLDSGWHGGTLPRGRASCMAFADDLVLLADKARHMRSMLGETEKFFGLCGMSVNPAKCVAMATHAPREGNWPQLVLRSIFSMDGAKIPQVSTLDTFKYLGQYFGPTGLLKPSVPHLREWLERVIRAPLKPDQKLIVVKTYLIPRLLFGLQNTEVTGSALKDADRLIKRTIKRILHLSIHTPDHVIHASVRDGGLGVPELRRVIPQQLLARLTKILNNTEDPVVSGTVGSEVFRRNIERISKLAGACPASQVWREALASGAYSRGLEKAAEDSSSRSWVMTKPNGWSGRDYVRAIQLRTNNLPSKGLPYSRPSRCRGTGCLETESIPHILQKCSVVHGERIHRHNEIASKIIRHARAKGWEVEDEPHVRHDCGTLFKPDIAVHLPGNRTLVCDVHVPWDGGASLDEARRRKKEVYSGAVFREAAASRWPGRELLVEPLTVGARGIWPRSNEPVTSLLEITGPLKASCVHSALKWASTLHRTFMSRVWRNEARPPGSAGARSQRREPNATGGAGSQSSHTLPTDS

SEQ ID NO: 26796 - protein, 1327 aa, Ips nitidus
MYSRRESGNVGDEQPNRRLNAVTPREEVVERTTAQNTGSEKSPVLESSRVVTETGVGITRGPPNTALGPKPAMARRALPQRSCTKGGRDVLTAGGSDQSGSSAFFMTRFLAGSSRSEAPPPASRGGESDMDGAKSQRGNAGTGGRVLTGPPNHLHVCGDCNKTFPDAAKLVRHKRARECGDRTKCAYCDARFGAFKATRAHEKRVHPKEYQDHGKNLGADDESETLQVMARAEARGAYPPTRINKALSELTGWSVDQVRYGRKKRQYQVYLEEERRLERGTVSDVTVSDTPVDTPTPADDVTRASLSQQQHRLSGEDSPSSPPIVPPVRANKRPRDESPSLPSASVGGKRPRVDGGVPQERDAIINANTSDAQTSANVSKKRGLDQDGSCHGPTKRRAARRSPSLEIVEVESLTPESEPSPILTASAVGHGSERTETAVLLPDGFEQCLRELVEVVGGVSMPLRQIATLAISGTAAELQAAISSWLRPLSKPKDHGPRRAKPQRSYGQRRGGRDDRASNYKKAQDLFRRDPAGLVDTLLQGVSLDSDPETPSVEGVESLFGGIFETPSVADNREVGAGSAQEAPIRPITVEQVKAAKRGWQNSAPGLDGIRVADVKALSNTELAILFNALLGRRVVLPEWKQLRTTLVHKSGDRKDPANWRPITIGSAVQRLLHRVLLAVLKTEHAHNEHQRGFARVDGTLSNVVLLDTYIRYRKAEFLPFNVASLDIRKAFDTVSHHSIRRALARAGVNPHMGSYILDGLDGATTTIKVGRQFTRPINLLRGVKQGDPLSPFIFNLVVDELLGKLDSGWHGGTLPRGRASCMAFADDLVLLADKARHMRSMLGETEKFFGLCGMSVNPAKCVAMATHAPREGNWPQLVLRSIFSMDGAKIPQVSTLDTFKYLGQYFGPTGLLKPSVPHLREWLERVIRAPLKPDQKLIVVKTYLIPRLLFGLQNTEVTGSALKDADRLIKRTIKRILHLSIHTPDHVIHASVRDGGLGVPELRRVIPQQLLARLTKILNNTEDPVVSGTVGSEVFRRNIERISKLAGACPASQVWREALASGAYSRGLEKAAEDSSSRSWVMTKPNGWSGRDYVRAIQLRTNNLPSKGLPYSRPSRCRGTGCLETESIPHILQKCSVVHGERIHRHNEIASKIIRHARAKGWEVEDEPHVRHDCGTLFKPDIAVHLPGNRTLVCDVHVPWDGGASLDEARRRKKEVYSGAVFREAAASRWPGRELLVEPLTVGARGIWPRSNEPVTSLLEITGPLKASCVHSALKWASTLHRTFMSRVWRNEARPPGSAGARSQRREPNATGGAGSQSSHTLPTDS

SEQ ID NO: 26797 - protein, 1193 aa, Hypermnestra helios
MKRTKRNKNSVQQQTDTDDNPLHSPSPPQSLTPPAVGVSRSTQPLTTKAGLPRQRITWTAEMNEHVMRCYYISTKLDTQIIGYRSEMLRLFLQKYPEFSEKVTEQRIADQKRVILTSKKITIPRLEKLKEEAAATLTSHNNDGDKSMEEEIQNSVVSPATTPEIIINMTHTEHTDDHNSPTSEPKAENQNIEALHNEFIRALTQFTGTDPLKRPTIPRQNTSRKLAMAVNAVNVTILPQHLSASDKSFESIHTALYAAAVAVVRFTGGEIKSHQHVPKIKKKFPPWENRLTQQIAKLRRQIGQLTQYIMGTRSKKIIAAYKKIKMEFLQHTKHDPPNNIPQETLDTLKQKLALKSNRLRRYRISQKRRNDNSTFVRNEGVFYRQFRPKSNYSSDDTHFPDTEKIERFWKKIWSQEVSHNENATWISQEEERLANAIPMGAISITAEDVTKTVHKTHNWKAAGPDKIHNYWLKKFSTLHEPLAACFTSFLHDPKTVPPYFSTGVTYLLPKGSNTENPANYRPITCLCTLYKALTSCLTSKVYNHLERHSVMAIEQKGCIKHSQSCKEQLIIDSVITEQAYHKKRNIHMAYIDYRKAFDSVPHSWLLRVLRTYKIHPEVIGLLQHLMTHWETELSLNVKECNIRTNRIPIRRGIFQGDSLSPLWFCLALNPLSSFLNNTGYGFLIKGQNNRHFKLNHLLYMDDIKLYAANTRELRGLLQCVEEFSKDISMSFGLDKCRTISIDRGKVVPSEEYCLRDGETIESMIEGDTYKYLGLLQSLRVDHKEIRFKVIKEYHRRLKAIFKTGLNSRNMFKAINTFAMPVLTYTFGIIRWPTTELENVERSTRVLLTRYRMHHPKSAVERMTLPRTEGGRGLTDITRLHAKQIKHLQEFFCNEESLLHQAVRFSDSRYTPLNLLQANEARTLIKDSEYLKDKIHQWTAKPLHGRFANELHNPNIDIGASTSWLRRGELFTETEGFMMAIQDQVIPTKNYLKYIIRANVDDDVCRCCRQGSETIQHITSGCQALVTAEYTQRHNDVAKIIHLALAQKHGLLREYVPYWKYRPNPVLENADTQLYWDRSILTDRRVIHNRPDIVVVEKRRKRAWLLDIGIPNSHNIQQYSNEKINKYQLLAEEIKQMWHQNEVVILPLIISSTGIIPKELSINIEKLELPISVRDNIQKAVILRTCAIVRKHLNL

SEQ ID NO: 26798 - protein, 1047 aa, Hypermnestra helios
MEEEIQNSVVSPATTPEIIINMTHTEHTDDHNSPTSEPKAENQNIEALHNEFIRALTQFTGTDPLKRPTIPRQNTSRKLAMAVNAVNVTILPQHLSASDKSFESIHTALYAAAVAVVRFTGGEIKSHQHVPKIKKKFPPWENRLTQQIAKLRRQIGQLTQYIMGTRSKKIIAAYKKIKMEFLQHTKHDPPNNIPQETLDTLKQKLALKSNRLRRYRISQKRRNDNSTFVRNEGVFYRQFRPKSNYSSDDTHFPDTEKIERFWKKIWSQEVSHNENATWISQEEERLANAIPMGAISITAEDVTKTVHKTHNWKAAGPDKIHNYWLKKFSTLHEPLAACFTSFLHDPKTVPPYFSTGVTYLLPKGSNTENPANYRPITCLCTLYKALTSCLTSKVYNHLERHSVMAIEQKGCIKHSQSCKEQLIIDSVITEQAYHKKRNIHMAYIDYRKAFDSVPHSWLLRVLRTYKIHPEVIGLLQHLMTHWETELSLNVKECNIRTNRIPIRRGIFQGDSLSPLWFCLALNPLSSFLNNTGYGFLIKGQNNRHFKLNHLLYMDDIKLYAANTRELRGLLQCVEEFSKDISMSFGLDKCRTISIDRGKVVPSEEYCLRDGETIESMIEGDTYKYLGLLQSLRVDHKEIRFKVIKEYHRRLKAIFKTGLNSRNMFKAINTFAMPVLTYTFGIIRWPTTELENVERSTRVLLTRYRMHHPKSAVERMTLPRTEGGRGLTDITRLHAKQIKHLQEFFCNEESLLHQAVRFSDSRYTPLNLLQANEARTLIKDSEYLKDKIHQWTAKPLHGRFANELHNPNIDIGASTSWLRRGELFTETEGFMMAIQDQVIPTKNYLKYIIRANVDDDVCRCCRQGSETIQHITSGCQALVTAEYTQRHNDVAKIIHLALAQKHGLLREYVPYWKYRPNPVLENADTQLYWDRSILTDRRVIHNRPDIVVVEKRRKRAWLLDIGIPNSHNIQQYSNEKINKYQLLAEEIKQMWHQNEVVILPLIISSTGIIPKELSINIEKLELPISVRDNIQKAVILRTCAIVRKHLNL

SEQ ID NO: 26799 - protein, 987 aa, Gorgopas trochilus
MIFCIYLFYYFLYTFCILLLLSYMSSQYSNQFDLIRCPICNDNKHYKGNRGLNIHNSRIHVPRTDVNIDIFNNTCISTSSYTDGDLLDSENFHIALSRRKHGSKIVKRIPKGARVTLARCLAECIEKVVSENTPVSWKKLLSFSYKYLTIDNKQPNQNLTKLLKQNVLNYACSSSVNNFNNKTRHNPSTSNVINIIENKISNGDIKGAAKLLFSDDSLATHSQDTLAALRNKHPTAEADLHITDFPCGTQHHPLSVSEDAVIFAILSFPNGSASGLDGISPQHFKDLTSPLVGEVGHTLVSQLTALLNLMLAGKVPDEILPILYGANLIALKKKDGGIRPIAVGSTIRRLASKLCCREFRSSLTAKLKPRQLGFGVKGGCEAAVHATRTFLYSENYDVLLKLDIKNAFNSVHRRAILTEIQKEVPEIFDYVWQCYGTPSKLMFGDNVIDSSVGCQQGDPLGPAIFSLAINNLIKQLNSKLNVWYLDDGTLGGTASSVLEDFKYIIDHFATIGLSINFSKCELFISDKILPENYSVIVENFKSLTSNVLCIKNKHNLTLLGAPIFEDAVTSVVNSKLELFNATSGRLFEIKPHFAIHILRLCLFTPKYLYLLRCCPIWKFSLALNIIDQTLKNCVSKILNLSFEDSSWRQASLPIKFGGLGIRTSGSVALPAFLASAHSTRTIISNILNINPADVCVAGLSEALETWRANFPEVVVNLEDARIQKYWDLPGIKYTFACLLECTDNIEKARLLAVSGEDSGHWLHALPSRTLGTLLDAQTLRISIGLRLGTKICEPHFCSCGQSVDQFGRHGLSCIKSAGRIYRHGALNDLIRRALVTVSIPATLEPRGLSRDDGKRPDGATLVPWSLGRALVWDVTCVDTLALSYIDETSLRAGAAADQAQRLKRRKYATIIENYVFAALAMETLGPWSADMKTFTKDMSSKLILASGDRRAGSYFAQNLSLIIQRGNAASVLGTMPQEGVLDGIFLL

SEQ ID NO: 26800 - protein, 955 aa, Bolla brennus
MSSQYSGDLVECPICKDNKKYKGYRGLNIHNSRVHVPRTDLSFKKQDVTSYLYTDGALDDESFHISLAKLKNGTKIIKRIPKGARVTVARCLAECVEKVVSENTTNSWQNLLSFSFKYLCLDNKKPNQNLTKLLKQNVLDNSCISPTNHNISYQSNVNVINLIESKISNGDIKGAAKLLFSDDSLATRSHDTLAALQNKHPTAEADLQLTDFPCGTQLHPITVSEEAVLFTILSFPNGSASGLDGISPQHLKDLTSPLVGEVGHNLVSQLTALLNLMLAGKVPDKIVPIIYGANLIALKKKDGGIRPIAVGSTIRRIASKLCCREFRSSLTTKLIPRQLGFGVKGGCEAAVHATRSFLNSENYDVLLKLDIKNAFNSVHRNAFLTQIQKEIPEIFDYVWQCYSTPSKLMFGDNVINSSVGCQQGDPLGPAIFSLAINPLIQQLNSKLNVWYLDDGTLGGTATTVLEDFKFIIDHFASIGLSINFSKCELFISDKVSTHNASVLYDKFNSLTSNVLCIKDKQNLTLLGAPIFEDAVTSVVNSKLELFNASSRRLFEIKPHYAIHILRLCLFTPKYLYLLRCCPIWKFPLALQIIDESLKSCVSKILNLCFDDSSWRQASLPIKFGGLGIRTSGSVALPAFLASTHSTRILISHILNINSADVCVAGLSEALETWKATFPEENLNLNKVYNQNYWDLPGIKSTFACLLELCKDDIDKARLLAVSGEDSGYWLHALPSRTLGTLLDAQTLRISVGLRLGAKVCEPHLCSCGRSVDRFGRHGLSCIKSAGRLFRHGALNDLIRRALATVSIPATLEPCGMNRDDGKRPDGATLVPWCLGRALVWDVTCVDTLALSYIHETSIRAGAAADQAQHLKRRKYSFIIDNYEFAALAMETLGPWSADMKKFIKDMSSRLVIASGDRRAGSYLAQNISLLIQRGNAASILGTMPREGVLDGIFIL

SEQ ID NO: 26801 - protein, 956 aa, Lerema accius
MSSQNSLLPCLICNDSKYYKGTRGLSIHCSRRHVPRSDSNIFNTNYEQSTSLSLNISGEAGHEPIHETLAFLKKNTIIIKRIPRAARATVAQSLCDCIGNVLSENSQTSWKNLLTFSYKSLCVEKNFRFKNLTKSIKNNIIADNLPVIANNNNNTPFGTSKLISRIESKISDGNLKNAANLLFSDDSLAIPSSETLTVLRDKHPTADDSSQPIIHHQSSQLRNLVVSENAVVNAIRSFPNGSASGLDAISPQHLKDLTNPMVGEFGKKLITKLTALCNLMLMGKVPDTITPILYGANLIALKKKDGGIRPIAVGSTLRRIVSKVCCHIFHKRFTDKFAPRQLGFGVKGGCEAAVHAARTFVNGVDFNILLKLDIKNAFNSVYRSAFFSEIQKEVPEIFDYIWQCYGTPSKLMFGNNEINSSVGCQQGDPLGPVLFSLAINPVISQLNSKFNVWYLDDGTLGGTVSSVFNDLKNVIDQFNEIGLKINENKCELFISDKIPHNNCLEIIHKFNSIVPNLSIKSKENLNLLGAPIFEDAVTNYVNSKLEIFNKFSDRLFKIKPHMAIYLLRNCLFTPKFNYLLRCCPVWKFPLITNVIDKSLQDTVSKILNLKFEFNSWRQACLPIKFGGLGIRSTESVALPAFLASAHSSVALISNILNLNQADVRVAGLTEAMDVWRAIFPLESTPIDNSRQCSWDLPGIKLSFASLLDQLTDDTERARLLAVSEKESSYWLQALPSHNLGTILDDSTLRISICLRIGAKVCEPHFCTCGQSVDRLGRHGLSCSRSAGRLYRHGTMNDLIRRAFVTVSVPATLEPCGMCRDDGKRPDGATLVPWRLGRTLVWDVTCVDTLAPSYVHDTSKRAGAAADRAQFLKRRKYSSILDNYEFAALAVETMGPWSTEMKSYMKDMSRRLIQTSGDQNAGSYFAQRISLTIQRGNAASVLGTMPSLDYLDSIYFL

SEQ ID NO: 26802 - protein, 954 aa, Nastra julia
MSSQNSLVTCPICDDNKFYKGTRGLSIHCSRRHVPRSDICFSNNEPSSTLPSFNHSDETGHESLHETLAYLKKNTIIIKRIPRGARATVAQSLHDCIDNVLSENSHISWTNLLTFSYKSLYIENKFKSKNLTNSIKNNSIAGKLPNINNNYVKTLSDTQHLKLISRIESKISDGNLKNAANLLFSDDTLAVPTSETLTVLRDKHPTADDSSQHFIHQLSSQHHTLFVSENAVYNAVRSFPNGSASGLDAIAPQHLKDLTNTMVGDVGKKLLTKLTALINLMLEGKVPDTIAPILYGANLIALNKKDGGIRPIAVGSTLRRIASKVCCHAFHQKFIDIFSPKQLGFGVKGGCEAAVHAARTFINGVDFNILLKLDIKNAFNSVNRSAFLSEIQKEFPEIFNYIWQCYGSPSKLMFGSNEINSSVGCQQGDPLGPVLFSLAINPIISKLTSKFNVWYLDDGTLGGTVSSVFNDLKTVIDQFNDIGLKINENKCELFITDTIPNHQCLEIIHKFNSIIPNLSVKSKENLNLLGAPIFEDAISFCVHSKLEIFNKFSYRLFEIKPHMAIYFLRNCLFTPKFNYLLRCCPVWKFPLITQVIDKSLKDTVSKILNLNFGSNSWRQACLPIKFGGLGVRSTASVALPAFLASTHSSVALISNILNLNQTDVRVAGLIEALDVWRAMFPLESTPVDNFRQSCWDMPGIKLSFASLLDQLTDDTDRARLLAVSEKESSYWLHALPSHNLGTILADSILRVSVCLRLGAKVCEPHICTCGQSVDRLGRHGLSCSRSAGRLYRHGTINDLVRRAFVTVSVPATLEPCGMCRDDGKRPDGATLVPWRLGRTLVWDVTCVDTLAPSYVHDTCKQAGAAADRAQFLKRRKYSGISDDYEFAALAVETMGPWSSEMKSFMKDMSKRLIHATGDQNAGSYFSQRISLAIQRGNAASVLGTMQNFEFLDNI

SEQ ID NO: 26803 - protein, 955 aa, Thymelicus sylvestris
MSSQNSYDSLVSCPICSDTKLYKGIRGLSIHCSRRHIPRSDLLCSSFTNTSVNTSVNHTDEVSHESLHQTLAKLKNNTIIIKRIPRAARATVAQCLSDCVASVVSENTSKTWINLLTFSYKSLNLKKNCLNKNVTNIVKSNAVAGNLPSIEIKHSKLKYNVITNIENKISDGNLKNAAKLLFSDDSLAAPTSETLTVLRDKHPTINNNTQPFDFQNFSQNQPLSVSEDDVLNAISTFPNGSASGLDAISPQHLKDLTNPLVGDAGRKLLTQLTGLINLMLAGKVPETIIPILYGANLIALKKKDGGIRPIAVGSTLRRIASKVCCLKFRPRLTNHLKPRQLGFGVKSGCEASVHAARTFINGVDFNILLKLDIKNAFNSVHRSAFLSEIQKEVPEIFDYVWQCYGTPSKLMFGNNEIDSAVGCQQGDPLGPVLFSLAIHPVITKLNSKFNVWYLDDGTLGGTVSSVFDDFKTVIDQFNTIGLQINDKKCELYISEDITDIQRAEIIHKFNTITPEISIKSKINLNLLGAPIFEDAVTHMVNSKLDLFNKFSDRLFEMKPHMAIYFLRLCLFTPKFMYLLRCCPVWKFPLVTELIDKALKQTVSKILNLNFESNSWRQACLPIKLGGLGIRSTASVALPAFLASTHSSVTLISDILNINQVDVRVAGLSQALSSWRAMFPLESIPVDSSKQKFWDIPGIKSTFASLLDQTVDNTDRARLLAVSDENSSYWLHALPSHNLGTILDASVLRISICLRLGAKVCEPHICICGQSVDRLGRHGLSCAKSAGRLYRHGTINDLIRRALVTVSVPATLEPCGMCRDDGKRPDGATLVPWRLGRTLVWDVTCVDTLAPSYVHDTCSKAGAAADRAQFLKRRKYSSVTEDYEFAALAIETLGTWSEDMKCFMKDMSKRLVRTSGDLKAGSYFAQRISLAIQRGNAASVLGTMPNLGILDDIYLL

SEQ ID NO: 26804 - protein, 955 aa, Thymelicus sylvestris
MSSQNSYDSLVSCPICSDTKLYKGIRGLSIHCSRRHIPRSDLLCSSFTNTSVNTSVNHTDEVSHESLHQTLAKLKNNTIIIKRIPRAARATVAQCLSDCVASVVSENTSKTWINLLTFSYKSLNLKKNCLNKNVTNIVKSNTVAGNLPSIEIKHSKLKYNVITNIENKISDGNLKNAAKLLFSDDSLAAPTSETLTVLRDKHPTINNNTQPFDFQNFSQNQPLSVSEDDVLNAISTFPNGSASGLDAISPQHLKDLTNPLVGDAGRKLLTQLTGLINLMLAGKVPETIIPILYGANLIALKKKDGGIRPIAVGSTLRRIASKVCCLKFRPRLTNHLKPLQLGFGVKSGCEASVHAARTFINGVDFNILLKLDIKNAFNSVHRSAFLSEIQKEVPEIFDYVWQCYGTPSKLMFGNNEIDSAVGCQQGDPLGPVLFSLAIHPVITKLNSKFNVWYLDDGTLGGTVSSVFDDFKTVIDQFNTIGLQINDKKCELYISEDITDIQRAEIIHKFNTITPEISIKSKINLNLLGAPIFEDAVTHMVNSKLDLFNKFSDRLFEMKPHMAIYFLRLCLFTPKFMYLLRCCPVWKFPLVTELIDKALKQTVSKILNLNFESNSWRQACLPIKLGGLGIRSTASVALPAFLASTHSSVTLISDILNINQVDVRVAGLSQALSSWRAMFPLESIPVDSSKQKFWDIPGIKSTFASLLDQTVDNTDRARLLAVSDENSSYWLHALPSHNLGTILDASVLRISICLRLGAKVCEPHICICGQSVDRLGRHGLSCAKSAGRLYRHGTINDLIRRALVTVSVPATLEPCGMCRDDGKRPDGATLVPWRLGRTLVWDVTCVDTLAPSYVHDTCSKAGAAADRAQFLKRRKYSSVTEDYEFAALAIETLGTWSEDMKCFMKDMSKRLVRTSGDLKAGSYFAQRISLAIQRGNAASVLGTMPNLGILDDIYLL

SEQ ID NO: 26805 - protein, 962 aa, Anthocharis cardamines
MSSISSDSLTRCSICCDNKFYKGNRGLAIHCSRRHVPRTDIFSNSASICTDTSSIVQTVGAVCNESLHQTLARLKKEIRIIKRIPRGARVTVAQCFSDCVGNVVSENSLAAWKQLLTFSYKSFHIQCNIKNKKLSNIIKENTIAGNLPTYTDHAQKNGTVFGHKNFNLISNIENKISDGNFKNAAKLLFSDDSLATHTSETLTVLRDKHPTVDSDTQLINFPRTSIPQSLSVEEDAVLFAIRSFPNGSAAGLDSISPQHLKDLTNPLNGDAGKKLLKELTALINLMLSGKVPDAIAPILYGANLIALKKKDGGIRPIAVGSTFRRIASKVCCRQYRERLISKFKPRQLGFGVKGGCEAAVHAARSFVNGADFNILLKLDIKNAFNSVYRGTFLTEIKKEIPEIFEYIWQCYGTPSKLMFGDDEIESSVGCQQGDPLGPVLFSLAINPIISQLNSKFNVWYLDDGCIAGTVSSVFDDFKIIIDQFNAIGLEINHRKCELYISQHVIPENSAEIIHKFSTLTPSLSIMTKTNLNLLGAPIFEDAVPSIVNSKLETFNEFSDRLLELKPHMALYFLRLCIFTPKFMYLLRCCPVWKFPLVTGHIDSTLKQIVSEILNLKLEDTTWRQACLPVKLGGLGIRTTSSVALPAFLASTHSTITLISNILNLKQADVQVTGLGEALDVWRAMFPMENIPTDKTKQINWDMPGQKMTFACLLDQVMDNTERARLLAVTGEHSSQWLYALPSHNLGTILDPATLRISVSLRLGAKVCEPHLCSCGQFVNQLGRHGLSCSRSAGRLYRHGTVNDLVRRALATVSIPATLEPCGLYRDDGKRPDGATLVPWRLGRTLVWDVTCVDTLAPSYIHETCTKVGAAADRAQFLKRRKYSSITEDYEFVALAFETLASWSADMKRFMKDMSNRLILSSGDQRAGSYFEQRISLAIQRGNAASVLGTIPHIGILDDIFFL

SEQ ID NO: 26806 - protein, 955 aa, Thymelicus sylvestris
MSSQNSYDSLVSCPICSDTKLYKGIRGLSIHCSRRHIPRSDLLCSSFTNTSVNTSVNHTDEVSHESLHQTLAKLKNNTIIIKRIPRAARATVAQCLSDCVASVVSENTSKTWINLLTFSYKCLNLKKNCLNKNVTNIVKSNAVAGNLPSIEIKHSKLKYNVITNIENKISDGNLKNAAKLLFSDDSLAAPTSETLTVLRDKHPTINNNTQPFDFQNFSQNQPLSVSEDDVLNAISTFPNGSASGLDAISPQHLKDLTNPLVGDAGRKFLTQLTGLINLMLAGKVPETIIPILYGANLIALKKKDGGIRPIAVGSTLRRIASKVCCLKFRPRLTNHLKPRQLGFGVKSGCEASVHAARTFINGVDFNILLKLDIKNAFNSVHRSAFLSEIQKEVPEIFDYVWQCYGTPSKLMFGNNEIDSAVGCQQGDPLGPVLFSLAIHSVITKLNSKFNVWYLDDGTLGGTVSSVFDDFKTVIDQFNTIGLQINDKKCELYISEDITDIQRAEIIHKFNTITPEISIKSKINLNLLGAPIFEDAVTHMVNSKLDLFNKFSDRLFEMKPHMAIYFLRLCLFTPKFMYLLRCCPVWKFPLVTELIDKALKQTVSKILNLNFESNSWRQACLPIKLGGLGIRSTASVALPAFLASTHSSVTLISDILNINQVDVRVAGLSQALSSWRAMFPLESIPVDSSKQKFWDIPGIKSTFASLLDQTVDNTDRARLLAVSDENSSYWLHALPSHNLGTILDASVLRISICLRLGAKVCEPHICICGQSVDRLGRHGLSCAKSAGRLYRHGTINDLIRRALVTVSVPATLEPCGMCRDDGKRPDGATLVPWRLGRTLVWDVTCVDTLAPSYVHDTCSKAGAAADRAQFLKRRKYSSVTEDYEFAALAIETLGTWSEDMKCFMKDMSKRLVRTSGDLKAGSYFAQRISLAIQRGNAASVLGTMPNLGILDDIYLL

SEQ ID NO: 26807 - protein, 962 aa, Lycaena phlaeas
MSSIISDSLTRCSICCDNKFYKGKRGLAIHCSRRHVPRTDIFPYSASNFTDRSSIVQSVGAVCDESLHQTLARLKKEIRIIKRIPRGARVTVSQCFSDCVSNVVSENSLAAWKKLLTFSYKSFHIQCNIKNKNISNIIKSNTIAGNLPTYTDHAQKNGTYSGSTNYNLISNIENKISDGNFKNAANLLFSDDSLATHTSETLTVLRDKHPTVDSDTQLINIPRTSNPQTLSVGEDAVLFAIRSFPNGSAAGLDGISPQHLKDLTNPLNGDVGKKLLKEMTALINLMLSGKVPDAIAPILYGANLIALKKKDGGIRPIAVGSTFRRIASKVCCRHYREILTSKFKPRQLGFGVKGGCEAAVHAARSFVNGADFNILLKLDIKNAFNSVYRGTFLNEIKKEIPDIFEYIWQCYGTPSKLMFGDDEIESTVGCQQGDPLGPVLFSLAINPIISQLKSKFNVWYLDDGCIAGTVSSVFDDFKIIIDQFNAIGLEINHRKCELYISNHIIPDHSAEIIHQFSTLTPNISVMTKSNLNLLGAPIFEDAVQSIVNSKLETFLQFSDRLLELKPHMAIYFLRLCLFTPKFMYLLRCCPMWKFPLVTGHIDSLLKKIVSEILNLKFEDATWRQACLPVKLGGLGIRTTSSVALPAFLASTHSSITLISNILNIQQADVQVTGLGEALDVWRAMFPMENLPTDKTKQKIWDMPGQKLTFACLLDQEMDNAERARLLAVTSEHSSEWLYVLPSHNLGTVLDPATLRISISLRLGAKVCEAHLCSCGQFVNQLGRHGLSCSRSAGRLYRHGTVNDLVRRALATVSIPTTLEPCGLVRDDGKRPDGATLVPWRLGRTLVWDVTCVDTLAPSYVHETCTKVGAAADRAQFLKRRKYSSITEDYEFAALAFETLGPWSSDMKRFMKDMSNRLILSSGDQKAGSYFAQRISLAIQRGNAASVLGTMPQIEILDDIFFL

SEQ ID NO: 26808 - protein, 962 aa, Anthocharis cardamines
MSSISSDSLTRCSICCDNKFYKGNRGLAIHCSRRHVPRTDIFSNSASICTDTSSIVQTVGAVCNESLHQALARLKKEIRIIKRIPRGARVTVAQCFSDCVGNVVSENSLAAWKQLLTFSYKSFHIQCNIKNKKLSNIIKENTIAGNLPTYTDHAQKNGTVFGHKNFNLISNIENKISDGNFKNAAKLLFSDDSLATHTSETLTVLRDKHPTVDSDTQLINFPRTSIPQSLSVEEDAVLFAIRSFPNGSAAGLDSISPQHLKDLTNPLNGDAGKKLLKELTALINLMLSGKVPDAIAPILYGANLIALKKKDGGICPIAVGSTFRRIASKVCCRQYRERLISKFKPRQLGFGVKGGCEAAVHAARSFVNGADFNILLKLDIKNAFNSVYRGTFLTEIKKEIPEIFEYIWQCYGTPSKLMFGDDEIESSVGCQQGDPLGPVLFSLAINPIISQLNSKFNVWYLDDGCIAGTVSSVFDDFKIIIDQFNAIGLEINHRKCELYISQHVIPENSAEIIHKFSTLTPSLSIMTKTNLNLLGAPIFDDAVPSIVNSKLETFNEFSDRLLELKPHMALYFLRLCIFTPKFMYLLRCCPVWKFPLVTGHIDSTLKQIVSEILNLKFEDTTWRQACLPVKLGGLGIRTTSSVALPAFLASTHSTITLISNILNLKQADVQVTGLDEALDVWRAMFPMENIPTDKTKQINWDMPGQKMTFACLLDQVMDNTERARLLAVTGEHSSQWLYALPSHNLGTILDPATLRISVSLRLGAKVCEPHLCSCGQFVNQLGRHGLSCSRSAGRLYRHGTVNDLVRRALATVSIPATLEPCGLYRDDGKRPDGATLVPWRLGRTLVWDVTCVDTLAASYIHETCTKVGAAADRAQFLKHRKYSSIAEDYEFVALAFETLGSWSADMKRFMKDMSNRLILSSGDQRAGSYFEQRISLAIQRGNAASVLGTMPHIGILDDILFL

SEQ ID NO: 26809 - protein, 962 aa, Lycaena phlaeas
MSSIISDSLTRCSICCDNKFYKGKRGLAIHCSRRHVPRTDIFPYSASNFTDRSSIVQSVGAVCDESLHQTLARLKKEIRIIKRIPRGARVTVSQCFSDCVSNVVSENSLAAWKKLLTFSYKSFHIQCNIKNKNISNIIKSNTIAGNLPTYTDHAQKNGTYSGSTNYNLISNIENKISDGNFKNAANLLFSDDSLATHTSETLTVLRDKHPTVDSDTQLINIPRTSNPQTLSVGEDAVLFAIRSFPNGSAAGLDGISPQHLKDLTNPLNGDVGKKLLKEMTALINLMLSGKVPDAIAPILYGANLIALKKKDGGIRPIAVGSTFRRIASKVCCRHYREILTSKFKPRQLGFGVKGGCEAAVHAARSFVNGADFNILLKLDIKNAFNSVYRGTFLNEIKKEIPDIFEYIWQCYGTPSKLMFGDDEIESTVGCQQGDPLGPVLFSLAINPIISQLKSKFNVWYLDDGCIAGTVSSVFDDFKIIIDQFNAIGLEINHRKCELYISNHIIPDHSAEIIHQFSTLTPNISVMKKSNLNLLGAPIFEDAVQSIVNSKLETFLQFSDRLLELKPHMAIYFLRLCLFTPKFMYLLRCCPMWKFPLVTGHIDSLLKKIVSEILNLKFEDATWRQACLPVKLGGLGIRTTSSVALPAFLASTHSSITLISNILNIQQADLQVTGLGEALDVWRAMFPMENLPTDKTKQKIWDMPGQKLTFACLLDQEMDNAERARLLAVTSEHSSEWLYVLPSHNLGTVLDPATLRISISLRLGAKVCEAHLCSCGQFVNQLGRHGLSCSRSAGRLYRHGTVNDLVRRALATVSIPTTLEPCGLVRDDGKRPDGATLVPWRLGRTLVWDVTCVDTLAPSYVHETCTKVGAAADRAQFLKRRKYSSITEDYEFAALAFETLGPWSSDMKRFMKDMSNRLILSSGDQKAGSYFAQRISLAIQRGNAASVLGTMPQIEILDDIFFL

SEQ ID NO: 26810 - protein, 962 aa, Lycaena phlaeas
MSSIISDSLTRCSICCDNKFYKGKRGLAIHCSRRHVPRTDIFPNSVFNFTDRSSIVQSVGAVCDESLHQTLARLKKEIRIIKRIPRGARVTVSQCFSDCVSNVVSENSLAAWKKLLIFLYKSFHIQCNIKNKNISNIIKSNTIAGNLPTYTDHAQKNGTYSGSTNYNLISNIENKISDGNFKNAANLLFSDDSLATHTSETLTVLRDKHPTVDSDTQLINIPRTSNPQTLSVGEDAVLFAIRSFPNGSAAGLDGISPQHLKDLTNPLNGDVGRKLLKEMTALINLMLSGKVPDAIAPILYGANLIALKKKDGGIRPIAVGSTFRRIASKVCCRHYREILTSKFKPRQLGFGVKGGCEAAVHAARSFVNGADFNILLKLDIKNAFNSVYRGTFLNEIKKEIPDIFEYIWQCYGTPSKLMFGDDEIESTVGCQQGDPLGPVLFSLAIDPIISQLKSKFNVWYLDDGCIAGTVSSVFDDFKIIIDQFNAIGLEINHRKCDLYISNHIIPDHSAEIIHQFSTLTPNISVMTKSNLNLLGAPIFEDAVQSIVNSKLETFLQFSDRLLELKPHMAIYFLRLCLFTPKFMYLLRCCPMWKFPLVTGHTDSLLKKIVSEILNLKFEDATWRQACLPVKLGGLGIRTTSSVALPAFLASTHSSITLISNILNIQQADVQVTGLGEALDVWRAMFPMENLPTDKTKQKIWDMPGQKLTFACLLDQEMDNAERARLLAVTSEHSSEWLYVLPSHNLGTVLDPATLRISISLRLGAKVCEAHLCSCGQFVNQLGRHGLSCSRSAGRLYRHGTVNDLVRRALATVSIPTTLEPCGLVRDDGKRPDGATLVPWRLGRTLVWDVTCVDTLAPSYVHETCTKVGAAADRAQFLKRRKYSSITEDYEFAALAFETLGPWSSEMKRFMKDMSNRLILSSGDQKAGSYFAQRISLAIQRGNAASILGTMPQIEILDDIFFL

SEQ ID NO: 26811 - protein, 962 aa, Anthocharis cardamines
MSSISSDSLTRCSICCDNKFYKGNRGLAIHCSRRHVPRTDIFSNSASICTDTSSIVQTVGAVCNESLHQTLARLKKEIRIIKRIPRGARVTVAQCFSDCVGNVVSENSLAAWKQLLTFSYKSFHIQCNIKNKKLSNIIKENTIAGNLPTYTDHAQKNGTVFGHKNFNLISNIENKISDGNFKNAAKLLFSDDSLATHTSETLTVLRDKHPTVDSDTQLINFPRTSIPQSLSVEEDAVLFAIRSFPNGSAAGLDSISPQHLKDLTNPLNGDAGKKLLKELTALINLMLSGKVPDAIAPILYGANLIALKKKDGGIRPIAVGSTFRRIASKVCCRQYRERLISKFKPRQLGFGVKGGCEAAVHAARSFVNGADFNILLKLDIKNAFNSVYRGTFLTEIKKEIPEIFEYIWQCYGTPSKLMFGDDEIESSVGCQQGDPLGPVLFSLAINPIISQLNSKFNVWYLDDGCIAGTVSSVFDDFKIIIDQFNAIGLEINHRKCELYISQHVIPENSAEIIHKFSTLTPSISIMTKTNLNLLGAPIFEDAVPSIVNSKLETFNEFSDRLLELKPHMALYFLRLCIFTPKFMYLLRCCPVWKFPLVTGHIDSTLKQIVSEILNLKFEDTTWRQACLPVKLGGLGIRTTSSVALPAFLASPHSTITLISNILNLKQADVQVTGLGEALDVWRAMFPMENIPTDKTKQINWDMPGQKMTFACLLDQVMDNTERARLLAVTGEHSSQWLYALPSHNLGTILDPATLRISVSLRLGAKVCEPHLCSCGQFVNQLGRHGLSCSRSAGRLYRHGTVNDLVRRALATVSIPATLEPCGLYRDDGKRPDGATLVPWRLGRTLVWDVTCVDTLAPSYIHETCTKVGAAADRAQFLKRRKYSSITEDYEFVALAFETLGSWSADMKRFMKDMSNRLILSSGDQRAGSYFEQRISLAIQRGNAASVLGTMPHIGILDDIFFL

SEQ ID NO: 26812 - protein, 962 aa, Anthocharis cardamines
MSSISSDSLTRCSICCDNKFYKGNRGLAIHCSRRHVPRTDIFSNSASICTDTSSIVQTVGAVCNESLHQTLARLKKEIRIIKRIPRGARVTVAQCFSDCVGNVVSENSLAAWKQLLTFSYKSLHIQCNIKNKKLSNIIKENTIAGNLPTYTDHAQKNGTVFGHKNFNLISNIENKISDGNFKNAAKLLFSDDSLATHTSETLTVLRDKHPTVDSDTQLINFPRTSIPQSLSVEEDAVLFAIRSFPNGSAAGLDSISPQHLKDLTNPLNGDAGKKLLKELTALINLMLSGKVPDAIAPILYGANLIALKKKDGGIRPIAVGSTFRRIASKVCCRQYRERLISKFKPRQLGFGVKGGCEAAVHAARSFVNGADFNILLKLDIKNAFNSVYRGTFLTEIKKEIPEIFEYIWQCYGTPSKLMFGDDEIESSVGCQQGDPLGPVLFSLAINPIISQLNSKFNVWYLDDGCIAGTVSSVFDDFKIIIDQFNAIGLEINHRKCELYISQHVIPENSAEIIHKFSTLTPSLSIMTKTNLNLLGAPIFDDAVPSIVNSKLETFNEFSDRLLELKPHMALYFLRLCIFTPKFMYLLRCCPVWKFPLVTGHIDSTLKQIVSEILNLKFEDTTWRQACLPVKLGGLGIRTTSSVALPAFLASTHSTITLISNILNLKQADVQVTGLGEALDVWRAMFPMENIPTDKTKQINWDMPGQKMTFACLLDQVMDNTERARLLAVTGEHSSQWLYALPSHNLGTILDPATLRISVSLRLGAKVCEPHLCSCGQFVNQLGRHGLSCSRSAGRLYRHGTVNDLVRRALATVSIPATLEPCGLYRDDGKRPDGATLVPWRLGRTLVWDVTCVDTLAPSYIHETCTKVGAAADRAQFLKHRKYSSITEDYEFVALAFETLGSWSADMKRFMKDMSNRLILSSGDQRAGSYFEQRISLAIQRGNAASVLGTMPHIGILDDILFL

SEQ ID NO: 26813 - protein, 984 aa, Pyrgus malvae
MIFCLLLILGSWCFLFLVFILRYMSIQHSNNFDLVRCSICNDNKLYKGSRGLSIHSSRRHVPRTDIIVNYSADTSNYTDGASNDGDFHITLAHLKNHVKIIRRIPRGARVTVARCLSECVAKVVTENSVESWKNLLSFAYRSLNLENRNNTPNLTKLIKDNNSSTKIPIHSKSSIHNESIFRKSNDYNISKIIEGKINNGDVKGAAKILFSDDSLATYSQDTLRALRDKHPTAEPASQLPISPTTSQPRQLTVSENAVILTIKTFPNGSASGLDGLSPQHLKDLTSPLVGDAGQLLLKELTALLNLMLEGKVPKEITSILYGANLVALKKKDGGIRPIAVGTTLRRMASKLCCREFRPILTSKLKPRQLGFGVKGGCEAAVHAARTFLNTRENYEVFLKLDIKNAFNSVHRSTFLRQIQKEVPEIFDYVWQCYGTPSKLMFGNNEIDSSVGCQQGDPLGPALFSLAINPIISQLNSKLNVWYLDDGTLGGSASSVLDDYKIIIANFSSIGLTINSSKCELFIAEHFSSLEHLEIVEKFKSFIPNITIKNKNNLTLLGAPIFEDAVTSVINSKLDLFNNCSGRLFDLKPHVATYILRLCLFTPKYMYLLRCCPFWKFPSALNIDQTLKNCVSQILNLKFNDRAWRQACLPIKFGGLGIRTSASVALPAFLASTHSTATLISNILNTVPADVRVACLDEAVEVWRATFPNVTINIEEAHSQRFWDLPGVKATYACLLDECGDNTDRASLLAVSDVDSGHWLHALPSDNLGTILDPTTLRISIGLRLGAKICEPHHCSCGRGVDSFGRHGLSCTRSAGRLYRHGAINDLIRRSLATVSVPASLEPSGMYRDDGKRPDGATLVPWRVGRALVWDVTCVDTLAPSHLPGTCNKARAAADHAQSLKRRKYCAISENYEFAALAMETLGPWSADMKKFCMDMSTRLVLASGDQRAGSYFAQKISLLVQRGNAASVLGTMPQSGLLDGIYIL

SEQ ID NO: 26814 - protein, 959 aa, Taractrocera maevius
MSCQSSSDSLVHCPICNDNKLYKGRRGLSIHCSRRHVPRSDLICNYIADNSYYNDASVSLTFGADHNESLNQTLAKLKNNITLIKRIPKGARATVAQCLNDIIGDVLSKNSPTAWSKLLTFSYKSLFIDTSSRTRNLTNLIKNNTIKANFPINIRNFYTSHNFNIIKNIEKKISVGNLKSAAKLLFSDDTLADNTLETLTALRDKHPTVDDTTQQLNFPKLSQHQPLTVSENSIFYAIRSFPNGSAGGLDGISPQHLKDLTNQSVGDAGRQLIVQLTALTNLMLAGKVPNEIAPVLYGANLIALNKKDGGIRPIAVGSTFRRIASKVSCHAFRERITNKLKPRQLGFGVKGGCEAAVHAVRTFIDSSDFNILLKLDIKNAFNSIYRGVFLSEIQKEIPELFDYIWQCYGTPSKLMFGSYEIESSVGCQQGDPLGPVLFSLAINPIIMKLNSKFNVWYLDDGTLAGTVSSVFNDFKTVIDHFNSIGLQINYTKCELLLSEYITNEHSSEIIHKFNSISPNISVKSKINLSLLGAPIFENAVAAFVNSKLEIFNKFSDRLFGMKPHMAIYILRLCLFTPRFMYLLRCCPIWKFPLVTNIIDLALNQCVSKILNLKFEDCSWRQACLPIKFGGLGIRTTGSVALPAFLASTHSSVNLIRNILNINHTDVRVANLSDAVDAWRAAFPAERIPNDKSLQKNWDLPGIKLSFACLLENTTDNTEKARLLAVSNEHSSDWLHTLPSDNLGTVLDSNTLRISICLRLGAKVCEPHICICGQVVDRFGRHGLSCTRSAGRLYRHGTINDLIRRALVTVSVPASLEPCGLCRDDGKRPDGATLVPWRLGRILVWDVTCVDTLAPTYVHDTCVRAGAAADRAQFLKRRKYSNITEDYEFVALAFETLGSWSADTKSFMKEMSNRLILTSGDQKAGSFFSQRISLAIQRGNAASVLGTMPQINALDDIFLL

SEQ ID NO: 26815 - protein, 951 aa, Epargyreus clarus
MSSQGSLVRCSICNDNKLYKGQRGLSIHCSRRHVPRTDISSQLSTSCNHTDGISNDEALCNRLARFKNEVRIVKRIPRGARVTVAQCLAECVGRVVSENSIDAWESFFTFVYKSLHIDHQNTKHNLTSVIKHNTKNASNTNVPFVNNNKSQNQNLNKLIENKISDGNIKGAAKLLFSEDSLAAHSPDTLAALRDKHPTVDADSQLPDFPRSSQHHPLTVSEDDVISTIRSFPNGSAGGLDGITPQHLKDLTNPLVGDAGKYLVRELTSLINIMLSGNVPKEITPVLYGANLIALNKKDGGIRPIAVGSTIRRLTSKLCCRKFRSRISDILKPRQLGFGVKGGCEAAVHAARTFLSGVDDSVFLKLDIQNAFNSIHRGALLSEIQKEVPEIFDYIWQCYGAPTKLMFGNIAIDSSVGCQQGDPLGPVIFSLAINPIIKQLNSKLNVWYLDDGTIGGTASTVFEDFKRVIDHFGLIGLKINLSKCELFISNHNITPGHYSEIVAKFKSLTPNISIKFTHNLTLLGAPLFDDAVTPIINSKLELFNKTSGRLFEIKPHLAIYILRLCLFTPKFLYLLRCCPIWKFPLVTNIIDNTLKLCITKILNLNFDDCSWRQACLPIKFGGLGIRSTASVALPAFLASTHSSSSLISNILNLDIADVRVASLSEAVETWRAAFPLENIPVDDASQQKVWDLPGISSTFACLLDHCADDTERARLLAVSGEDSGHWLHALPSQNLGTILDASTLRISVGLRVGAKICEPHRCLCGRSVGKYGRHGLSCSRSAGRLYRHGTLNDLIRRALVTVSVPASLEPNGLCRDDGKRPDGATLVPWKLGRALVWDVTCVDTLAPTYIHDTCSSAGAAADRAQFLKRRKYSSIINDYEFAALATETLGPWSADMKKFVKDMSHRLILASGDQRAGSYFAQKISLAIQRGNAASVLGTMPQERVLDDIFIL

SEQ ID NO: 26816 - protein, 967 aa, Heliopetes ericetorum
MSIPNNSIRDDSLVRCPICNDNKIYKGQRGLSIHRSRKHVPRTGVVFSIDGQDASTSSILTNGARFDEDFHHTLAHFKNEKYLIKRIPRGARITVARCLSQCVAKVVTENSTESWKKLFLFAFQSLHIDKNKQQKNINKIIKQNNIDFTLPIASTYSNGTNKSLYKRSNYDVNRIIESKINNGDIRGAAKLLFSDDSLATYSEDTLVALREKHPTADPVSQQLNSPNTVQFQPLTVSEDSVLSCIKSFPNGSASGLDGISPQHLKDLTSPLVGDAGRSLLKELTALINIMLSGKVPDEITPILYGANLIALKKKDGGIRPIAVGSTIRRLASKLCCREFRSRLSNILKPRQLGFGVKGGCEAAVHATRTFINKNENDIFLKLDIQNAFNSVDRSAFLKEIQTEVPEIFDYIWQSYGTPSKLMFGNSEIESSVGCQQGDPLGPVIFSLAINPIISLLNSKLNIWYLDDGSIGGNASTVLEDFKLIIERFALLGLKINSSKCELFIPDKILPEKQIEIATKFKSITPDISIKNKHNLTLLGAPIFEDAVTTTINSKLELFNNSSGRLLEIKPHMAIHILRLCLFTPKYMYILRCCPVWKFPLALNIIDQTLKNCVCKILNLSFDNRSWRQACLPIKFGGIGFRNSASVALPAFLASTHSTVTLISNILNMNSADVRVTGMDEALEVWKGTYPNETINVGQTSQQHFWDLPGLKAMFACLLDECTDNTDRARLLAVSDGDSGHWLHALPSQNLGTILDASTLRIAVGLRVGAKVCEPHQCLCGKGVNHFGRHGLSCTRSAGRLYRHGAINDLIRKSLATVSIPASLEPSGMCRDDGKRPDGATLVPWRLGRSLVWDFTCVDTLAPSHISETSKKVGAAADHAQVLKRRKYSSITKEYEFAALALETMGPWSSDLKTFIKDMSTKLILASGDQRAGSFFSQHISLIVQRGNAASVLGTMPQAQLLDGLFFL

SEQ ID NO: 26817 - protein, 989 aa, Pyrgus malvae
MIFSLFIILCFLYVLFLAFKYMSAPDNSISNNSLVCCPICTDNKFYRGLRGLSIHRSRKHIPRTGVDFSVDGHDAPTTPSILTNGASVDEGFHHTLARLKSEKKIIKRIPRGARVTVARCLSECVAKVVSENSTESWKKLLVFAFQSLHIDQNQRSKNLNKVIKQNNLELKLTTDPSNSNRKNKPIFKNSSYDVHRIIENKINNGDIRGAAKLLFSDDSLATYSQDTLAALRDKHPTAEPVSQLPKSTNTAQIQPLKVSEESVLFSIRSFPNGSASGLDGISPQHLKDLTNPLVGDAGRLLLRELTALINLMLSGKVPEEIIPILYGANLIALNKKDGGIHPIAVGSTLRRLASKLCCREFRSRLTGFLKPRQLGFGVKGGCEAAVHATRTFLNKNDNNIFLKLDIQNAFNSVCRSAFLKEIQKQVPEIFEYIWQCYGTSSKLMFGNNDIDSAVGCQQGDPLGPVIFSLAINPIISELNSKLNIWYLDDGSLGGDASSVLEDFKLIIERFASLGLKINSSKCELFIPEYISTNEHSEIVAKFKSLTPDITIKNKHNLTLLGAPIFEDAVTAVINSKLNLFTNSSGRLLEIKPHMAIHILRLCLFTPKYLYLLRCCPVWKFPLVLNSIDQTLKTYVSKILNLSFDDRSWRQACLPIKFGGIGIRTSSSVALPAFLASTHSTVTLISNILNINLADVRVTGLDEAMEVWRGTFPNEIINVSETSQQRYWDLPGIKATFACLLDECTDNTDRARLLAVSDEDSGHWLHVLPSQNLGTILDASTLRIAIGLRVGAKVCEPHQCLCGRGVGCFGRHGLSCTRSAGRLYRHGAVNDLIRRSLATVSIPASLEPTGMSRDDGKRPDGATLVPWRVGRALVWDFTCVDTLAPSHIAETAKKAGAAADHAQLLKRRKYSSITKEYEFAALAMETMGPWSADMKTFMKDMSTRQILASGDQRAGTYFSQKMSLLVQRGNAASVLGTMPQAQLLDGIYFL

SEQ ID NO: 26818 - protein, 958 aa, Pseudonascus paulliniae
MSIQNSGEYLVRCSICDDNKYYKGQRGLTIHCSRRHVPRTDVVVPVYMSSIDHTDGSIASYDEAIYVTLARFKNSIKIIKRIPRGARVTVAQCLAECVGKVVSENSVNTWKTLFTFAYKSLHIDIQNPKQNLTSQIKQNTTNASISLPSYSAYKSVSQNFNLIKLVENKISDGDVKGAVKLLFSDDSLATHSPDTLAALRDKHPTVDASSQPTDLTFSHFQHQPLTVSEDEVLNTIRSFPNGSAGGLDGISPQHLKDLTNPLVGDAGKLLVRELTALINLMLAGKVPAEILPVLYGANLIALNKKDGGIRPIAVGSTLRRLASKLCCRSFRSRISAILKPRQLGFGVKGGCEAAIHAARTFLVGNDCNVFLKLDIRNAFNSVHRGTLLSEIQKEVPEIFDYIWQCYGAPTKLMFGNIAIDSSVGCQQGDPLGPVIFSLAINHIIGQLNSKFNVWYLDDGTLGGTASSVYEDFKKIIDHFGLIGLSINFSKCELYISDKISSEHYLDIVAKFKSLTPNISIRSKNNLTLLGAPIFEEAVTSVVNSKLELFNKSCGRLFEIKPHMAIYILRLCLFTPKYLYLLRCCPVWKFPLVMNVIDESLKMCVTKILNLNFEDCSWRQACLPIKFGGLGIRTTASVALPAFLASAHSSLSLISDILHLNHADVRVAGLSGAVEAWRTAFPLEGIPVNDASQQKAWDLPGITSAFACLFDHCRDDTERARLLAVSGENSGHWLHALPSQNLGTILDPSTLRISIGLRLGAKICEPHHCLCGRSVDGSGRHGLSCSRSAGRLYRHGTINDLIRRALVTISIPASLEPSGMCRDDGKRPDGATLVPWKLGRALVWDVTCVDTLAPTYIHETCNKVGAAADRAQFLKRRKYSSIVNDYVFVALATETLGPWSADMTNFVKEVSDRLVVASGDRRAGSYFAQRISIAIQRGNAASVLGTMPQTGVLDDIFNL

SEQ ID NO: 26819 - protein, 950 aa, Epargyreus clarus
MSSQGSLVRCSICNDNKLYKGQRGLSIHCSRRHVPRTDISSQLSTSCNHTDGISNDEALCNRLARFKNEVRIVKRIPKGARVTVAQCLAECVGRVVSENSIDAWESFFTFVYKSLHIDHQNTKHNLTSVIKHNTKNASNTNVPFVNNNKSQNQNLNKLIENKISDGNIKGAAKLLFSEDSLAAHSPDTLAALRDKHPTVDADSQLPDFPRSSQHHPLTVSEDDVISTIRSFPNGSAGGLDGITPQHLKDLTNPLVGDAGKYLVRELTSLINIMLSGNVPNEITPVLYGANLIALNKKDGGIRPIAVGSTIRRLTSKLCCRKFRSRISDILKPRQLGFGVKGGCEAAVHAARTFLSGVDDSVFLKLDIQNAFNSIHRGALLSEIQKEVPEIFDYIWQCYGAPTKLMFGNIAIDSSVGCQQGDPLGPVIFSLAINPIIKQLNSKLNVWYLDDGTIGGTASTVFEDFKRVIDHFGLIGLKINLSKCELFISNHITPGHYSEIVAKFKSLTPNISIKSTHNLTLLGAPLFEDAVTPIINSKLELFNKTSGRLFEIKPHLAIYILRLCLFTPKFLYLLRCCPIWKFPLVTNIIDNTLKLCITKILNLNFDDCSWRQACLPIKFGGLGIRSTASVALPAFLASTHSSSSLISDILNLDIADVRVASLSEAVETWRAAFPLENIPVDDASQQKVWDLPGISSTFACLLDHCADDTERARLLAVSGEDSGHWLHALPSQNLGTILDASSLRISVGLRVGAKICEPHRCLCGRSVGKYGRHGLSCSRSAGRLYRHGTLNDLIRRALVTVSVPASLEPSGLCRDDGRRPDGATLVPWKLGRALVWDVTCVDTLAPTYIHDTCSSAGAAADRAQFLKRRKYSSIINDYEFAALATETLGPWSADMKKFVKDMSHRLILASGDQRAGSYFAQKISLAIQRGNAASVLGTMPQERVLDDIFIL

SEQ ID NO: 26820 - protein, 954 aa, Polygonus savigny
MSCQNSNDGLLNCSICADNKLYKGQRGLSIHCSRRHIPRITTFSQSDTPVIVNTDGTRNDEALCHILSDLKNYIRIVKRIPKGARVTVAQCLAECVHRVVTENSVSAWKSFFFFAYITLNTENRNPKINLTTLIKQNSCNILCNIPNYTKKNVSSNFNLFRSVENKISEGNIKGAAKLLFSEDSIATHSPDTIKALQGKHPTAVADLQLPNFSYPSQLPHLTVSEDDVLKTIQSFPNGSAGGLDGISPQHLKDLTNPLVGDAGRLLVKELTSLLNMMLAGKVPDEITPILYGANLIALNKKDGGIRPIAVGNTIRRLASKLCCRKIRSRVSAILKPTQLGFGVKGGCEAAVHAARTFLSGVDNNVLLKLDIQNAFNSVHRGTLLSEIQKVAPEIFAYIWQCYGTPTKLMFGNTAIDSSVGCQQGDPLGPVIFSLAIHPIITQLNSKLNVWYLDDGTLGGTASTVFEDFKQIIDNFSTIGLKINFSKCELFISDHLTPDHYTDIAAKFQSLTPNISLKSKNNLTLLGAPVFEDAVTSVINSKLELFNKSSGRLFEIKPHMALYILRLCLFTPKYIYLLRCCPVWKFPLIMNVVDDNLKLCVTKILNLIFDDCSWKQACLPIKFGGLGIRSTASVALPAFLASTHSTLSLISDILNINLADVRVANLGEAVEVWSAAFPLESIPVASASQQKVWDLPGTMSTFACLLDQCADNTERARLLAVSGEDSGHWLHALPSQNLGTILDHSSLRIAVALRLGAKICEPHFCSCGRSVDKSGRHGLSCTRSAGRLYRHGTINDLLRRALVTVSVPASLEPCGMCRDDGKRPDGATLVPWRLGRALVWDVTCVDTLAPTYVKDTCTRVGAAADQAQFLKRRKYSSILKDYEFAALASETMGPWSADMKKIVKEVSSRLVLASGDQKAGSYFAQRISLAIQRGNAASVLGTMPQSGVLDGIFNL

SEQ ID NO: 26821 - protein, 955 aa, Aguna metophis
MSSQDSNVSLVHCSICADNKLYKGLRGLSIHCSRRHVPRTDIISQPFISHDRTDGICNDEAEALHLKLARFKKEVRIVKRIPRGARVTVAQCLAECVGRVISENSINAWESFFTFAYKSLHIGPQNSKQNLTSIIKNNSTNTTNIKIPIININKDAKSNFIKNIENKISDGDIRGAAKLLFSDDTLATHSPETLSALRDKHPTADADLQLPDSLHPSQHQPLIVNEEDILNTIRSFPNGSAGGLDGFSPQHLKDLTNPLVGDAGNYLLKELTALINLMLAGNVPNEIIPVLYGANLVALNKKDGGIRPIAVGSIFRRLTSKICCRKFRSRIVDILKPRQLGFGIKGGCESAVHAARTFLNDNENSVFFKLDIQNAFNSVHRSAFLSEIQKEVPEIFGYIWQCYGTPSKLMFGNIAIDSAVGCQQGDPLGPVIFSLAINPIIKNLNSKLNVWYLDDGCLGGSASTVFEDFKLVIDRFDSIGLKINFAKCELFISKQMSSDHYSEIVTKFKSLTPNISIKFSHNLSLLGAPIFEDAVTSVINSKLEIFNKSSGRLFEIKPHLAIYILRLCLFTPKYLYLLRCCPVWKFPLAMNIIDYALKMSVTKILNLHFDDCSWRQACLPIRFGGLGIRSTTSVALPAFLASTHSSLSLISEILNINPADVAVAGLSEAVEVWRATFPLETIPVDDASKQKVWDLPGISSTFDSLLNNCTDDTERARLRAVSGEDSGHWLHALPSKNLGTILDPSILRISVGLRVGAKICEPHLCQCGLGVDKSGRHGLSCSKSAGRLYRHGTLNDLIRRALVTASVPATLEPSGMCRDDGKRPDGATLVPWKLGRTLVWDVTCVDTLAPTYIHDTCSRVGAAADRAQFLKRRKYSSIVKDYEFAALAMETLGPWSADMKLFVKDMSKRLILASGDQRAGSFFVQRISLAIQRGNAASVLGTMPQEGVLDDIFIL

SEQ ID NO: 26822 - protein, 989 aa, Pyrgus malvae
MIFSLFIILCFLYVLFLAFKYMSATDNSISNNSLVCCPICTDNKFYRGLRGLSIHRSRKHIPRTGVDFSVDGHDAPTTPSILTNGASVDEGFHHTLARLKSEKKIIKRIPRGARVTVARCLSEYVAKVVSENSTESWKKLLVFAFQSLHIDQNQRSKNLNKVIKQNNLELKLTTDPSNSNRKNKPIFKNSSYGVHRIIENKINNGDIRGAAKLLFSDDSLATYSQDTLAALRDKHPTAEPVSQLPKSTNTAQIQPLKVSEESVLFSIRSFPNGSASGLDGISPQHLKDLTNPLVGDAGRLLLRELTALINLMLSGKVPEEIIPILYGANLIALNKKDGGIRPIAVGSTLRRLASKLCCREFRSRLTGFLKPRQLGFGVKGGCEAAVHATRTFLNKNDNNIFLKLDIQNAFNSVCRSAFLKEIQKQVPEIFEYIWQCYGTPSKLMFGNNDIDSAVGCQQGDPLGPVIFSLAINPIISELNSKLNIWYLDDGSLGGDASSVLEDFKLIIERFASLGLKINSSKCELFIPEYISTNEHSEIVAKFKSLTPDITIKNKHNLTLLGAPIFEDAVTAVINSKLNLFTNSSGRLLEIKPHMAIHILRLCLFTPKYLYLLRCCPVWKFPLVLNSIDQTLKTYVSKILNLSFDDRSWRQACLPIKFGGIGIRTSSSVALPAFLASTHSTVTLISNILNINLADVRVTGLDEAMEVWRGTFPNEIINVSETSQQRYWDLPGIKATFACLLDECTDNTDRARLLAVSDEDSGHWLHVLPSQNLGTILDASTLRIAIGLRVRAKVCEPHQCLCGRGVGCFGRHGLSCTRSAGRLYRHGAVNDLIRRSLATVSIPASLEPTGMSRDDGKRPDGATLVPWRVGRALVWDFTCVDTLAPSHIAETAKKAGAAADHAQLLKRRKYSSITKEYEFAALAMETMGPWSADMKTFMKDMSTRLILASGDQRAGTYFSQKMSLLVQRGNAASVLGTMPQAQLLDGIFFL

SEQ ID NO: 26823 - protein, 953 aa, Astraptes hopfferi
MSSQNSNNSLVRCSICDDNKLYRGQRGLSIHCSRRHIPRTDVISQVDASFDHTDGINNDEALYYKLSRLKNEIRIVKRIPRGARVTVAQCLAECVGRVVSENSINAWESLFTFTYKSLHITHKNSKQNLTSVIKYNSINALNIPIPSNDKNKSTDFNLIQIIENKISDGNVKGAAKLLFSDDSLAAHSADTLAALRDKHPTVDANSQLTHTSIPSQHQPLTVNEDDVFLSIRSFPNGSAGGLDGISPQHLKDLTNPLVGDAGRSLVTELTSLINLMLSGNVPQEITSVLYGANLIALNKKDGGIRPIAVGSTLRRLASKLCCRIFRSRISDILKPRQLGFGVKGGCEAAVHTARSFLNSVDDHVFLKLDIKNAFNSVHRGAFLSEIQKEVPEIYDYIWQCYGAPTKLMFGNNAIDSSVGCQQGDPLGPVIFSLAINPIIKQLNSKLNVWYLDDGTLGGTASTVFEDFKQVIDSFASIGLTINFSKCELYISNHITSEHYSDIVTKFKSLTPNISLKSKNNLTLLGAPIFEDAVPSIINSKLELFNKSSGRLFEIKPHMAIYILRLCLFTPKYLYLLRCCPVWKFPLVTNIVDDALKLCVTKILNLSFDDRSWRQACLPIKFGGLGIRSTGSVALPAFLASTHSSLSLISEILNMNPADVRVANLSEAVEVWRATFPSESIPVDDAYQQKVWDLPGITSTFACLLDQCADNTERARFLAVSGEDSGHWLHALPSRNLGTILDPSTLRISVGLRLGAKICESHRCQCGRVVDGSGRHGLSCSRSAGRLYRHGTLNDLIRRALVTVSIPASIEPCGMCRDDGKRPDGATLVPWKLGRALVWDVTCVDTLAPTYINDTCRRVGAAADRAQFLKRRKYSSIIKDYEFAALATETLGPWSADMKDFIKDMSSRLVIESGDQKAGSYFAQKISLAVQRGNAASVLGTMPQVGVLDDVFNL

SEQ ID NO: 26824 - protein, 919 aa, Heliopetes ericetorum
MIFCIYLILGFVYALFLVLIFKYFMPLQNSNDLISCPICNDNKFYKGTRGLNIHCSRRHVPRTDVLLSNNAQLSSFVDGVSNDEAFYQTLARLKNNRKIIKRIPRGARVTVAKCLTEYVARVVTENSPDSWKKLLLFSYNTLHIDNRNGTQRQNVTKIIKENTSNISTTFITDIHTTQSFFNNQNFNVKNIIENKICHGDVKGAAKLLFSDDCLATYSQDTLAALKDKHPSADSMSQPPNPPASAQHQRLTVSEKSVRLTINSFPNGSASGLDGISPQHLKDLTNPLVGDAGCLLIKELTRLLNLMLDGKVPKEITPILYGANLIALKKKDGGIRPIAVGSTLRRMASKLCCREFRSRFVNILQPRQLGFGVKGGCEAAVHAARTFLDSKDQNILLKLDIKNAFNSVYRSTILAEIQKEVPEILDYIWQCYGTPSKLMYGHFDIDSSVGCQQGDPLGPLIFSLAIHPIITQLNSKLNVWYLDDGTIGGTASTVLEDFKFIIKNFAAIGLTINSAKCELYIPNNFSTIENAHIIQNFRTITKHISIKNKTNLTLLGAPLFQDAVTSVLNSKLEHFRNISDRLFEIEPHIATYILRLCLFTPKYLYLFRCCPVWKFPLALQDIDKTLRGCMSKILNLNFDDRAWRQACLPIKFGGLGIRTSASVALPAFLASTHSSLSLISSILNINEADVRVVSLDEAVDVWRAMFPNELIIPQQTSNQRFWDLPGIKDTFTCLLDTSTDNADRARLLAVSDADAGHWLHALPSRNLGSLLDASTLRISIGLRVGSKVCEPHHCSCGQRVDIFGRHGLSCLKSAGRLYRHGAINDLIRRCLATVSIPASLEPSGLYRDDGKRPDGATLVPWRVGRALVWDVTVTDTLAPSYLRDTCRQVGAAADHAQLLKRRKYSSITINYEFAALAIET

SEQ ID NO: 26825 - protein, 989 aa, Zopyrion sandace
MIFFAFLVVCFLYGLFLTLKYMSTTSFSGHSQVRCPICQDNKIYKGQRGLTIHNSRKHLPRTDVEVEGNNVVTSNVFTDGACIDEGFHHTLARLKREKRIIKRIPRGARVTVAKCLAECVSKVVIENSTGSWKKLLLFAFNFLHVDFQKQNKNLTKLIKQNNRNFSVSIADNDNVNISNNYSRYKTPKQTNYNITNILENKINNGDIRGAAKILFSDDSLATHSSDTLAALRKKHPSAESSPQLPTLPNAVQFQPLTVSEASVLMSITSFPNGSAGGLDGITPQHLKDLTSPLVGDAGRLLLKELTALLNLMLSGKVPEEITPILYGANLIALKKKDGGIRPIAVGSTLRRLASKLCCREFRSRLTDMFEPRQLGFGVKGGCEAAVHATRTFLKGNDYDVFLKLDIENAFNSVNRSALLSEIQNEIPEIFDYIWQCYGTPSKLMFGNNEIDSSVGCQQGDPLGPVIFSLVINPIISKLNSKLNVWYLDDGTLGGNASIVLKDFKFIINNFSSIGLKINSAKCELFIPDHISSTENLTIIDKFKALTPDISIKNKENLTLLGAPIFEDAITTVINSKLELFNNSSGRIFDIKPHIAIYILRLCLFTPKYMYLLRCCPAWKFPLVLNIIDLALRTCVTKILNLNFDDRAWRQACLPIKFGGLGIRTSASVALPAFLASTHSTVTLISKILNINPADVSVAGLDEAVEVWRATYPQEEICFKFTSKQRFWDLPGVKASFDCLLRECTDNTDKARLLAVSDEDSGHWLHALPSSNLGTILDASTLRLSVGLRVGAKVCEPHQCACGRGVNDYGRHGLSCARSAGRLYRHGALNDLIRRSLATVSIPASLEPCGMCRDDGKRPDGATLVPWRFGRTLVWDVTCVDTLAPSHVQDTCRQVGAAADHAQFLKRRKYSSITENYEFAALAIETMGPWSADMKSFMKDMSTKLILASGDRRAGSYLAQNISLIIQRGNAASVMGTMPQAQLLDGIFLL

SEQ ID NO: 26826 - protein, 933 aa, Pyrgus malvae
MKIGHQLQVTSSDLVTISDSVYLTNFVDGVSNDEAFHQTLARLKHERNIIKRIPRGARVTVAKNLTECVARVVTENTPDSWKKLLLFAYNSLHLDNINGSQRQNITKIIKEKNSNSGTTINTNYLTTNSLFNSKIFNITNIIESKISNGDVKGAAKLLFSDDCLATYSQDTLAALKDKHPSADPVSQLLNPLTTTQHQQLTVGEKSVRLAINSFPNGSASGLDGISPQHLKDLTSPLVGDAGMLLIKELTALLNLMLGGKVPIEITPILYGANLIALNKKDGGIRPIAVGSTLRRLASKLCCREFRSRLGNILKPKQLGFGVKGGCEAAVHATRTFLNSKDYNVFLKLDIKNAFNSVNRSTILEEIQKEVPEILAYIWQCYGTPSKLMYGNFDIDSSVGCQQGDPLGPLIFSLAINPIITKLNSKLNVWYLDDGSIGGTASTVLEDFKFLIEKFGSIGLTINAAKCELFIPDHISTKENDEIIQKFNTVTSNISIKNKKDLTLLGAPLFEDAVTTVLNSKLEHFKNISGRLFEIEPHIATYILRLCLFAPKYLYLFRCCPFWKFPLALQDIDEALRACVSKILNLNFDDRAWRQACLPIKFGGLGIRTSASVALPAFLASTHSSLSLISSILNINVADVRVANLDEAVEVWRATFPSENIVPEQISNQRFWDLPIIKDTFACLLDACTDNADRARLLAVSDADSGHWLHALPSRNLGTLLEASTLRIATGLRLGSKVCEPHHCSCGRGVDGFGRHGLSCSRSAGRLYRHGTINDLIRRSLATVSIPASLEPSGMCRDDGKRPDGATLVPWRLGRALVWDVTIVDTLAPSYLNNTCREAGAAADHAQFLKRRKYSTITVNYEFAALALETMGPWSADMKNFMRDMSSKLILTSGDRRAGSYFAQRISLAIQRGNAASVLGTMPQDGLLDVIFLL

SEQ ID NO: 26827 - protein, 962 aa, Heliopetes ericetorum
MLFWIYLSLGFVYALFLVLIFKYFMPLQNSNDLISCPICNDNKFYKGSRGLSIHCSRRHVPRTDVLFSDSVNLTNFVDGVSNDEVFHQTLARLKNNRKIINRIPRGARVTVAKCLTEYVARVVTENSPDSWKKLLLFSYNTLHIDNSKIKQRQNVTKIIKENSSNIVTTINSDFNQTTEPFFDRRNLNVTNLIENKMFHGDVKGAAKLLFSDDCLATYSQDTLAALKDKHPTAEPISQPPNPTATVQHQQLTVSEKAVRLTINSFPNGSASGLDGISPQHLKDLTSPLVGEAGVLLLKELTSLLNLMLGGKVPKEITPILYGANLIALKKKDGGIRPIAIGSTLRRMASKLCCREFRFRLANVLKPRQLGFGVKGGCEAAVHTTRTFLESKDQNILLKLDIKNAFNSVYRSTILAEIQKEVPEILDYVWQCYGAPSKLMYGHFDIDSSVGCQQGDPLGPLIFSLAINPIITQLNSKLNVWYLDDGTIGGTASTVLEDIKFLIKNFDSIGLTINSAKCELFIPNNFSTKENAEIIQNFRTITKNISIKNKTNLTLLGVPLFEDAVTSVLNSKLEHFRNISGRLFEIEPHIATYILRLCLFTPKYLYMFRCCPVWKFPLALQDIDNTLRDCMSKILNLNFDDRAWRQACLPIKFGGLGIRSSASVALPAFLASSHSSLPLISSILNINEADVRVANLDEAIEVWRIMFPKEQIIPQQTSYQRFWDLPGVKDTFACLLDSSVDNADRARLLAVSNTDSGHWLHALPSRNLGTILDAPTLRISIGLRVGSKVCEPHHCSCGRRVDKFGRHGLSCLKSAGRLYRHGTINDLIRRSLATVSIPASLEPSGLYRDDGKRPDGATVVPWRVGRTLVWDVTVVDTLAPSYLTDTCRQSGAAADRAQLLKRRKYSSITTNYEFAALAIETMGPWSADMKNFMKDMSTKLILASGDQKAGSYFAQRISLAVQR

SEQ ID NO: 26828 - protein, 990 aa, Pyrgus malvae
MLFSLFIVVCFLYFLFLAFEYMSNPHSSISDNYLVRCPICNDNKFYKGLRGLSIHKSRIHVPRTGINFSADGQDATTSNFLTNGASIDEDFHHTLARLKNEIKIIKRIPRGARVTVAKCLSECVAKVVTENSIEAWKKLLLFAFQSLHIDKNQNSKNINKQIKQNNLNFTLSIPSISSNVNRNDESFFKTSNYDINKIIENKINNGDIKGAAKLLFSDDSLATYSQDTLAALRDKHPTAEPVSQLPNSPNTARFQRLTVSEDSVLFSIRSFPNGSASGLDGISPQHLKDLTNPLVGDTGRLLLKELTSLINLMLSGKVPEEITPILYGANLIALKKKEGGIRPIAVGSTLRRLASKLCCREFRSRLTDVLKPRQLGFGVKGGCEATVHASRTFLNKNDYNAFLKLDIQNAFNSVNRGAFFKEIQKQVPEIFDYIWQCYSTPSKLMFGNSVINSSVGCQQGDPLGPVIFSLAINPIISKLNSKLNIWYLDDGSLGGDASSVLEDFKLIIQQFALIGLKMNSSKCELFIPDYISPEEHIEIVAKFKLITPDITIKNKHNLTLLGAPIFEDAVTTVINSKLQLFNNSSGRLFEIKPHMAIHILRLCLFTPKYMYLLRCCPVWKFPLVLNTIDQALKTCLSKILNLSFDDRSWRQACLPIKFGGIGVRSTASVALPAFLASTHSTATLISNILNINSADVRVAGLDEAVEVWRGTFPNENINIKEKSLQRFWDLPGLKAMFACLLDECTDNTDRARFLAVSDEDSGHWLHALPSQNLGTILDPSTLRIAIGLRVGAKVCEPHQCLCGRGVSYFGRHGLSCTRSAGRLYRHGAINDLIRRSLVTVSVPASLEPAGMCRDDGKRPDGATLVPWRLGRTLVWDFTCVDTLAPSHIIETSKKAGAAADHAQLLKRRKYSSISKDYEFAALAMETMGPWSADMKTFMQDMSTRLILASGDQRAGSYFSQKISLLVQRGNAASVLGTMPQAQILDGVFFL

SEQ ID NO: 26829 - protein, 952 aa, Chioides vintra
MSSQDSHSLVRCSICDDNKVYKGQRGLSIHCSRRHVPRTDVISDFSTSYNHTDGIGNDEALHFKLARLKNEVRIIKRIPRGARVTVAQCLAECVGKVVSENSIDSWEFFLTFVYKTLHVVNQNTKHNLTSLIKHNSKNASSLTLPTVHNNKGPNLNLNKLIENKISDGNIKGAAKLLFSDDSLAAHSPDTLAALRDKHPTVDADSQLPNISSPSQHQPLTVSEDDVISSIRSFPNGSAGGLDGITPQHLKDLTNPLVGDAGKYLVRELTSLMNLMLSGNVPKEITTVLYGANLIALKKKDGGIRPIAIGSTLRRLASKLCCQKFRSRISTVLKPRQLGFGVKGGCEAAVHAARTFLDGVDERIFLKLDIQNAFNSIHRSALLSEIQKEVPEIFDYIWQCYGAPTKLMFGNIAIDSSVGCQQGDPLGPVIFSLAINPIIKQLNSKLNVWYLDDGTLGGTASTVFEDFKQIIDRFSLIGLKINFSKCELFISHHITPDHCADIVAKFKSLTPNISIKSRHNLTLLGAPIFEDAVTSVTNSKLELFNKSSGRLFEIKPHLAIYILRLCLFTPKFLYLLRCCPVFKFPLVTNFIDNALKQCVTKILNLNFDDSSWRQACLPIKFGGLGIRSTASVALPAFLASTHSSLPLISEILNINLGDVRVASLSEAVEAWRTTFPLESIPVEDASEQKVWDLPGISSTFACLLDHCTDSTERARLLAVSGEDSGHWLHALPSRNLGTILDASTLRISVGLRLGAKICEPHRCICGRGVDRFGRHGLSCSRSAGRLYRHGTLNDLIRRALVTVSVPASLEPSGLCRDDGKRPDGATLVPWKLGRALVWDVTCVDTLAPTYIQDTCSSVGAAAGRAQFLKRRKYSSIMKDYEFAALATETLGPWSADMKNFMNQMSHRLILASGDQRAGSFFAQKISLAIQRGNAASVLGTMPQAGVLDDVFIL

SEQ ID NO: 26830 - protein, 958 aa, Nicephellus nicephorus
MSIQNSGDDLVRCSICDDNKFYKGQRGLSIHCSRRHIPRTDILSQTDTLFYNQTDGVTLSNNDEALYHTLARLKKNIRIVKRIPRGARVTVARCLSECVGRVVSENSISAWTTFLTFSYRTLYIDNQNTKQNLSNRIKQNIINTCNSIPSYSTNKFDATNFNLIRIIENKISDGDVKGAAKLLFSDDSLATHSPDTLTALRDKHPAADAATQLPELAYTSQHQPLTVSEKEVINSINSFPNGSAGGLDGITPQHIKDLTNPLVGDAGKAVISELTSLINLMLAGKVPKEILPVLYGANLIALNKKDGGIRPIAVGNTIRRLASKLCCQSIRSRISAILKPRQLGFGVKGGCEAAVHAARTFLYDVDYNVFLKLDIQNAFNSVHRGALLSEIQKEVPEIFDYVWQCYGAPTKLMFGNDEIDSTVGCQQGDPLGPVIFSLAINPIITQLNSKFNVWYLDDGSLGGTASTVYEDFKQIIDRFACIGLKINFSKCELFISDQITQEHYLDITAKFKLLTPNISFKSRQNLTLLGAPIFEDAVSPAINSKLELFNKTSGRLFEIKPHMAIYILRLCLFTPKYLYLLRCCPVWKFPLVMNIIDEALKISVSKILNLNFDDCSWRQACLPIKFGGLGIRTSASVALPAFLASAHSTLSLISDILKLNSADVRVAGLSGALESWRATFPLEKIPVNDTSQQKVWDLPGITTTFACLLDQCTDNTERARLLAVSGKDSGHWLHALPSKNLGTILDSTSLRISVCLRLGAKICEPHHCLCGRSVDRSGRHGLSCSRSAGRLYRHGTINDLIRRALVTVSIPASLEPYGMCRDDGKRPDGATLVPWKLGRALVWDVTCVDTLAPTYVHDTCNRVGAAADHAQFLKRRKYASITKDYEFAALATETLGPWSADMKNFMKDMSDRLILASGDRRAGSYFAQKISLAIQRGNAASVLGTMPRTGFLDGIFNL

SEQ ID NO: 26831 - protein, 901 aa, Muschampia musta
MYSHSLSNNNLISCPICNDNKFYKGQRGLSIHSSRSHVPRTDLKVSNSDFDLTLTGRSIITDGADNDEGFHHILARLKNESRIVKRIPKGARATVARYLAECIGKVVSENTCTSWKNLLLFSYKSLDISNLTSYKNLTKTIKQNSLVSSFSYSVNNSNSKKCSKVNYNVINAIENKVSNGDIRGAAKLLFSEDSLASYSSQDTLAALREKHPSANTDSQLPNFPIDFQREPLIVSQKGIILAIRSFPNGSASGLDGISPQHLKDLTGPLVGDTGQALLIQLTALVNLMLAGKVPKEIVPIIYGANLIALNKKDGGIRPIAVGSTLRRMASKVSCYEFRSRLSDKLKPHQLGFGVKGGCEAAVHAARSFLDKENYDVFLKLDIKNAFNSVHRSAVLKEIQKEVPEIFDYIWQCYGTPSKLMFGSYEIDSSVGCQQGDPLGPVIFSLAINPIISNLNSKFNLWYLDDGTLGGTASSVMEDFKYIKDHFDSIGLSINFSKCELFISDKISHEINSEIIQKFRNLIPNITLKNRDNLTLLGAPIFEEAVTSLINSKLQLFCNTSGRLFELKPHFAIYILRLCLFTPKYLYLLRCCPIWKFPLVLNEVDQTLRNYVSKILNLCFDDRSWRQACLPINFGGLGIRSSASVALPAFLASTHSTFTLIGNILNINSADGRVAGMDDAVMTWRAAFPNVDIDFENVDKQHFWNLPEIKSTFASLLDECTDNTNRARLLAVSAQESGHWLHALPSHNLGTVLDSSILRICIGLRLGARICEPHHCLCGRSVDEFGRHGLSCSRSAGRLYRHGSINDIIRRSFVTVSIPAILEPSGMSRDDGKRPDGATLVPWRLGRAFVWDVTCVDTLAPSYLHDTCVKAGAAAEQAELLKRRKYSLISQSNEFAALAMET

SEQ ID NO: 26832 - protein, 952 aa, Autochton bipunctatus
MSSQDSNESLVRCSICVDNKLYKGQRGLSIHCSRRHVPRTEVISHVVASFDRTDGLCNNEALYYKLARLKHNVRIVKRIPRGARVTVAQCLAECVDRVVSENSVNAWESFLTFGYKSLHIDRQNSKQNLTSFIKYNSTNAAKITFPTFNNNKSQNFNLIRLIENKISDGDVKGAAKLLFSDYSLAAHSTDTLSALRDKHPTVDADSQLPDICPSQHQPLTVSEDEVKNIIHTFPNGSAGGLDGISPQHLKDLTHPLVGDAGKYLVRAITSLINLMLAGNVPKEITSVLYGANLIALNKKDGGIRPIAVGSTIRRLASKLCCSRFRCKISNILKPRQLGFGVKGGCEAAVHAARTFLNAGDNSVLLKLDIQNAFNSVHRGALLTEIQKEVPEIFDYIWQCYGAPTKLMFGDVAIDSSVGCQQGDPLGPVVFSLAINPIIKLLNSKLNVWYLDDGTLGGTASTVFEDFKLVIDRFASIGLKINFSKCELFISKHLSIDHYTDIVAKFKSLTPNISIKSCDNLTLLGAPIFEDAVTPVINSKLELFNKSSGRLFEINPHMAIYILRLCLFTPKYLYLLRCCPVWKFPLDMNLIDNTLKLCVTKILNLHFDDCSWRQACLPIKFGGLGIRSTASVALSAFLASTHSSLTLISDILNVNAADVRIASLSEAVEAWRATFPMEDIPVDDSSRQKSWDLPGISSTYACLLDQCADDTERARLLAVSGEDSGHWLHALPSRNLGTILEPSTLRISVALRLGAKICEPHRCLCGRDVDRLGRHGLSCSRSAGRLYRHGTLNDLIRRALVTVSIPASLEPSGMIRDDGKRPDGATLVPWKLGRALVWDVTCVDTLAPTYIHDTCSRVGAAADRAQILKRRKYSSIIKDYEFAALASETLGPWSADMKHFIKDMSQRLILASGDQRAGSYFAQKISLAIQRGNAASVLGTMPQVGVLDGVFNL

SEQ ID NO: 26833 - protein, 985 aa, Anastrus sempiternus
MLYYLILILIWIFVIVLIFSFNSIPIQYPNSDMLRCPICNDNNFYKGQRGLNIHCSRRHIPRTDTSISHSVLSSNHIDGADRNEALHYFLAKLKQKTRIVKRIPRGARPTVARSLAEYVGKVVSDNSPESWKKLLLFSYNSLHLDTHRQKENLTKLILGNILDDTVDVPTIITDSNNDDKPFFRNKKNNLIHLVENKVSNGDIKGAAKLLFSDDTLAAYSQDTLAALHDKHPTADADSQLPNFSYSSSGQPLIISESSVISAILSFPNGSASGLDGLSPQHLKDLTGPLVGDAGQSLVKELTKLINLMLTGKVPQEIVPIIYGANLIALNKKDGGIRPIAVGSVIRRLASKICCQELRSRLTSKLKPKQLGFGVKGGCEAAVHAARTFVNGENCEVLLKLDIKNAFNSVYRSAILNEIQKEVPEIFDYIWQCYGTPSKLMFGNNVIDSAVGCQQGDPLGPVIFSLAIHPIITQLNSKFNVWYLDDGTLGGTASSILEDFKFITDRFASIGLSINFTKCEIFISDKISSNHKSEIVDKFKSIASNISIKNRQNLTLLGAPIFEDAVINSINSKIDLFNKTSGKLFDIKPHMAIYILRLCLFTPKYLYLLRCCPAWKFPLALNHIDEHLRNSVSKILNLNFDSNSWGQACLPIKFGGIGIRTSESVALPAFLASTHGTLSLISNILNISPAVVRVTAMGEAIEVWKAAYPSEVITGEVTDKQKFWDLPGIQSTFTSLLNNCVDNTDRARLLAVSADNSSHWLHALPSRNLGTILDPSTLSISVGLRVGAKICEPHHCLCGRFVDGFGRHGLSCSKSAGRLYRHGTVNDLIRRSLVTVSIPASLEPCGLCRDDGKRPDGATLVPWQVGRALVWDFTCVDTLAPTYIPETCARAGAAADHAQLLKRRKYSSITQNYHFAALAVETMGPWSADMKSFMKVMSTMLILASGDRKAGSYLAQKISLAIQRGNAASVLGTIPQAGLLDGVFIL

SEQ ID NO: 26834 - protein, 991 aa, Anastrus sempiternus
MILFCIYLLLFVSVQIYLIFKYMLSSNNNLVCCPICNDNKYYKGQKGLSIHCSRKHIPTTIRNVSTTSFSFITPSICTDGTANDEEFHHVVARLKHDIRIIKRIPKGARVTVARSLTECIGKVISENSLISWQNLFLFSYKFLCLDKQKSNVLNLTQVIKQNINNNNNNNFLHFHNSIDAQATHEIKSSKFNIINAIENKISNGDIKGAAKLLFSEDSLASYSSEDTLAALRDKHPTASADSQLPNFTNTFQRHPLTVDQDAVIAALSSFPNGSASGLDGLSPQHLKDLTSPLVGDVGHDLLRNLTALLNIMLAGKVPSEFTGIIYGANLIALNKRDGGIRPIAVGSTLRRMASKLCCREFRSRLTDRLKPRQLGFGVKGGCEAAVHATRTFLNKNDFDVLLKLDIQNAFNSVYRSVLLAEIQKEVPEIFDYIWQCYGTSSKLMFGNKSIDSAVGCQQGDPLGPVIFSLAINPIITKLNSKLNVWYLDDGTIGGTASTVLGDLEYIIDNFASIGLSVNFNKCELFISDQVSPHLHSDIIDKFHSLCPNISTKNKRNLTLLGAPIFDEAVTTTINSKLDLFNNTSGRLFEIKPHIAIYILRLCLFTPKYLYLLRCCPVWKFPLALNGVDETLKLTLSKILNLSFDDRSWRQACLPIKFGGLGIRSSASIALPAFLASTHSTFTLISNILNTNPTDVRVACMDEAMKSWRDIFPKEIVTIDDYNVRRQSFWDLPGIKLSFSCLLEQCTDNTEKARLLAVSSEDSSHWLHALPSLNLGTILDAHTLRISVGLRLGAKVVEPHNCICGRSVDQFGRHGLSCIKSAGRLYRHGTINDVIRRSLATVSIPSSLEPIGLCRDDGKRPDGTTLVPWRLGRSLVWDVTCVDTLAPSHINNTCIKAGAAADQAQLLKRRKYAQILKSHEFAALAMETLGPWSADMKAFMKNMSAKLILASGDQRAGSFFAQKIGICVQRGNAASVLGTMPQKEILDGLFLL

SEQ ID NO: 26835 - protein, 997 aa, Timochares trifasciata
MLIFCTYFFLYLLCIILVILVLNHMLSQSNTYNVLVQCPICNDDKYYKGQRGLNIHCSRRHIPTIVSTPKVSYKDYSFCADGTGSDDFHHVIARLKHGVRIIKRIPKGARVTVARSLAECVSKVVSENTLYSWQNLFLFSYKYLSLKEKKSNLNLTQLIKQNFTNSHNNNSSPPPPKNTCPTSITHNKKSGGTSIQYNIINTIEHKVSNGDIKGAAKLLFSEDSLASYSSADTLAALREKHPSASVDPQLPSFVNSIHHQPLIVSQDAVIAALCSFPNGSASGLDGLSPQHLKDLTGPLVGDAGQDLLKNLTGLLNLMLAGKVPSDFTKIIYGANLIALNKKDGGIRPIAVGSTLRRMASKLCCREFRSRLTDKLKPRQLGFGVMGGCEAAVHATRSFLINNDFEVLLKLDIKNAFNSVHRSVLITEIQKEIPEIFDYIWQCYGTPSKLMFGHKSVESAVGCQQGDPLGPVLFSLAINPIISKLNSKLNVWYLDDGTLGGNASSVLEDFEYIISHFASIGLSLNFNKCELLISDKISPQISSNIINKFQSFSPNISIKNRCNLTLLGAPIFDEAITTTINSKLQLFNNTSERLFEIKPHFAIYILRLCLFTPKYLYLLRCCPVWKFPSVLNCIDETLRSSLCKILNLNFDDRSWRQACLPIEFGGLGIRSSASVALPAFLASTHSTFTLIGNILNCNQTDLRVNCMDEAVKSWRDTFPEEVIDGDKTSVMKQSFWDLPGIKSSFACLLEECTDNTDRARLLAVSSKNSSHWLHALPSPNLGTLLDAPTLRVSVGLRLGAKVVEPHHCVCGRSVDRFGRHGLSCTKSAGRLYRHGTLNDIVRRSLATVSIPSSLEPSGLCRDDGKRPDGATLVPWRLGRALVWDVTCVDTLAPSYINETCHKAGAAADQAQLLKRRKYSAIITNNEFAALAMETLGPWSADMCTFMKDMSKKLVLASGDQRAGSFFAQRLSICVQRGNAASVLGTMPQNEILDGLFLL

SEQ ID NO: 26836 - protein, 994 aa, Ebrietas anacreon
MITFCIYFLLGVLSIISIYCMLRVNISNNNLVRCPICNDNKHYKGQRGLNIHCSRRHIPTTVSTPDGYFYTTNICTDGTGSDEEFHDILARLKHETKIIKRIPKGARVIVARSLAECVSRVVSENSLNSWQNLFLFSYKYLYLGDKKSNLNLTQHIKQNITAIPTNINFSPLPNNTRSNTTFHKKKSASTSFKYNIINAVENKIANGDIKGAAKLLFSEDSLASYSSEDTLAALREKHPSANADSQLPSFANTFRHPPLMVSQDAVIAALSSFPNGSASGLDGLSPQHLKDLTGPLVGDAGQDLLRNLTALLNLMLAGKVPSDFTKIIYGANLIALTKKDGGIRPIAIGSTLRRMASKLCCREFRSRLTDKLSPRQLGFGVKGGCEAAVHATRSFLKKNDFEVLLKLDIKNAFNSVHRSVLITEIQKEIPEIFDYIWQCYGTPSKLMFGNKSIESAVGCQQGDPLGPVLFSLAINPIITKLNSKLNVWYLDDGTLGGNASSVLEDLQCIINHFAAIGLSLNYNKCELFISDHASVEVSSNIINKFESISPNISIKNRCNLTLLGAPIFDEAITTIINSKLELFNNTSGRLFEIKPHIAIYILRLCLFTPKYLYLLRCCPTWKFPLVLNSIDETLQSTLCKILNLSFDDRSWRQACLPIKFGGLGIRSSASVALPAFLASTHSTSALVGNILNLTQTDLGVACMDEAVKSWRDKFPEETINFDQNTVKTQSFWDLPGIKSSFSCLLEECTDNTDRARLLAVSSENSSHWLHALPSLNLGTLLDAPTLRVIIGLRLGAKVVEPHLCVCGRRVDWFGRHGLSCTKSAGRLYRHGTLNDVIRRSLATVSIPSSLEPSGLCRDDGKRPDGATLVPWRLGRTLVWDVTCVDTLAPSYINETCYKAGAAADQAQLLKRRKYSEIMKSHEFAALAMETLGPWSADMNVFMRNMSTKLILASGDQRAGSFFAQKLSICIQRGNAASVLGTMPQNDLLDGVFLL

SEQ ID NO: 26837 - protein, 987 aa, Camptopleura auxo
MLLLYYYLILLIIWLFIVVVICNFNGMPTQYTNQSDLVCCPICGDNKLYKGQRGLSIHCSRRHIPNTSSSTTPSNTPTDGADCGGGLHNILAYLKRGTRIVKRIPKGARPTAARYLAECVNKVVTENTPDSWKRLLLFSYEFLHLGNLEQHQNLTKSIKRNFLDQTDIIQFSHTDSNLRNNWHTKSINLINLIENKICNGDIKGATKLLFSDDTLAAHSQDTLAALQDKHPTADADSQLPFFSYSSSSQRQPLKVSEASVISAILSFPNGSASGLDGLSPQHLRDLTGPLVGDAGRSLIKELTKLINLMLSGKVPLEITPVIYGANLIALKKKDGGIRPIAVGCVLRRLASKICCTEFRTRLTNKFKPKQLGFGVKGGCEAAVHAARTFLNDKNNQVFLKLDIKNAFNSVYRSTILDEIQKEIPEIFDYIWQCYGTSSKLMFGDNEIDSAVGCQQGDPLGPVIFSLAIHPIITHLNSKLNVWYLDDGTLGGTASSVLEDFKFIIDHFLSIGLSINFKKCELFISDTIPSDIHSNIVDIFQSISPDISIADTQNLTLLGAPIFEDAVINVINSKIEQFNKTSGRLFEIKPHMAIYILRLCLFTPKYMYLLRCCPAWKFPSALNDIDHNLRNCISKILNLNFDSNSWRQACLPIKFGGLGIRTSTSVALPAFLASTHSTLTLVGKILNINPADVRVTGMMEAIENWKVAHPLETVPVTEDIERQKFWDLPGIKSTFASLLENCADNADRARLLAVSAENSSHWLYALPSRNLGTILDSSTLSISVGLRLGAKICEPHHCPCGRFVDGFGRHGLSCSKSAGRLYRHSTINDLVRRSLVTASIPASLEPCGLSRDDGKRPDGATLVPWRLGRALVWDVTCVDTLAPTYVHDTCIRAGAAADHAQLLKRRKYSCILENYQFAALAVETMGPWSADMKSFMKDMSARLVLASGDRRAGSYFAQKVSICIQRGNAASVLGTMPQGGLLDGIFRL

SEQ ID NO: 26838 - protein, 679 aa, Chiomara georgina
MLSGKVPIEITPVIYGANLIALKKKDGGIRPIAIGSVLRRLTSKICCHEFRSRLISKFNPTQLGFGIKGGCEAAVHAARTFLNEKKYEVFLKLDIKNAFNSVYRSTILKEIQKEIPEIFDYIWQCYGTSSKLMFGYNEIESAVGCQQGDPLGPVIFSLAIHPIITQLNSKLNVWYLDDGTLGGTASSVMEDFKFIIENFASIGLSINFKKCELFISDTIPSENYHSVVDAFKCISPDISITNRQNLTLLGAPIFEDAVVNVINSKLELFNNTSGRLFEIKPHMAICILRLCLFTPKYLYLLRCCPAWKFPSVLNDIDQNLRNSVSKILNLNLDSNSWGQACLPIKFGGLGIRTSTSVALPAFLASTHRSLTLISNILNVNPADVRVTGMMEAIENWKNANPLEAVPDTEDTEKQRFWDLPGIKSTFACLLENCVDNTDRARLLAVSADNSSHWLYALPSFNLGTILDPSTLSISVGLRVGAKICEPHHCSCGRFVDGFGRHGLSCTKSAGRLYRHGTFNDLVRRSLITVSIPASLEPCGLSRDDGKRPDGATLVPWKLGRALVWDVTCVDTLAPTYVHDTCTKAGAAADHAQLLKRRKYSSILENYQFAALAVETMGPWSADMKSFMKDMSSKLILASGDRRAGSFFAQKISLCIQRGNAASVLGTLPQGRLLDGIFTL

SEQ ID NO: 26839 - protein, 933 aa, Gorgythion begga
MIIFCTYFFFYVLYFLLILIIFIHMLSQNNYNDLIHCPICNDNKLYKGQRGLNIHCSRRHIPTTVSTHSNCNISHNICADGTSSDDFHHVIARLKHESRVVKRIPKGARVTVARSLAECVSRVISENSLNSWQNLFLFSYKYLCLERQNNNLNLTQVIKQNCINIKDNNFNLTNSQKPKSISKKSGRTTSNYNLINVIENKISNGDVKGAAKLLFSEDSLASYSSEDTLAALRDKHPTANVDSQLPNFSYTSQCPPLKVNQDAVITALRSFPNGSASGLDGISPQHLKDLTGPLVGEAGQDLLKNLTCLLNIMLAGNVPSEFTKILYGANLIALNKKDGGIRPIAVGSTFRRMASKLCCHKFRSRLTDKLEPRQLGFGVKGGCEAAVHATRSFLNNNDFEVLLKLDIQNAFNSVYRSVLLTEIQKEAPEIFDYIWQCYGTPSKLMFGNKSIESAVGCQQGDPLGPVIFSLAINPIITKLNSKLNVWYLDDGTLGGNASTVLGDFEYIINHFASIGLSLNYNKCELYITDKASSKLSTDIINNFQSLSPNISIKNKSNLTLLGAPIFDEAITTIINSKLNLFNNTSDRLFEIKPHIAIYILRLCLFTPKYLYLLRCCPVWKFPLVLNSIDETLRLTLCKILNLNFDDRSWRQACLPIKFGGLGIRSSASVALPAFLASTHSTFTLIGNILNTNNTDIRVAFMGEAMNSWRDTFPNELIDHNNVKKQNFWDLPGIKSSFSCLLEECTDNTERARMLAVSSEDSSHWLYALPSLNLGTILDPPTLRISVGLRLGTKLVEPHHCLCGRSVDQFGRHGLSCTRSAGRLYRHGTLNDVVRRSLATVSIPSSLEPSGLCRDDGKRPDGMTLVPWRLGRALVWDITCVDTLAPSYLSETSLKAGAAAEQAQLLKRRKYSSIILNYEFAALAMETLGPWSAD

SEQ ID NO: 26840 - protein, 693 aa, Pyrgus malvae
MRLIKELTALLNLMLGGKVPKEITPVLYGANLIALKKKDGGIRPIAVGSTLRRLASKLCCREFRSRLGNILKPRQLGFGVKGGCEAAVHAARTFLNSKDYNVFLKLDIKNAFNSVHRSTILAEIQKEVPEILDYVWQCYGTPSKLMYGNFNIDSSVGCQQGDPLGPLIFSLAINPIITKLNSKLNIWYLDDGSIGGDASTVLEDFKFIVENFGSIGLTINSAKCEIFIPNHISTKENDDIIQKFRAITTDISIKSKKNLTLLGAPLFEDAVTTFLNSKLEYFKNISSRLFEIEPHIATYILRLCLFAPKYLYLFRCCPIWKFPLALQDLDETLRASVSKILNLNNNFDDRAWRQASLPIKFGGLGIRTSASVALPAFLASTHSSLSLISSILNINEADVRMANLDEAVEVWRATFPSETIIDDKTSNQRFWDLPGVKDTYACLLDVCTDSVDRARLLAVSETDSGHWLHALPSRNLGTLLDASTLRISVGLRIGSKVCEPHHCSCGRNVDGFGRHGLSCSRSAGRLYRHGAINDLIRRSLATVSIPASLEPVGMYRDDGKRPDGATLVPWRVGRALVWDVTIVDTLALSYLSNTCKEAGAAADHAQFLKRRKYSSIAINYEFAALAIETMGPWSADMKGFMRDMSTKLILASGDQRAGSYLAQRISLAVQRGNAASVLGTMPQDGLLDGIYLL

SEQ ID NO: 26841 - protein, 984 aa, Pyrgus malvae
MLFSIFLSLGFVYVLFLVIIYKCFMPLQYSNNLVPCPICNDNKQYKGSRGLTIHCSRRHLPRTDILNSDNVHVTNFADGASNDEAFHQTLARLKSERKIIKRIPRGARVTVANCLAECVARVVTENSTDSWKKLLIFAYSSLHIDNRNSSQRQNITKVIKENNSNSANTIINNNKYSTNSFSNYKTLNINNLIENKINNGDVKGAAKLLFSDDCLATFSQDTLVALKEKHPSADPVSQLPNPPTTTQHPQLTVSEKSVRLAINSFPNGSASGLDGISPQHLKDLTSPLVGDAGMRLIKELTALLNLMLGGKVPKEITPVLYGANLIALKKKDGGIRPIAVGSTLRRLASKLCCREFRSRLGNILKPRQLGFGVKGGCEAAVHAARTFLNSKDYNIFLKLDIKNAFNSVHRSTILAEIQKEVPEILDYVWQCYGTPSKLMYGNFNIDSSVGCQQGDPLGPLIFSLAINPIITKLNSKLNIWYLDDGSIGGDASTVLEDFKFLVENFGSIGLTINSAKCEIFIPNHISTKENDDIIQKFRAITTDISIKSKKNLTLLGAPLFEDAVTTFLNSKLEYFKNISGRLFEIEPHIATYILRLCLFAPKYLYLFRCCPVWKFPLALQDLDETLRASVSKILNLNFDDRAWRQASLPIKFGGLGIRTSASVALPAFLASTHSSLSLISSILNINEADVRVANLDEAVEVWRATFPSETILDDKTSNQRFWDLPGVKDTYACLLDVCTDSVDRARLLAVSETDSGHWLHALPSRNLGTLLDASTLRISVGLRVGSKVCEPHHCSCGRNVDGFGRHGLSCSRSAGRLYRHGTINDLIRRSLATVSIPASLEPVGMYRDDGKRPDGATLVPWRVGRALVWDVTIVDTLALSYLSNTCKEAGAAADHAQFLKRRKYSSIAINYEFAALAIETMGPWSADMKDFMRDMSNKLILASGDQRAGSYLAQRISLAVQRGNAASVLGTMPQDGLLDGIYLL

SEQ ID NO: 26842 - protein, 919 aa, Pyrgus malvae
MPSTLSDITQKYTKKMKIKQEHNMSFSTSRQKLRVELLLTYNQVAAKIEFSICVARVVTENSTDSWKKLLIFAYSSLHIDNRNSSQRQNITKVIKENNSNSANTIINNNKYSTNSFSNYKTLNINNLIENKINNGDVKGAAKLLFSDDCLATFSQDTLVALKEKHPSADPVSQLPNPPTTTQHPQLTVSEKSVRLAINSFPNGSASGLDGISPQHLKDLTSPLVGDAGMRLIKELTALLNLMLGGKVPKEITPVLYGANLIALKKKDGGIRPIAVGSTLRRLASKLCCREFRSRLGNILKPRQLGFGVKGGCEAAVHAARTFLNSKDYNIFLKLDIKNAFNSVHRSTILAEIQKEVPEILDYVWQCYGTPSKLMYGNFNIDSSVGCQQGDPLGPLIFSLAINPIITKLNSKLNIWYLDDGSIGGDASTVLEDFKFLVENFGSIGLTINSAKCEIFIPNHISTKENDDIIQKFRAITTDISIKSKKNLTLLGAPLFEDAVTTFLNSKLEYFKNISGRLFEIEPHIATYILRLCLFAPKYLYLFRCCPVWKFPLALQDLDETLRASVSKILNLNFDDRAWRQASLPIKFGGLGIRTSASVALPAFLASTHSSLSLISSILNINEADVRVANLDEAVEVWRATFPSETILDDKTSNQRFWDLPGVKDTYACLLDVCTDSVDRARLLAVSETDSGHWLHALPSRNLGTLLDASTLRISVGLRVGSKVCEPHHCSCGRNVDGFGRHGLSCSRSAGRLYRHGTINDLIRRSLATVSIPASLEPVGMYRDDGKRPDGATLVPWRVGRALVWDVTIVDTLALSYLSNTCKEAGAAADHAQFLKRRKYSSIAINYEFAALAIETMGPWSADMKDFMRDMSNKLILASGDQRAGSYLAQRISLAVQRGNAASVLGTMPQDGLLDGIYLL

SEQ ID NO: 26843 - protein, 992 aa, Pyrgus malvae
MIFSLFIILCFLYVLFLAFKYMSAPDNSISNNSLVCCPICTDNKFYRGLRGLSIHRSRKHIPRTGVDFSVDGQDAPTTPSILTNGASVDEGFHHTLARLKSEKRIIKRIPRGARVTVARCLSECVAKVVSENSTESWKKLLVFAFQSLHIDQNQRSKNLNKVIKQNNLELKLTTDPSNSNRKNKPNFKNSSYDVHRIIENKINNGDIRGAAKLLFSDDSLATYSLTQLSHSQDTLAALRDKHPTAEPVSQLPKSTNTAQIQPLKVSEESVLFSIRSFPNGSASGLDGISPQHLKDLTNPLVGDAGRLLLRELTALINLMLSGKVPEEIIPILYGANLIALNKKDGGIRPIAVGSTLRRLASILCCREFRSRLTGFLKPRQLGFGVKGGCEAAVHATRTFLNKNDNNIFLKLDIQNAFNSVCRSAFLKEIQKQVPEFFEYIWQCYGTPSKLMFGNNDIDSAVGCQQGDPLGPVIFSLAINPIISELNSKLNIWYLDDGSLGGDASSVLEDFKLIIERFASLGLKINSSKCELFIPEYISTDEHSEIVAKFKSLTPDITIKNKHNLTLLGDPIFEDAVTAVINSKLNLFTNSGRLLEIKPHMAIHILRLCLFTPKYLYLLRCCPVWKFPLVLNSIDQTLKTYVSKILNLSFDDRSWRQACLPIKFGGIGIRTSSSVALPAFLASTHSTVTLISNILNINLADVRVTGLDEAMEVWRGTFPNDIINVSETSQQRYWDLPGIKATFACLLDECTDNTDRARLLAVSDEDSGHWLHVLPSQNLGTILDASTLRIAIGLRVGAKVCEPHQCLCGRGVSCFGRHGLSCTRSAGRLYRHGAVNDLIRRSLATVSIPASLEPTGMSRDDGKRPDGATLVPWRVGRALVWDFTCVDTLAPSHIAETAKKAGAAADHAQLLKRRKYSSITKEYEFAALAMETMGPWSADMKTFMKDMSTRLILASGDQRAGTYFSQKNELTSSEGKRCQRSGYNAKMEFSFYN

SEQ ID NO: 26844 - protein, 956 aa, Salantoia eriopis
MSSQSSGNELVRCSICDDNKFYKGKRGLTIHCSRRHIPRTDTLSQTGTTSYDPTDGVTITNNDEAFCRTLARLKNNVKIIKRIPRGARVTVARFFAECVGRVVSENSIDAWKAFLTFSYRTLFIDNLNPKQNLSYKIKQNVINTCNSIPHNSNKFVAPFNLIKVIENKISDGDVKGAAKLLFSDDSLATHSPDTLAALRDKHPSAHAALQLPQLACPSQLHPLTVSEEEVINSIHSFPNGSAGGLDGISPQHLKDLTNPLVGDAGKELIKKLTSLINLMLAGQVPQEIIPVLYGANLIALNKKDGGIRPIAVGNSIRRLASKLCCRSIRSRISAILKPRQLGFGVKGGCEAAVHAARTFLNGVDYNVFLKLDIQNAFNSVHRGAFLSEIQKKAPEILDYVWQCYGAPTKLMFGNDEIDSTVGCQQGDPLGPVIFSLAINPIITQLNSKLNVWYLDDGTLGGTASTVYEDFKLIIDQFSLIGLKINISKCELFISDQITREHYLDIAAKFKSLTPNISFKSRHNLTLLGAPIFEDAVTSIINSKLENFNISSGRLFEIKPHMAIYILRLCLFTPKYLYLLRCCPVWKFPLAMSIIDEALKISVTKILNLNFDDSSWRQACLPIKFGGLGIRTSASVALPAFLASTHSTLSLISDILNINPADVRVADLGEALEVWRATFPLENIPVEDACQQKMWDLPGIKSTYACLLDQCPDDNERARFLAVSGEDSGHWLHALPSKNLGTILDPATLRIAVCLRIGAKICEPHRCLCGRSVDKTGRHGLSCSRSAGRLYRHGTINDLIHRALVTVSVPASLEPCGMCRDDGRRPDGTTLVPWKLGRALVWDVTCVDTLAPTYIHNTCNRVGAAADHAQFLKHRKYASILKDYEFAALAIETLGPWSADMKKFVKDMSDRLILASGDRRAGSYFAQKISLAVQRGNAASVLGTMPPAEFLDGIFNL

SEQ ID NO: 26845 - protein, 952 aa, Chamunda chamunda
MSSQSSSISLVRCPICDNNKLYKGQRGLAIHSSRRHIPRSDLPCLLDNSVNSTDGTVIVEALHFKLARLKNDINIIKRIPRGARTTVARCLAECVGKVVTENTSNAWINLLTFSYRSLHTNQIRPRQNLTSYIKNNTLKGILLDSGPNCSKGLNYNLIKLIENKISDGNISGAAKFLFSDDSLASHSLDTLLALRDKHPTANANPQPPSLQSSSLHPTLTVNEDSILLGIRTFSNGSAGGLDGISPQHLKDLTNPLVGDAGISLVKEITALINLMLSGKVPKEIIPILYGANLIALKKKDGGIRPIAVGNTFRRLASKICCHMFRSRLTDKLKPRQLGFGVKGGCEAAVHAARTFLNGNDFNVFLKLDVKNAFNSVDRGVILTEIQKEVPEIFDYIWQCYGTSSKLMYGNNEIDSSVGCQQGDPLGPLIFSLAINPIITELNSKFNVWYLDDGTLGGTASTVFEDFKTIIDRFSSIGLTINFSKCELFISDNVSFQHHSDIINKFTSLTANISIKTKQNLTLLGAPIFEDAVTSVINSKLELFNKSSDLLFDIKPHMAIYILRLCLFTPKYLYLLRCCPVWKFPLALSMIDEALKHCISKILNLSFDEISWRQACLPIKFGGLGIRTTASVALPAFLASTHSTLTLISNILNLNPADVRVAGLDSALEAWKASFPLENIPINDAPYQRIWDLPGLKSTFASLLEECKDNTERARLLAVSGNDSGHWLHALPSHNLGTLLDPLALRICICLRLGAKVCEPHQCICGRGVDRFGRHGLSCTRSAGRLYRHGTINDLIRRSLVTVSVPATLEPCGMCRDDGKRPDGATLVPWSLGRVLVWDFTCSDTVAPSYVDMTAKKVGAAADHVQFLKRRKYSSITEDYEFMALAVETMGPWSDDMKSFMKTMSTKLILASGDRRAGNFFAQKISLAIQRGNAASVLGTMPQTGGLDDIYVL

SEQ ID NO: 26846 - protein, 954 aa, Anisynta dominula
MPNHDSSLTRCPICNDNKFYKGQRGLSIHSSRRHIPRTDVNVIDSTLSSAVITDGVSNDESLQQRLARLKDETRVIKRIPRGARHTVARSLAEHVGKVVSENTTDAWINLLVFAYRYLYIDKKKTNINLTNQIKNNHIQASRSTYDCNTNSYFSGIQNFNVNKAIENKISDGDIKGAAKVLFSDDSLATRSPEILTALREKHPTASDDSQLPCIPVSAHPLTVNEEAVLRAINSFRNGSAAGLDGISPQHLKDLTNPLVGEAGVMLKKELTGLANLMLAGNVPSSITPVLYGANLIALKKKDGGIRPIAVGSTLRRMVSKLCCREFRSRLTEKLKPRQLGFGVKGGCEAAVHAARTFLNGIDYTVFLKLDIKNAFNSVDRGALLTEIQKQVPEIFNYVWQCYGTPSKLMFGNNEIDSSVGCQQGDPLGPVLFSLAINPIIEQLNSKFNVWYLDDGTLGGAASTVLRDFKHVIDHFNSIGLEINFTKTELFISDKISPEHHSDILTTFTSLNPSISIKNKNNLTLLGAPIFDDAVTPVLNSKLELFNKFSGRLFDIKPHMALYILRLCLFTPKYLYLLRCCPVWKFPLITNYIDKALKLCVSKILNLNFEDSSWTQAGLPIKFGGLGIRSTASVALPAFLASSHSSITLISKILNINPADARVVGLDGATEVWRAMFPLEIIPVDKIHSQRFWDLPWLKSTFACLLEQCKDNTERARLLAVSGDDSGHWLHALPSNNLGTILDASSLRIAVGLRLGAKICEAHRCFCGRDVDQFGRHGLSCTRSAGRLYRHGTINDLIRRALVTVSIPASLEPPGMCRDDGKRPDGATLVPWRLGRTLVWDVTCADSLAPSYVRETANRAGAAADQAQFLKRRKYSSLSENYEFVALAVETLGPWSADMKSFMKDMSTRLILVSGDQRAGSFFAQKISIAIQRGNAASVLGTMPHGGVLDGVFFL

SEQ ID NO: 26847 - protein, 1042 aa, Sphaeramia orbicularis
MEVQSQEAHHSAQDLLAEPAPSIRRHQEARRVEGLPKRPRLNLPSTTDHRWAQLDEDLSIILDKTLKGDAVNKIKTLVEAVYQACYDRFGVKEGKPDKQPSGPSRRQRRIAEMRQDLRALKKRWRGAEHQEKEALSELSSEVRRNLFQLQRAEAIWRRQREKRRQRRSFFNNPFRYTSDFLGQPKSGRLACSKEEVEDAVKAAHSNPSRDLPLGECPFPIPKLNPSTPFNMADFTFEEVRSVVRRARAGSAPGPSGTSYKIYKNCLQLLRRLTILLRTLWKKKQEPWLWTLAEGCFIPKELNSSSLEQFREISLLDVEGKVFWAIIARKLTSYLLSNGYVDTSVQKGGVLGYSGCLEHTSVISQIIKEAKRNKKTLSVVWLDLAKAYSNVPHQLICKALEHYQVPPEVIKLVMSHMGLLQMRFSVQGFTTKWQRLEKGIMAGCTISVSLFVAAMNLLIKAGESQCKGPMAGDGTRHLACRAFMDDITVMTPSILGTRWILSSLEKMATWARMQFKPSKSRSLCLLNGSLSNSTFSIQGSEIPTIQEERIRCLRKSYDSTLKDRGNLEDTLAQLKEWLRRIDKSLLLGRFKVWCFQYGIIPRLQWPFLLYDFPMTKVEAMERVCSRFIRKWLGVPPAFSSVNLYSKSSVLRLPCSSVIEEFKATKARAACTLLISRDAKVRHASSAINCGRKWKPLEAVKEAEAYWRHQEIVGTVCRGRLGLGDYRIKSWSKSNTQGRRDLVVRRVRDTAEEDRRIKAAGQGSQARWTQWEEALERPLSWKELWITDQGKLNFLLHAVADLLPTPSNLKIWGKEQEASCSQCGAKLCTLNHILTSCPKALADGHYRWRHDKVLTKVAKWVELQRNITNKQPLAPPRVISFHPEGSKVPKGKRPDSLPSILHRATDWELHVDLKKKLVFPQEVVATTHRPDMILLSKRSKSIILAELTVPWEDRRAISHQAKKAKYQDIVEEVTLAGCHATLYPIEVGARGFPATSMPSFLQKIGLNPKQLQKAIREIATVAETSSRWLWLSRDRSWTPSAGEG

SEQ ID NO: 26848 - protein, 822 aa, Cephalopholis sonnerati
MLTPHTPFNMADFTMDEVRAVVLKARAGSAPGPSGTSYKIYKCCPQLLKRLSKLLRTLWKKKLEPGLWTLAEGCFVPKELNSTRLDQFREISLLDVEGKIFWSIVAKRLTTYLLANEFIDSGVQKGGVPGYSGCLEHTAVISQLINEAKSNYNTLSVVWLDLAKAYPSVPHQLIRKALDHYRVPSEVVELVMSHMDALRMRFTVGNVTTKWQRLEKGIMAGCTISVALFIAAMNLLLKAGGTQCRGPKADDGTRHPACRAFMDDVTVMTPSIQGTQWILSALEKMATWSRLQFKPEKSRSLSILKGKLTGNIFSIQGSEIPTIQDQGIRCLGKHYDSSLKDSGNLTNTKAQLNTWLKAIEHSQLLGRFKVWCFQYGIIPRLQWPFLLYDFPMSQVEGMERLCSKFLRKWLGVPPSFSAVNLYSKTSKLPLPVSSVVEEFKATKTRAVSTLLLSEDGKVRHASKTIKCGRKWKPQQAVMEAESYWKHQEIVGMVCQGRLGLGHYGKKRWSKTDARAKRGLMVQRVREAAEEDRQVKAIGLASQGRWTQWDQSQERPLSWKELWQTDQGKLSFLLRSVTDLLPTPSNLKIWGREEDPSCNQCGAASCTLNHILTSCPKALAEGRYRWRHDKVLTEIAKWVEQQRVKANNKQTQPPEAITFVREGDKARKTITSAKNPPSTLQYASDWELSVDLKRKLVFPQDVAVTPLRPDMVLLSRSTKTIIVAELTVPWEERLVTSHQLKKAKYQDLIDEAVLKGWHATIFLIEVGCRGFPAKSVRYFLQRVGLEPKQLKLATRDIAAAAESSTRWLWLKRAHSWNPSAGEA

SEQ ID NO: 26849 - protein, 1196 aa, Pimephales promelas
MFTSPYCRDHGERPIGGGGRPTDIRERTDDSSERRHAIVSGLAPRSTAQKATSFEQREYPQADRGGGEDNLPSDGSMVKDPDNGKRTTRLDAERQKVEAKRRCDICGGLFKNERGVKIHQGKSKCKEQSQQRRAPKLTQSNLSEFVKGVHQSVGEDQGQEANHSAPDLPAQPTQSTERVGEPESPKDFERKPRLNLPPATDCRWAQLDDDLNITLENTLKGDAVKKIKIMVDIVYQVCHDTFGEKERKTPRPPAGPSRRQRQIKELRGELRTLKRRWREASDEERVALDEISREKRKRLIQLRRAETMREKQREKRRKRKAFFNNPFQFTVDLLGKPKGGTLACTKEEIEDSVAGAHGDSSRSIPLGECPFQLPILSPHTPFSMADFTMDEVSAVVGKARAGSAPGPSGTTYKIYKCCPQLLKRLSKLLRTLWKKKLEPGLWTLAEGCFVPKELNSTRLEQFREISLLDVEGKIFWSIIAKRLTTYLLANEFIDPSIQKGGIPGYSGCLEHTAAISQLINEARSNNNTLSVVWLDLAKAYPSVPHQLIRKAMDYYQVPSAVVELIMTHMDALQMRFTIGSVTTKWQRLEKGIMAGCTISVALFIAAMNLLLKAGGMQCRGPKAVDGTRHPACRAFMDDVTVMTPSIQGTQWILSALGKMAAWSRLQFKPEKSRSLTILKGKLTGNIFNIQGSDIPTIQDQRIRCLGKQYDSSLKDSGNLTNTKAQLNIWLKAVEHSQLLGRFKVWCFQYGIIPRLKWPFLLYDFPMSQVEGMERLCSKYLRKWLGVPPSFSAVNLYSKTCKLPLPVSSVAEEFKATKARAVSTLLSSKDGKVRHASKTIKCGRKWKPQQAVMEAESYWKHQEIVGVVCQGRLGLGHYSEKRWSRADTRARRGLVVQRVREAAEEERQVKAIGLASQGRWTQWDQAQERPLSWKDLWQIDQGKLSFLLRSVADLLPTPSNIKIWGGGEDPSCNQCGAASCTLNHILAGCPRALAEGRYRWRHDKVLAEIAKWVEQQRVKANNKQACPPQVTTFVREGDKAHKTGMVAKNPPSALQRASDWELRVDLKKKLVFPQDVAATSLRPDMVLLSRSTKSIIVAELTVPWEERLATSHQLKKAKYQDLIDEANVKGWHATSYPIEVGCRGFPAKSVRYFLQRMGLEYKQLKEATRDIAEAAESSSRWLWLKRAHSWSPSAGEG

SEQ ID NO: 26850 - protein, 967 aa, Thalassophryne amazonica
MVQVVYQACHDIFGVKEGKVLRPPLRPSRRQRQIRELRGELKKLKKRWREANIAERTALNEVRAQVRKNLVHLHRVEILREKQREKRRKRKAFVNNPFQFTAELLGKQKSGTLKCSKAEVEDSTTAAHGDPLRNVPLGECPFPLPALLPHTPFNMADFTVDEVRAVVEKARAGSAPGPSGTTYKIYKNCPQLLKRLPKLLRTLWKKKQEPWLWTFAEGCFVPKELNSERLNQFREISLLDVEGKIFWSIIARRLTAYLLANEFIDSSVQKGGVPGYSGCLEHTAAISQLIKEAKSNNKTLSVVWLDLAKAYPSVPHQLIQKALDHYRVPAEVVELTMSHLDALRMRFSTNDFTTSWQRLEKGIMAGCTISVALFIAAMNLLLEVGEAQCRGPKVDDGIRHPACRAFMDNVTVMTPSIQGTQWILSALERMATWARLQFKPEKSRSLTILKGKPKGNIFSIQGVDIPRIQEQGIRCLGKVYDSSLKDGDNLISTKVQLCTWLKAVDNSQLPGRFKVWCFQYGIIPRLQWPFLLYDFPMSQVEGMERLCSKFLRRWLGVPPSFSSVNLYSKTSKLSLPVTSVAEEFKAAKVRAVSTLRSSDDGKVRHASKNIKCGRKWRPQQAVTEAEAHLRYQEIVGMVCQGRLGLGNYDGKRWSKVNAKAKRGLVVQRVRQAAEEDRQVKAVGLASQGRWTQWDQALERQLSWKELWQIDQGKLSFLLRAVSDLLPTPSNLKIWGAEEDPSCKQCGAAYCTLNHILTGCPKALAEGRYRWRHDRVLTEIAKWVENQRIKMNNNHSLPSIGVKFLREGSKVLKSRTAAKNLLCILQKASDWELSVDVKRKLVFPQDVVATTLRPDMVLLSRRAKTIIVAELTVPWEERLATSHHLKKTKYQDLVDEAVLKGWHATFFPIEVGCRGFPAKSMRYFFQRVGLESKQLKQAIREIASMAELSSRWLWLMRAQSWNPPAGEG

SEQ ID NO: 26851 - protein, 1122 aa, Thalassophryne amazonica
MDYTVKDLGNGTRSTRKDVSSHQGEVKQRCDVCRRIFKNERGVKIHQGKSKCKEQSQQRKATDITQRVISEFITIACQSTEDRGREANHSAPDLSALTVQSTGRGSQPKGPKDFLRKPRLNLPSAADHRWQQLDQDLNITLDSVLKGEAVRKIETMVQVVYQACHDIFGVKEGKVLRPSLRPSRRQRQIRELRGELKKLKKRWREANIVERTALNEVRAQVRKNLVHLHRVEKLREKQREKRRKRKAFVNNPFQFTAEFLGKQKSGTLKCSKAEVEDSMTAAHGDPLRSVPLGECPFPLPALLPHTPFNMADFTVDEVRAVVKKARAGSAPGPSGTTYKIYKNCPQLLKRLAKLLRTLWKKKQEPQFWTLAKGCFVPKELNSERFDQFREISLLDVEGKIFWAIIARRLTAYLLANEFIDSSVQKGGVPGYSGCLEHTAAISQLIKEAKCNNKTLSVVWLDLAKAYPSVPHQLIQKALDHYRVPAEVVELTMSHLDALRMRFSTNDFTTSWQRLEKGIMAGCTISVVLFIAAMNLLLEVGEAQCRGPKADDGTRHPACRAFMDDVTVMTPSIQGTQWILSALERMATWARLQFKPEKSRSLTILKGKPKGNIFSIQGADIPRIQKQGIRCLGKVYDSSLKDGNNLISTKVQLCTWLKAVDNSQLPGRFKVWCFQYGIIPRLQWPFLLYDFPMSQVEGMERLCSKFLRRWLGVPPSFNSVNLYSKTSKLSLPVTSVAEEFKAAKVRAVSTLRLSDDGKVRYATKNIKCGRKWRPQQAVTEAEAQLRYQEIVGVVCQGRLGLGNYDGKRWSKVNAKAKRGLVVQRVRQAAEEDRQVKAVGLASQGRWTQWDQALERQLSWKELWQIDQGKLSFLLRAVSDLLPTPSNLKIWGAEENPSCKQCGAAYCTLNHILTGCPKALAEGRYRWRHDRVLTEIAKWVENQRIKMNNNHSLPSIGVKFLREGSKVLKSRIVAKNLSCILQKASDWELSVDVKRKLVFPQDVVVTTLRPDMVLLSRGAKTIIVAELTVPWEERLATSHHLKKTKYQDLVDEAVLKGWHATFFPIEVGCRGFPAKSVRYFFQRVGLESKQLKQAIREIASMAELSSRWLWLMRAQSWNPPAGEG

SEQ ID NO: 26852 - protein, 1137 aa, Cephalopholis sonnerati
MYLSIYLSIYIYIYIYIYIYIYIYIYIYIYIYIDIYIYISQRRCNICGGLFKNERGVKIHQGKSKCKEQRQQRRAPELTQSDLSEFVKVVRQSVEEDQGREANHSAPDLLAQPTQSTGRVGEPESPKDFDRKPRLNLPPAADRRWAQLVEDLNTILDNTLKGDAAKKIKTMFEVVYQACHDTFGVKKGKTPRPIAGPSRRQRQIKELRGELKTLKKRWREANDEERAALDEISSETWKKLIQLRRAETTREKQREKHRKRKAFFNNPFQFTADLLGKPKGGTLTCTKEEMEDSVAAAHRDPSRGIPLGECPFQLPMLTPHTPFNMADFTMDEVRAVVIKARAGSAPGPSGITYKIYKCCPQLLKRLSKLLWTLWKKKLEPGLWTPAEGCFVPKELNSTRPDQFREISLLDVEGKIFWSIIAKRLTTYLLANEFIDSSVQKGGVPGYSGCLEHTAVISQLINEAKSNYNTHTVVWLDLAKAYPSVPHQLIRKALDHYRVPSEVVELVMSHMDALWMRFTVGNVTTKWQRLKKGIMAGYTISVALFIAAMNLLLKAGGTQCRGPKADDGTRHPACRAFMDDVTVMTPSIQGTQWILSALEKMATWSRLQFKPEKSRSLSILKGKLTGNIFSIRGSEIPTIQDRGIRCLGKHYDSSLKDSGNLTNTKVQLNTRLKAIEHSQLLRRFKVWCFQYGIIPRLQWPFLLYDLPMSQVEGMERLCSKFLRKWLGVPPSFSAINLYSKTSKLPLPVSSVVEEFKATKARAVSTLLLSEDGKVRHASKTIKCGRKWKPQQAVMEAESYWKNQEIVGVVRQGRLGLGHYGKKRWSRADARAKRGLMVQRIREAAEEDRQVKAIGLASQGRWTQWDQSQEQPLSWKELWQTDQGKLSFLLRSVTDLLPTPSNLKIWGTEEDPSCNQCGAASCTLNHILTGCPKVLAEGRYRWRHDKVLTEIAKWVEQQRVKANNKQTQPPEAITFVREGDKARKTITSAKNPPSTLQCASDWELSVDLKRKLVFPQDVAVTPLRPDMVLLSRSTKTIIVAELTVPWEERLATSHQLKKAKYQDLIDEAVLKGWHATIFPIEHGCRGFPAKSVRYFLQRVGLEPKQLKLATRDMAAAAESSSRWLWLKRAHSWNPSAGEA

SEQ ID NO: 26853 - protein, 981 aa, Ophraella communa
MNGKRSSKITEKPNVTVLLEKVNKALKKLTEESPVTNITELNHIIYATATVVSRKVVENRNINTTNKKENNPPAWKTRIEKKIEKLRKRLSILSERHQENPSYQFKKKLKNIKETLNIKNEGQVIKEIENLKQKVLAYAQRKQRYEKRYNFYHQNKLYNTNPKLFYRNIGKKRTEWKETPTKEEIINYWGKLWEQNAIHDKNAKWMNREKERTKKIPFMQYHNTTHIDIKNVLEKAANWKSGGPDKITNFWLKKLTALHPILANETNKLIKNPEIAPKWLTEGITYLIPKNNETKNPSNYRPITCLSVIYKMITSILSKQIYEHLVTNHLYSEEQKGCAKGSFGCKELLLLNKLIAEDCKIRKKNMSIAWIDYRKAFDSVPHSWIEQILKFYHLDPDIVDFCSQTMKKWQTRIILRSPNENIETEYINIKRGIFQGDSLSPLLFCMSLIPLSQELNNTKKGYKLINNNTISHLFYMDDLKLFAKDFNDLNSLIKTVKEFSKSIKMEFGLDKCATVTIKQGKPVKTHNFEPENDSDIQSLEPGNTYKYLGMEENGQIEHTKMKELLTKEYFRRTRKILQTELTVKNKFSAIGTLAVPVLEYSFGILDWKADEIKKIDTKTRKILTANRLLHPRADVDRLYVQRSDGGRGLRQIEGAYNMAYTTLESYISQGTSKLVTIIEALETQISQTKTIAHKAKKVKDEMHITDENGTRKSQKQKIKTKSNELLKDRWTNKPLHGQFPKTLKKPNVDKQHTLSFLKLGKLKGETEALITAAQDQAIRTRYYDKHILKIDTNTKCRLCNEGEEHINHIISGCPELAKHEYLERHNKVCGYIHWVLSKHYDIKCEENWYKHQPPDVITTNDITILYDQQIHTDRLIPANKPDIIIRNEKDKTCTIIEVAIPCDTNIISKEAEKILKYKNLAIEIERMWHVKVDVVPIVIGGLGTVSKNYIKNIKEVPGGLNPHILQQIAINGTAHIIRKVL

SEQ ID NO: 26854 - protein, 1196 aa, Ophraella communa
MNRRRSLSTAGNESVTKASSTPAARRESLPPSLLRASSSTVNKSPGLDPTTTTRRASLSTPSGPGPNDERVYRCPDCGKTYTSRSGRDKHRKVCGNSERLTCLFCPAKFNSNSGVRLHEQRTHAAEYSKQRESQVGRSEIEILQQMAEAEASLPPKALVRVELAKVTGLTRDQIRHRREKPEYKNMLQAARTRRRAAELLIPVTPTEQPTSSLPVLESSPPTGPPPPPSIPPTETNKPVDDGPTSSPTENISLVVSTGRKRPRAGDSPDPNDSGAGTPAKRFHKRPTVISAPPTTSVSSITSTEHSEVTSSENKHVVPDALRSYLLDLRSEHVLGGNPIQGLNELVSVGLSDTDDLADNLESWLSSVVGGRPNRNKNGAVQSATPAEGEPSHQAEPKRRKKRRRTARNYGMRETGSNGRSANYKKTQDLFFLSRASLVDKILAGKHLDEKDSLPTAETVHNLFGGILASDSPVDEEVIADPRPSTTGAMFVPFSVDDVSAAKANWANSAPGADGVTVKQVKSINDVLLSAFFSVVFMRGVRLERFARSRTILVYKKGDRRDPANYRPITIGSAVERLMHRALATRFKTMISLEANQRGFIDVDGTMANATIVDTYIRNRRALRKQYAVVALDVRKAFDSVSHHSIKRSLVRMGVEEGVIRYVATTLQQASTVIKVGLGNCPPITISRGVKQGDPLSPFLFNCVVDEFLCRVNGSNPTATIAEGVSVSAVGFADDIVLMADRPMDMVRLLDGAEAFFAGRGMQLNPAKCAAVCVERKNCGLVTRTVPLFKLGGTFIPVADEVNSFNYLGHSTNATGLLKPNLSNLPQWLGRVGRAALKPDQKLAVVKDFIIPKMMYGLQTPKITAQTLRSADRLIKKFIKSALHLNIHTPDPAIHCRMRDGGLGVLELRHHVPQVYLKRLTNLLDRQNDPVLSATLQSDCCRKQFDRLQQLAGNIPEHQLWREKLSATSTLKGLEQVSEDPASRAWIAQRPSGWTGRDYVKSIQLRTNNLPVAGIPSNPPDARRCRAGCDKTESLCHVLQNCPATHWERIHRHDEVVRKVSHYCKKKWQTEVEPHVRHRDGTLFKPDMVIHLSTCSVVCDIGVNWEGQQSLAVSHSAKRAVYDNAKFLEAAQHHWPGREIVVEPLVIGARGVWPRCNSVIEEYLKLPASLKSSCVHSVLKWGASIHASFGRRVWRRR

SEQ ID NO: 26855 - protein, 1196 aa, Ophraella communa
MNRRRSLSTAGNESVTKASSTPAARRESLPPSLLRASSSTVNKSPGLDPTTTTRRASLSTPSGPGPNDERVYRCPDCGKTYTSRSGRDKHRKVCGNSERLTCLFCPAKFNSNSGVRLHEQRTHAAEYSKQRESQVGRSEIEILQQMAEAEASLPPKALVRVELAKVTGLTRDQIRHRREKPEYKNMLQAARTRRRAAELLIPVTPTEQPTSSLPVLESSPPTGPPPPPSIPPTETNKPVDDGPTSSPTENISLVVSTGRKRPRAGDSPDPNDSGAGTPAKRFHKRPTVISAPPTTSVSSITSTEHSEVTSSENKHVVPDALRSYLLDLRSEHVLGGNPIQGLNELVSVGLSDTDDLADNLESWLSSVVGGRPNRNKNGAVQSATPAEGEPSHQAEPKRRKKRRRTARNYGMRETGSNGRSANYKKTQDLFFLSRASLVDKILAGKHLDEKDSLPTAETVHNLFGGILASDSPVDEEVIADPRPSTTGAMFVPFSVDDVSAAKANWANSAPGADGVTVKQVKSINDVLLSAFFSVVFMRGVRLERFARSRTILVYKKGDRRDPANYRPITIGSAVERLMHRALATRFKTMISLEANQRGFIDVDGTMANATIVDTYIRNRRALRKQYAVVALDVRKAFDSVSHHSIKRSLVRMGVEEGVIRYVATTLQQASTVIKVGLENCPPITISRGVKQGDPLSPFLFNCVVDEFLCRVNGSNPTATIAEGVSVSAVGFADDIVLMADRPMDMVRLLDGAEAFFAGRGMQLNPAKCAAVCVERKNCGLVTRTVPLFKLGGTFIPVADEVNSFNYLGHSTNATGLLKPNLSNLPQWLGRVGRAALKPDQKLAVVKDFIIPKMMYGLQTPKITAQTLRSADRLIKKFIKSALHLNIHTPDPAIHCRMRDGGLGVLELRHHVPQVYLKRLTNLLDRQNDPVLSATLQSDCCRKQFDRLQQLAGNIPEHQLWREKLSATSTLKGLEQVSEDPASRAWIAQRPSGWTGRDYVKSIQLRTNNLPVAGIPSNPPDARRCRAGCDKTESLCHVLQNCPATHWERIHRHDEVVRKVSHYCKKKWQTEVEPHVRHRDGTLFKPDMVIHLSTCSVVCDIGVNWEGQQSLAVSHSAKRAVYDNAKFLEAAQHHWPGREIVVEPLVIGARGVWPRCNSVIEEYLKLPASLKSSCVHSVLKWGASIHASFGRRVWRRR

SEQ ID NO: 26856 - protein, 1141 aa, Ophraella communa
MNRRRSLSTAGNESVTKASSTPAARRESLPPSLLRASSSTVNKSPGLDPTTTTRRASLSTPSGPGPNDERVYRCPDCGKTYTSRSGRDKHRKVCGNSERLTCLFCPAKFNSNSGVRLHEQRTHAAEYSKQRESQVGRSEIEILQQMAEAEASLPPKALVRVELAKVTGLTRDQIRHRREKPEYKNMLQAARTRRRAAELLIPVTPTEQPTSSLPVLESSPPTGPPPPPSIPPTETNKPVDDGPTSSPTENISLVVSTGRKRPRAGDSPDPNDSGAGTPAKRFHKRPTVISAPPTTSVSSITSTEHSEVTSSENKHVVPDALRSYLLDLRSEHVLGGNPIQGLNELVSVGLSDTDDLADNLESWLSSVVGGRPNRNKNGAVQSATPAEGEPSHQAEPKRRKKRRRTARNYGMRETGSNGRSANYKKTQDLFFLSRASLVDKILAGKHLDEKDSLPTAETVHNLFGGILASDSPVDEEVIADPRPSTTGAMFVPFSVDDVSAAKANWANSAPGADGVTVKQVKSINDVLLSAFFSVVFMRGVRLERFARSRTILVYKKGDRRDPANYRPITIGSAVERLMHRALATRFKTMISLEANQRGFIDVDGTMANATIVDTYIRNRRALRKQYAVVALDVRKAFDSVSHHSIKRSLVRMGVEEGVIRYVATTLQQASTVIKVGLENCPPITISRGVKQGDPLSPFLFNCVVDEFLCRVNGSNPTATIAEGVSVSAVGFADDIVLMADRPMDMVRLLDGAEAFFAGRGMQLNPAKCAAVCVERKNCGLVTRTVPLFKLGGTFIPVADEVNSFNYLGHSTNATGLLKPNLSNLPQWLGRVGRAALKPDQKLAVVKDFIIPKMMYGLQTPKITAQTLRSADRLIKKFIKSALHLNIHTPDPAIHCRMRDGGLGVLELRHHVPQVYLKRLTNLLDRQNDPVLSATLQSDCCRKQFDRLQQLAGNIPEHQLWREKLSATSTLKGLEQVSEDPASRAWIAQRPSGWTGRDYVKSIQLRTNNLPVAGIPSNPPDARRCRAGCDKTESLCHVLQNCPATHWERIHRHDEVVRKVSHYCKKKWQTEVEPHVRHRDGTLFKPDMVIHLSTCSVVCDIGVNWEGQQSLAVSHSAKRAVYDNAKFLEAAQTSLAGQGDCG

SEQ ID NO: 26857 - protein, 1042 aa, Phalangium opilio
MDRPPRGQAALAIFLYPVQGDNSCNQCANSHFIDHGSWRQHILSHGQTTLIYKCRSCGLEKPSIFGISSHQRWCKGTSDTNSSAPDLDTHPSTQTVDNTIQSQPVLSGFKCRFCDVTKPSKISRGRHEQSAHTKLYNLSQTTSGRTHWSKEEDFLLAQAELRRELRGQTVNDMLRNLQISNRTYDSMKSRRRHPDYHATLEQLREKAPTVVSPCSGREDTPIGELSESSSESTSHDSFEDVFESHLHIGSAEVRSMAQYILARDSNLMGLVKWLPKGNRRSKDTDVVNIKNKNQKETNTYRRDTRGTNSRAECERDPDPKSSGLSKKPRRRFAKRAKYKRFQTLFKSNRKKMAAEIFLNFDEIKLKPSLEDINNTYATLLSEPSRKDTEGVRKRLRSCDTYFPITLEEFRNGLRLCSSSTPGPDGVNLQHLKKSDPVLLTLLLNFCLYRKDIPAPLKESRTILLPKKGDLSMATNWRPITIAPILVRVFRGILARRLAKSIDLHPAQQQTGISGNTLMLDYAIAESRRQQRSLYLVSIDISKAFDSVSHVSITRALKAAGLEKEIIEYIDNSYKGSSTTISCAGIKTENVKVTNGVKQGDPLSPILFNAVMDELIRLLPPGVGFPVGEVLCNTLGFADDIVLLSSSKPGMDFLLATLSTFLQSRGLRANPVKCMSLSVVKRGKTKKMIRGANVVFELNGVNIPVMDCETVLNYLGLQYSAKGKRTINCGKIYGDVDKLMAAPLKPHQRIIMLPDFLIPNYIHQLSLAKLYKNDLTAIDNKIKSIVRHSLRLPHYSPVGFFYSAGRDGGLGLVSCATRAPVFSLYRIASLEHSSSPVFKQLLKTEFVEDLRSRLSSLLGLITPTSSGVKSHWSGRLYETVYGSGLSQGHDCPISNALLMNPLRVDDARRFCNLTKTRLNLLPCRGAPANAGNKSCRTGCGRVETLSHISQGCGLVNSSRINRHNKIVDLIHSGIRKNIKVFKENSFIVEKGVELKPDLVFVSKDAIVVADVTIPWETPRDLRYHFNKKVMKYDRPDLCETLSL

SEQ ID NO: 26858 - protein, 951 aa, Ampulex compressa
MLRQRRVPTIQSVDIGQDNETAPVPLSDSDSDDNWEDAVQELPLQSTLMEDQTAVNETGSVEQNNVIQWIEEMVCHAKSENNENPQGSTEVIKALNALLDQVVAQSGNIPQNEIDRIYEMAVSSFPSGNDKRKQAKRRGTGKRARRRYIYAKTQDLYNKNPGLLAKYVRKGVDFWIAGIQSLDAHDVREMYQKLWGTIPEIQPPQFGNHEPPIALSDTLTSITIEDVKGRIAKVKAGTAPGLDGIRKNQILTRGATNTLRKLFNLFMVTGKQPTAWGKNRTILIPKEGKDPAQISNYRPLTISSLLCRLYWGIIDTKLRKKIKGTARQKGFVAERGCYNNVHILNEILAHSKVKGGLVAVQLDVSKAFDTIPHQAIGPALRKKGMHERVVQLVCSAYKDVHTNIHCGRDTVPICLQRGVKQGDPLSPLLFNTVLEPLLLKLEEQLGYEIQTGNNISCLAFADDIFLVASNVSRARNLLQITEAYLTALGMAISAPKCASFQVVPTKDSYYIKDPGLRLNGGESVPFANAETRLTYLGINITPWIGIDLGDLRSELNSATRRIKQLALKPHQKTQLLSAYLIPHYVYRLVLGVAPVTYIRALDRDLRVTIKEILHLPPSVSNGILYAGKRDGGLGFPKLETICVSSSLKSGLTFLQSPDPAVQALAQVTGLENKLKSQAKAVRLAWPIISVKEIDKWKADMKKRELEEWGKCVAQGKAVANTKDDRIGNAWLYKPWLLKPGRFLTALRLRTDTAGTRVAMNRATPQLDTKCRKCKTLPETLAHVIGQCTYTKAARIRRHDSIVNLVMAEVHSKDKEAVVMKEPKIKINEGVLKPDLVVKSLGRVFVVDVTVRHEDGDYLDNGRREKIDKYSPLLPHIQKEMGASCGEVLPIVVGTRGTMPPHTIGALQRIGIHSKKTLLTMSLLALRASIEIYHSFIDYDVPLRARRIREPP

SEQ ID NO: 26859 - protein, 1133 aa, Lasioglossum lativentre
MLPDTILISTPFQTRSCTRCAQTGRGNIFFLRFADEIRHYQEAHQRCSLIFRCRDCHKEFNKRHAADCHRPRCPGVPPADEGQQCEFCTLRFTSQMGMTQHMRHRHPDERNEARRLAAEVPRGARNPRPNKTWTDEEERLLAELEERFKHERFVALAISRFLTTKTVKQIRDKRADIRRKMERQRIRLAAQTTSPVPAEEGTQDYSESDNEEWADASDYPPDTPLPEEVPVSGQDNSPVAAEIDEFDSWAQGVTDDALAGGIDEGNPPAVGEFLSRINDLLRVAKTAINNISQDDVDQVYDLLISSLPADGRCRRRAKRRGSGKRAYRRYLFAKTQDLYRKNPGLLAKYVRNGIDYWVQGELPLQVDDIRHMYEELWNTKPVIQLPDMGDVEESLPINDLLAPISNRDVKSRITRIKAGTAPGLDGIKKCQLLSRGTIASLRKLYNLLIVTSLQPSSWKKNRTVLIPKEGKDSSKCENYRPLTISSLLCRLYWGIIDTKLRRRIRCTPRQKGFTSEMGCYNNVHILSEILANSKVQGGLVAVQLDVAKAFDTVPHDVLGPALSRKGAPEHVVRLVSQAYKDVHTNIQYGGSTIPVRLQRGVKQGDPLSPLLFNLALEPLLLTLEKQPGYRISDEQSISCLAFADDLILVANDVPQAMNLLAQTESYLAALGMSISAPKCAAFQVVPVRGSFYLKDPELCFQGGERVPFANAETRIRYLGISFTPWTGIDLGDIRGEVRNAISRVKRLALKPHQKLNLLSTYLVPHYLYRLITGVASVTTLRLLDGDLRVAVKEILHLPACTANGLIYASKRNGGLGFPKLEITCISSSLKSGLLFLNNPDPAIQALARATGLESKLKSQAKASRINWPVMSVKQVDKWKADAKERELEQWGMCTAQGKAVHNFKDDRIGNAWLYNPTLLKPSRFLTALRLRTDTAGNRVAMNRATPLLDTSCRKCRAVPETLAHILGQCTITKADRIHRHNEIVDLVMAEIPKQNKEAVVLKEPTIELNGVFLKPDLVVKDQRRVFVVDVTVRHEDGNYLENGRREKIQKYSPILPTLLGKFGAVSGEVLPIVIGARGAIPPRSIVALQQLNINKRKTILTMSLLALRTSIEIYHKFIDYDAPRRNHRLREPP

SEQ ID NO: 26860 - protein, 947 aa, Lasioglossum albipes
MGMSQHMRHRHPLARNEARRLAAEVPRSSQSPHRNKTWTEEEERLLAELEERFKHERFIAKAISRVLTTKTAKQIRDKRADIRRKMERQRTNLAIQPASPVQAEDEEEVQDRSESDSEEWADATDQAPTSPPAEEVPASGQDGSPEAEEIGEFDSWTQGIIDSAIAGEVEGDNPPAVREFLARIEELLIVAKEAPNNISQDGVDQIYDLLISSLPANGQRRGRAKRRGSGKRAYRRYLFSKTQDLYKKNPGLLAKYVRNGIDYWVQGELPLQVDDIRLMYEQLWNTKPIIQLPDMGDPEESLPISDLLMAISDRDVKDRITRIKAGTAPGLDGIKKCQLLSNGMVVSLRKLYNLLMVTGLQPSSWRKNRTVLIPKEGKDSNRCENYRPLTISSLLCRIYWGIIDTKLRRRIRCTPRQKGFTSEMGCYNNVHILSEILANSKKQGGLVAVQLDVAKAFDTVPHDVLGPALLRKGAPEHVIRLVCQAYQDVHTNIQYGGSTIPVRLQRGVKQGDPLSPLLFNLALEPLLLTLEKQPGYRINEEQSISCLAFADDLILIASDVSQARNLLALTESYLAALGMSISAPKCAAFQVVPIRGSFYLKDPELSFQEGERVPFANAETRIRYLGISFTPWAGIDLGDIRGEVKNAIRRIKRLALKPHQKLSLLSTYLVPHYLYRLITGVAPVMTLRLLDGDLRMAVKDILHLPACTTNGIIYANKHNGGLGFPKLEIICVSSSLKSGLRFLNNPDPAIQALARATGLESKLKNQAKASRINWPIVSVMQVDKWKAGEKERELDLWGKCTAQGKAVYNFREDRIGNSWLYNPTLLKPSRFLTALRLRTDTAGNRVAMNRATPLLDTSCRKCRAVPETLAHILGQCTITKADRIRRHDEIVDLVMAEVPKRDREAVVVKEPTIKLNGAVLKPDLVVKYQTRVVVVDVTVRPTGVDAM

SEQ ID NO: 26861 - protein, 1164 aa, Lasioglossum morio
MRSLRPRRPRQGATDDDSAMSPATILILVPFQGRSCTVCAQAGRGNIYFLRLIDELQHYQEAHQRSSLIFRCRDCNKEFVKRHAADCHRPRCPGVPPAEEGQQCELCTARFASQSGMSQHMRHRHPAARNEARRLVAEIPRGSRNPRPNKAWTDEEEHLLAELEERFKHERFVAKAISGVLTTKTLKQIRDKRADIRRKAERQRIRLAALHVSPMQAEEEITEDHNESEGGSTQDHTESGSEEWADASEYLPASPPAEEAPENAQNNSPVTPEIGEFDTWAQGIIDDALGGETDEENSPAVNEFLSKMNDLLGIAKTALSNITQDDVDQVYDLLISSLPADSRRRGRAKRRGTGKRAYRRYLFAKTQDIYKKNPGLLAKYVRNNIDHWIQGELPLQVDDIRKMYEELWNTKPVIQLPDLGDLEESLPLCDLLAPILNREVKDRITKIKSGTAPGLDGIKKCQLLSRGTIVSLRKLYDLLIVTGLQPSSWKKNRTVLIPKEGKDSSKCENYRPLTISSLLCRLYWGIIDSKLRTRIRCTPRQKGFTSEMGCYNNVHILSEILANSKVQGGLVAVQLDVAKAFDTIPHDVLGPALHRKGAPEHVIRLVCQAYQDVHTNIQYGGSTIPVSLQRGVKQGDPLSPLLFNLALEPLLLMLEKQAGYKISEDQSISCLAFADDLILIASDVQQAKNLLNITESYLASLGMSISAPKCAAFQVVPTRGSFYLKDPELYFQGGDRVPFANAETRIRYLGITLTPWAGIDLGDIRGEMNNAINRVKRLALKPHQKLDVLSTYLVPHYLYRLITGVASIMTLRHLDGDLRAAVKDILHLPACTTNGLIYASKRNGGLGFPKLEIICISSSLKSGLLFLNNPDPAIQALARATGLENKLKSQAKASRINWPIASLKQVDKWKADAKERELDHWGKCTAQGKAIHNFKDDKIGNAWLYNPTLLRPSRFLTALRLRTDTAGNRVAMNRATPLLDTSCRKCRAVPETLAHILGQCTITKADRIRRHNEIVDLVMAEIPKRNKGAVVLKEPTIELNGAVLKPDLVVKDQRRVLVVDVTVRHEDGNYLVNGRQEKIDKYSPLLPTLKGKFDALSGEVLPIVIGARGAMPPRTIEALQQLNIKKRKPLLTMSLVALRTSIEIYHKFIDYDAPRRNRRLREPP

SEQ ID NO: 26862 - protein, 948 aa, Paramacrobiotus metropolitanus
MPQYSCSGCGKLLQGWGSHRRLCPRTLSQEPELIPVSTQQPPASAASAPMTVNPPADQAARRPTLPKERITRRVPHGARRAVAASFEKTIKNAVQHNDEQHWITLLSFASQVLAVPESPDGARKVSLATLMKNAVADFESEKKRPPGRKRKKPKKPKDPNSDLVRRVGVKIDDGDCSGAVRILMSTDAIAETSREVLDIMATKHPESPLPDRPRITAPAPLVTADEVRHAILSFRRGSAAGPDGLLPQHLLDMLGKVQDDVSASFCKSLAQLLDIIVQGNIPDSVRPYFFGAKLIALRKKDGGLRPIAVGNTLRRLTAKVICRRVKERSTAALQPSQLGFGINGGAEAIVHAAREFLSSDPDQVKILLKIDLKNAFNCISRATVMEVASVHLPEYANYLYACYGHYSELYLDDEILSSQSGIHQGDPLGPLLFSLGILPLTSALKAAFNAWFLDDGTLGGCVETVAADFQTVIDTAHAAGLSVNMSKCEIFVCGGTCDEREAAVKTFLERFPTVSVAAPENLCLLGAPLMKNGITSAIQQKTEVMRLIANRLDLLPKHQAYFLLKCSLSAPKVIHLLRCCPTFEARDSLIEFDDVLRQSLQSICNVRMDTSAWRQASLPVRCGGLGIRRVEELSLPANLASIHATQGLVCRLLPHSAGVDVTDHVALWRYLSDDAPPPLSESRHLQRAWDTPYCLTEQATMLHDALDPASKARLLAVSTPESGAWTHALPSSSIGNLLDDETFRIAVAIRLGAPASSDHQCKCGSDVAADGHHGLSCKFSAGRRSRHDCINDILRRALGSAGIPARTEPRGMHHDNETRPDGITTFPWTRGLCLAWDVTCVDTVARSYLDQTSVKAGAAADHAEAEKAKKYSFLLGRYEFAAVGFETFGSFGTSAKRFVNEIGKRISLQTGEIRSLEFLKQNISLAIQRGNAASVFGTVENVVSFNRN

SEQ ID NO: 26863 - protein, 949 aa, Paramacrobiotus metropolitanus
MPQFSCSGCGKLLQGWGTHRRLCPRTLSQEPELIPVSTQQPPTPAPSAPLTVNPAVDQAARRPALVKERTTRRVPHGARRAVAASFEKAIKNAVQHNDEQHWITLLSFASQVLAVPESPDGARKVSLATLIKQAVADYESGKKRPLPARKRKKSRKPKDFDGDLVRRVGIKIDDGDCSGAVRILMSTDAIAETSREVLDIMAAKHPESPLPDRPRVTAPAPSVTADEVRQAILSFRRGSAAGPDGLLPQHLLDMMGKVQDDVSASFCKSLALLLDIIIQGSIPDSVRPYFFGAKLIALRKKDGGLRPIAVGNTLRRLTAKVICRRVKERSTAALQPSQLGFGINGGAEAIVHSAREFLSSDPDKVKVLLKIDLKNAFNCISRATVMEVASVHLPEYANYLYACYGHYSELYLDDEILSSQSGIHQGDPLGPLLFSLGILPFTSALKAMFNAWFLDDGTLGGCVETVAADFQTVIDTAHAAGLSVNMSKCEIFVCGGTCDEREAAVKTFLDRFPTVSVAAPENLCLLGAPLMKNGIKSAIQQKTEVMRLIANRLDLLPEHQAYFLLKCSLSAPKVIHFLRCCPTFEARDSLSEFDDVLRQSLQSICNVRMDTSAWRQASLPVRCGGLGIRRVEELSLPAYLASIHATQGLVCRLLPHSASVDVTDNVALWRYLSDDASPPLPESRHLQRAWDTPYCLVEQAAMLHEASDGTSKARLLAVSTPESGAWTHALPSSSLGNLLDDESFRIAVAIRLGAPASSDHQCRCGSDVAADGHHGLSCKYSAGRRARHDCINDILRRALGSAGIPARTEPRGMHHENETRPDGITTFPWTRGLCLAWDVTCVDTVARSYLDQTSVKAGAAADHAEAEKAKKYSFLLGRYEFTAVGFETFGSFGTSAKRFVNEIGKRISQQTGEIRSLEFLKQNISLAIQRGNAASVIGTVENVVLFNRN

SEQ ID NO: 26864 - protein, 930 aa, Cardiocondyla obscurior
METTRSIEAIKGIRKRREYKEAVIKYREEIQNNISEETDIIQEREYVQNGNQNLEKEPNHISDENKSLPLEWLNKKIDDIIPEMNGGIWIRSAIRRLQEGQSPWHYINQWWLNTFPDLGTGKTERTKRNIREQKLSKRKMRRKEYKAMQNLWRNNMSKAARKVLDGDADGLPHPSLEDQDKYWRPIFERKLSDLIEEEENIEGGPEVQIWTAITERDVTSIKLPANSAPGPDGMTVKRWMTEVPAIIRAAVFNIIMTTGEMPKKFSEARTILIHKTGDLMKPENYRPISVASVVLRQYHKILATRLMKQEILDNRQRGFISADGTAENTAILAAILTEARTKRNPVHVVTLDVRKAFDTVSHKNMYIALRKKAIPNNMIKYIQTLYNSATLKLQVDKNFSKDILPGSGVRQGDPLSPLLFNIVMNDILAAVPNRVGYVLGECKINALAFADDLILLGSTKEGTQLSIDKVREALANYGLRLAPDKCAAFSIVPAGKLKKSKILSETQFKIGNQNIPQAGTMKTTKYLGVCFSCDGPQYSSKDIGPLLEKLKRAPLKPQQRIKILRTYLIPRYIHGLVLGKVNHATIRKMDRQVRAEVRNWLGLPGDVPNAFFHAPTKQGGLGILSFESAIPQLTLARLDKLNTSNWKPARQAALSEWANARRKWCRLARKKNEDWETLLHRAVDGYELREAGKVKASTDWLNDPMVFIPPSDWLQYLKVWTNALPSRIRTTRGIRRYNEDVKCRAGCGVQETTAHIIQQCFRTHGGRIMRHDAVAATVASELSTAGYKVRREHVFSTTEGARKPDIIAAKGDKGYIIDVQIVTGAKPLSENHTRKRNYYANNKELCNAISSILQVQKDNIDTTTVTLTWRGIWAKESAEAMTRLGISRLTQKGITTRVLKGSYMNFKRFNQMTTTYMGRERLRMTGWGPP

SEQ ID NO: 26865 - protein, 1002 aa, Cardiocondyla obscurior
MEYVCPHCMRSFNSKIGLGLHKKSQHREEYNEEIQLARTKPRWNDEEIEMMAYEEAQISSNIIAINKHLKIKMETTRSIEAIKGIRKRREYKEAVIKYREEIQNNISEETDIIQEREYVQNGNQNLEKEPNHISDENKSLPLEWLNKKIDDIIPEMNGGIWIRSAIRRLQEGQSPWHYINQWWLNTFPDLGTGKTERTKRNIREQKLSKRKMRRKEYKAMQNLWRNNMSKAARKVLDGDADGLPHPSLEDQDKYWRPIFERKLSDLIEEEENIEGGPEVQIWTAITERDVTSIKLPANSAPGPDGMTVKRWMTEVPAIIRAAVFNIIMTTGEMPKKFSEARTILIHKTGDLMKPENYRPISVASVVLRQYHKILATRLMKQEILDNRQRGFISADGTAENTAILAAILTEARTKRNPVHVVTLDVRKAFDTVSHKNMYIALRKKAIPNNMIKYIQTLYNSATLKLQVDKNFSKDILPGSGVRQGDPLSPLLFNIVMNDILAAVPNRVGYVLGECKINALAFADDLILLGSTKEGTQLSIDKVREALANYGLRLAPDKCAAFSIVPAGKLKKSKILSETQFKIGNQNIPQAGTMKTTKYLGVCFSCDGPQYSSKDIGPLLEKLKRAPLKPQQRIKILRTYLIPRYIHGLVLGKVNHATIRKMDRQVRAEVRNWLGLPGDVPNAFFHAPTKQGGLGILSFESAIPQLTLARLDKLNTSNWKPARQAALSEWANARRKWCRLARKKNEDWETLLHRAVDGYELREAGKVKASTDWLNDPMVFIPPSDWLQYLKVWTNALPSRIRTTRGIRRYNEDVKCRAGCGVQETTAHIIQQCFRTHGGRIMRHDAVAATVASELSTAGYKVRREHVFSTTEGARKPDIIAAKGDKGYIIDVQIVTGAKPLSENHTRKRNYYANNKELCNAISSILQVQKDNIDTTTVTLTWRGIWAKESAEAMTRLGISRLTQKGITTRVLKGSYMNFKRFNQMTTTYMGRERLRMTGWGPP

SEQ ID NO: 26866 - protein, 1027 aa, Zanna intricata
MAASRSTVRLDLLTADVIHRIPWEPCTCQQCLSWFERPSDIVRHYKLLHPDVRVGFSCAKCDRTFSGPHATLCHYSKCKGVIPSDLPFRCGVCDRCFATKSGMSQHKRHMHPEVRLAERRSLGTVTDRPVRRSSRRETLPTADDNYVTLDIPTPVDMIALPVQQSPSIVTDHLNQREDIRREWLSKDHLHPLAEELATKWMLEDPDDCWIDMFVEKLTSMLLTDERKRKPTIVMPRRTSRRLRRTLKRRRFANTQELFRRCPTKLGEMVREDRLGDLLPDNEVHPPIGPVRDTFQRLWGTAGPCGLHLPMGVQNTCVAAVTNTEVRTRIKRSKPNGAPGPDGVRKETIVGIPGIFDLLAGLYNLLLYSGYYPVSWKQHSTTLIPKPGKDLSAVNGWRPITVGSLLARVFSGILDGRLRSSIQLCGAQRGFSSGNGCFTNVRLMNEILSAGKNSSLHAAILDTSKAFDSVSHNAIMTVLAANGVNGLLSGIIREMYCDIETTFRNCNGLRMSIKRGVKQGDPLSPLLFNTVLDPLLRQLQTSSGAFRIGDTVIPVLAFADDLVLLFEAALQHGLNTTMSYLQKVGLHLSPDKCGVLNVCRRGKSWVDTPMEIFINNAPVAQISASQEVRYLGAYFSVAEGVSCSRSINEVILSAERVGRLALKPRQKLDLLCRYVLPGYYHLFTSDLPSMAKLNDLDKNIRRIEKEFFHLPTSTSNGLLYCRRLDGGLGVPKMLDLVRAAHLKAFCVLATTSDEVVRELLVDKQADACRKIAENMNLPWPTTPLAIMTWKRNRKINEFTDWSHQPVQGKGISCFKGNRFSNSWLRKSTLYAGEEIDLLKMRSDVFPTRNYLHRIDPDVSKTCRCHEKHESLGHILGECPAGRGARIARHDAVVELVQQKAQQTGLTCAREQLFRTEADTLRPDLVVKTPGRALIVDVTVRHEQGTSLKEAAREKKEKYTKIMDAVTTSLGVPEAIVLPLVFGARGGLPSDTERNLKILGLGNPDEIEGIITNILRSSVYIARSHLDYK

SEQ ID NO: 26867 - protein, 1028 aa, Zanna intricata
MAADHPVSQLGLLSIESTYVIPWEPCKCHHCFSWFERPGDLVRHHRLLHVGVCMGFSCAMCNRTFSGPHAALCHYSKCRGIIPRELPFRCEVCERCFASKSGVSQHKRHVHPAVRLAERRDSSLMDRVSQRLGGREIRPLTRASCVLSSASLPLDECPVPVHLGSPSMMSQHDQRLHIKREWLSKDHIHPLARELAETWALSDPDNYWIDDFVGRMTSLLLTSGKRDKLTVMPRRSSKASRRSLKRRRYANTQQLFRRCPTKLGEMVRNDRLGDLLPDNMPHPPSGPIKDAFEKLWGTEGPCDLHFPPTIQESELTPISSSEVKARVKRSKPNGAPGPDGIKKGTISGIPGIFDLLAGLYNLIIYSGHYPVSWKKHSTTLIPKPGKDLATAGGWRPITVGSLLARILSGVIDSRIRASVHLSEEQRGFTSGNGCFTNIRLMDAALAAGKKSSLHVAILDVSKAFDSVSHNAILEVLTATGVNGALSDIVRDMYSNIETSFKNCNGLCMSIRRGVKQGDPLSPLLFNMVLDPLIRRLRSLPGAFRIGDAAIPVLAFADDLLLLFSDERSLQHGLDETSAYLHRVGLHLSPDKCGVLNVQRHGKTWVDAPMDILIDNVPVHQFSATEEIKYLGAYFTVAEGVSCSRGIKDVILSAERIGRLALKPRQKLELLCRYVLPGYYHLFTSDLPSLKKLSDVDRDIRRVVKEFYHLPSGISNGLLYCRNIDGGLGVPRIQDLVRAAHLKAYCTLVTSADNTVKEVLVDGQADTCKRLAEDMGLTWPTTLLAIANWKQKQKLDEFTTWSLQPVQGKGVACFKGNGPGNCWLRKTILHAGEEIDLLKMRSDVFPTKNYHHRIDSEVSKMCRRCHDKEESLGHVIGECPAGRGARIARHNKVVDLVQEKAQASGLQCAREQLFRTETEALRPDLVIKTPGRALIVDVTVRYEQGASLKEASREKKEKYMKIASAVMEDMGVDEVSVLPLVFGARGGLPSETERNLKTLGLGGREDIENIMMDLLRSTIYIARSHLDCK

SEQ ID NO: 26868 - protein, 975 aa, Zanna intricata
MGFSCAMCNRTFSGPHAALCHYSKCRGVIPMELPFRCEICDRCFATKSGLSQHKRHVHPAVRLMERRDSIQTERVPQRLNGRETRPLTRASHVSSSTSLSLSECPIPVHSGSQSLIDHHDQRLNIKREWLSKDHKHPLAKELAETWTLSDPEDCWIDNFVERITSMLLTSGKENGFTVLPKRSPRTSRRSLKRKRYANTQQLFQRCPAKLGEMVRNDRLGDLIPNNVPHPPSGPIKTAFEELWGTEGPCNLHLLPTTQESGLTAITSSEVKARVKRSKPNGAPGPDGVKKGVISGIPGIFDLLAGLYNLIIYSGHYPISWKRHSTTLIPKPGKDLATAGGWRPITVGSLLARVMSGIIDGKIRTSIRLCDEQRGFTSGNGCFTNIRLMDEALTAGKKSSLHVAILDVSKAFDSVSHDAIIEILTAYGVNRTLSDVIRDMYTNIETSFRNCNGMHMFIKRGVKQGDPLSPLLFNMVLDPLLRRLRSLPGAFRIGDAAIPVLAFADDLVLLFSDERSLQLGLDETSAYLHKVGLHLSPDKCGVFNVRRQGKTWVDTPMEILINNSPVRQFSAVDEIKYLGAYFTVAEGVSCDKGMKEIIMSAERVGRLALKPRQKLELLCRYVLPGFYHLFTSDLPSLRRLGNLDRDIRRIVKDFFHLPTGISNGLLYCRKIDGGLGVPKMQNLVRAAHLKAYCALGMSTDNTVREILVDGQVDSCRRLAEDMGLTWPTTLHAIANWKQQQRLDEFTSWSLQPVQGKGIACFKGNGPGNCWLRKTVLHAGEEIDLLKMRSDVFPTKNYHHRIDSEVSKICRRCHNQDESLGHILGECPAGRGARIARHNKVVDLIQEKAQETGLLCAREQLFRTEAEALRPDLVIKTPGRALIVDVTVRYEQGASLKEASREKKEKYTRITDAVMKDMDVKEALVLPLVFGARGGLPSETERNLKTLGLGGREDIENIMVDLLRSTIYIARSHLDWK

SEQ ID NO: 26869 - protein, 1033 aa, Zanna intricata
MDASRSIPRLGLLAVDVTYQIPWEPCACQQCLSWFERPGDLARHCKLLHSDVRVGFSCAMCDRTFGGPHAALCHYSKCKGTIPTELPFRCEVCGRCFNTKSGVSQHKRHMHPEVRLTERRGVTTVGVVTDRPRRSLRGRETLPLAVDDDVVSGVSPSSSTFIAPIQFDSIITPDQSEQRENIKVEWLSKAHVHPLAVELAEKWMVEDPSPYWIDAFIKKLTSMLLIDDKQRKSTSTVSRRTPRQLRRSLKRKRFANTQEIFRRCPTKLGEMVRENRLGDLLPDNELRPPVSPVKDAFQQLWGVEGPCDLRLPMVDRSTCMTVITTAEVRTRVRRSKPNGAPGPDGIRKEAIVGVSGIFDLLAGLYNLLVYSGYYPVAWKQHSTTLIPKPDKDLTMVNGWRPITVGSLLARIFSGILDGRLRSSVQLCEAQRGFVNGNGCFTNVRLMNEALQAGKTSSLYAAILDISKAFDSVSHGAIMSVLTANGIDNMLSELIRKMYCDIETTFKNCGGIRMPIKRGVKQGDPLSPLLFNMVLDPLLRKLHTLPGAFRIGDAVIPVLAFADDLVLLFNNEATLQHGLNVTTTYLKQVGLLLSIDKCRVLNVYQKGKSWVDAPMKISIDNVFIDQITATQQVRYLGAYFSVAEGVSCNKGIMEITLAAERVSRLALKPRQKLDLLCHYVLPGYFHLFISDLPSMNKLNELDNTIRRIVKGFYHLPNSTSNGLLYCRRLDGGLGVPRLLDLIRAAHLKAFCILDTTSDETVRKILVDRQTTTCRKVAETMNLPWPTTLLAINNWKRERKLCEFTEWSHQPLQGKGITCFKDNKFSNSWIRKPSLHAGEEIDLLKMRSDVFPTRNYLHRVDSDVSKVCRRCKEKDESLGHILGECPAGRGARIARHDKIVDLVQERAQRTGLTCAREQLYRTETEALRPDLVIQTPGRALIVDVTVRYEQGTSLRDAAREKREKYLKIVDSVKTSMGVSDAIVLPLVFGARGGLPSATEKNLKTLGLGNRFEIEEIITDLLRGSIYIARSHLDCR

SEQ ID NO: 26870 - protein, 910 aa, Stegodyphus mimosarum
MDPAAQWKDFLVLLDDIYKTTAITVRLPPASDAPPSRRTAPPPCNDPKFLQKLYRRNRRRAIRLLTEGESNKCAISRQVLQDFFIGSQKRTPIDASLFTTGETPPPALDLTPFSASGVAKRLYSFENSAPGPDRLTYNHWKSVDPECKVLTKIFNFCLQARRIPEDWKATRTLLLYKKGDPSAPENWRPICLSTTIAKLFCGCLARRFTDWLMCNEILSTCQKGFLPFDGVFENNYVVQQRIQLARSTKSDLCLASLDLSNAFGSLPHEAIFTALETAGAGAPFIDLVRDLYTDSSTCIFTQEGLTDPIFFECGVRQGCPLSGLLFNLTIDPILRIIQAQSPTHRVLAYADDILLLATSPEELQVQLDLTVSLTKKIGLSLNPRKCFALHLSGRQPIGTRDSTFRINGARIRTLCDGEEGEFLGKPIGFQLPPDSNALNTYLQKCDQLLQSKLAPWQRLDALKAFAFPSMNFDMRMARLKKTDWAKIDAHIRPLIKKTLNLPSEASNDYLYGDNKAACFGLPLAAENSDIARIYGAFKLLTSRDPAIQLLAWEDLKCLVSRRTSNNATPQVLAAFLSGSDEDFLRTTSNPISSIWTAARSASRRLRISWEISDNYNVSIIHEGTTLSQGKRRLIFKTLRTAFKKARTAKLLSYPNQGKAMECAAAANASSHFFSNGSFTRFADWRFVHRARLNLVPLNGARRSNNGPKGCRRCNNNLETLPHVLCHCMRYSRTYQARHNAVVERIKKAAAGRWAVLTENQILQGHALRSDLILVRDDSCLVLDITVPFENRRAAFDVARREKIEKYRPLVNTLRRNYSDVRVDAIIVGALGSWDPNNDRIVNRLCSRKYASLMRKLIVSETISYSRDIYVEHLTNVPQVRQQRHAPTAETPRPSNNEQPSTTIETSEGNE

SEQ ID NO: 26871 - protein, 1493 aa, Stegodyphus dumicola
MTAATPGGVSYAAMVSAGLRVPAAEVGEASPRRLPISGMHAAGTGGLPLPLKTARPEDPGSSIPVKRHVAAFVTPTGPPITNTNHIRVLVDKIQARHSSASSPSDAARTTSSQMHALSSSTPASQPTSSCSPFMGTSPFVCETCGMAFKRSGKLRHHLKLHIKYGPPLPRPPPAQTSPSPVASHTRSKTTVTPFLAPNILASSSSMDLGSRSPPTAPEIVVPTTTTSPSTSSAPALPAHSPADEVSNINPACSPDTATGPSSPANDSVISLEPLSPLPASPSATAVNDSPPVHASLQTSRVESPAQPSSPVSQAPRSAPSDEVTDASSHQFPLTTCRRDTVVHLVFPVSDTLHCTEEHCIRTFHAKSWSQSRHSLCRHLAVAHDLTISHTENWCSHCHQRIMSRVSRHACFQERPVLIASGITHRWQCMSCDFSCQTRGGYLNHQARHKRERLRVNVPAVPTPRPRRRRERTTRHVTFTTDSSPTLPQDDSAPLPTSPVPSTSNSTPDLPAVPIPSATHSPMDIDGSSGTPGNHRTSTDREDTLSPSPISATSDLDHGAPDFSEDIPALPVEPQPSSPLDHFHERLDAFSAVDLSAHWDDVLSVLDDIYKTAAEVVRLPPPTDTPTGLRNSPPPCNDPKFIQKLYKRNRRRAVRLLTEGDSARCSISRQDLQDYFVALQRVGSIDSSFYSARDPPPDPLDLSPFTPSEVASRLHAFENSSPGHDRLTYNHWRSVDPECTILAKIFNICLRAKRIPQSWKDTRTILLFKKGDPLAPENWRPICLSVTIFKLFCGCLARRFTNWILNNDVLSPAQKGFLPFDGVFENNFIVQQRIQLARTSKSDLCLASLDIGNAFGALPHAAIFQSLDSAGVGADFIDTIRDLYDNSSTRIITQDGLTDPIFIESGVRQGCPLSGLLFNVAIDPILRVVQGQAQAHRILAYADDILLLASIPQELQVQLDMVHALSAKIGLALNPRKCFSLHLSGSRPIGTRDTPFFLDGVRLHALADGEEGVFLGKPIGFQLPPDANALNAYIEKCKVLLESRLAPWHRLDALKSFAFPSMNFDMRMARLKKTDWAKLDDFIRPLLKQTLNLPPEAANEYLFGDSKMACLGLPLAAENSDIARIDGAFKLLTSRDPSTQLLAWDDLTRLVSKRISNTPSPQDLAAFLSGSNDGILATSSNPISSIWSAARSASRRLNVTWEVAANNSVSLIHNGTMISQGKRHLVFRTLRTALKKARTTKLLSYPNQGKAIECAAAAKTSSHFFRDGSFTRFADWRFVHRARLNLVPLNGVRRSTNGTRGCRRYNYHLETLPHVICHCMRYSRLFQARHNAVVERIKKAAAGRWVVLSENQVLRGHALRPDLILVRDDFCLVLDITIPFDNRQSAFDSARREKIEKYRPLVNTLRRSYSDVRVDAIVVGALGSWDPNNDRVVHSLCSRRYASLMRKLIVSDTISFSRDVYVEHLTGVPQMRQQRQASAIQWTEARDHFTRTEA

SEQ ID NO: 26872 - protein, 1011 aa, Ophiothrix spiculata
MKTCVYSIIVFLATDFTMASHLFHTPCSSQRQVIITHVKLFSMIMIQLTLLTATSSALRFQFPTLSTDNWSQYNSELKTMLGPLHFKIANSIVTPKEGGELFIKDITDYLCTKDEFLKKDENADYIENQSKSLEKARRLKNSLRKKAFCKNGTESDRKEFKKAVKAHNYLKKLSERRKSNRNALHQESMYFKSFWKFAGKCSSGTLDHKNELPTFTKDHADIYYPSKYSFPNPLDLTRLTWFPYLNTSDCNNQFDTSPIRPKDIRAIVNKKNATSAPGPDGIMYGIIKKLPSTHLILSTLFSKLFDSADPPESWCASSVTLIYKNGDTSKPENFRMIALTSCIAKIYHQILAERMANYLTTNGLIDSETQKAFLRGINGCAEHTTVMKELIAHSKANKRTVHITFFDLVDAFGSVDHALIFYTLQRNGIPEPVIKYIKNLSSNQFKFRRGVFQGDPLSPIIFLAVFNPIIQHLKKSECKYGYNLNGTKYITLPFADDFCLITTNKRTHQRIINDIVCITSTMNLALKPVKCKSLSICSGKPEVIEFAIKDNVLKSVKDAPEKFLGVLITLYNKTSDHYEKVKTKLLSMIENINSSKIRNEFKLRVYIEYSVPSLRYLLMTHELTDTQLECLDHIHTNAIKSWLGMKPTGPTPAIIFGPDGLNFKRISDIYLEGHTLLFGRSQVLADTRVKNALESKLERETKWTRKMARNGIRVSENIFKLASNKTTSLKWSLIQKTIKGIITSNRTDYWREYIKPLIQQGKMLEFISAEQSDLTWRSIIYDLPRGVLSFAVRSAIDFLPTLANLKRWGKRTNSYCSLCKNHESLLHVLNNCSVALSQGRYTWRHDSILKYVVNSLLAHSKENDIKVFADIKGMTTSGSTIPPNILTTSQRPDIFLFNATTKTAMIAELTVPFEQNINKAHNLKEDRYASIVHDLERNGIRTSLVCFEIGSRGLITKENTTRLKNIFKFAKAKCTKNYIRDISKVALLCSYGIWNGRKAPVWDNIDLIQIS

SEQ ID NO: 26873 - protein, 975 aa, Tribolium castaneum
MMARLEAGAIQQGGVRFMNQFLVPRMPGRTLEAVKGKRRDATYKALVQRFLQAPQINLPELRDGDAPRQPDPQRENPPEPPAFDGAIRGAVADLVGGVDWQRLGFQGDRLCDIARRACDGEDVSGQLLGWLRDVFPVKRVSTRGDQSDLDVDGASVSRRTARRREYARVQELYRKDPKACLARILGDRREGANRAPNRDPAFIDFWRGVFSEASAEVEGWAEEVSDHGELARRVWDPISVEEVGRSRVRNGAAPGPDGIAVSVWNKLPPEAAALLFNVLLLGRCLPAELTRTRTVFIPKTDAPRTPADYRPISIASVVARHFHRVLSARVQRIPDLFTKYQRGFLSGVDGIADNLSVLDTMLTMSRRCCKHLHLAALDVSKAFDTVSHFAIVRACEQAGLPQPFVEYVRSIYGSAETVLEEGGRRHFVQVRRGVRQGDPLSPLLFNLVLDRALKRLSTDVGFRLTDATKVTALAFADDVVLCATTAKGLQTNLDVLEAELRLAGLLLNPNKCQALSLVASGRDHKVKLVTKPTFRVGQNTIHQVDASSIWKYLGIQFRGSGMCGCGSEGVAAGLKRITCAPLKPQQRMHLLRVFFLPKFYHAWTFGRLNAGVLRRLDVVVRTYVRTWLRFPHDIPVGYFHAPTKSGGLGIPQLSRFIPFLRLKRFDRLGRSAVDYVRECAFTDIADRKIRWCRERLSGIVDQVAGGRDALDAYWTAQLHQSVDGRALRESASVASSTQWLRCSTRAIPASDWLHYTAVHIGALPSRVRTSRGRRGGQDVSCRGGCLLDETPAHCIQVCHRTHGGRVLRHDAIAKRISVDLMELGWIVTREVSFRTTAGVFRPDMVAVKEGVTVILDVQIVSPAPTLDEAHRRKVAKYRDRADLARYLVEAAVARGRAPPANIRFASATISWRGVWSAESVGSLRELGLSARHFNRYTTMALCGSWRNWVRFNASTASRMGRGRGDASPRRHENQQ

SEQ ID NO: 26874 - protein, 1284 aa, Rhabditophanes sp.
MAKNWKDEELQMAKEIAGAVKKRSAGEYEEIKNLHFPNRTVASVKKKILELQGEKVEASGGVRKKFATWSLDESRKLQTMFMAGEVTKSKTARIEEIKHEFPGRTVKSMQNHLRDNYYATYNGQPEVTKTVAVTTKHNGPTPKGVTSMTTTRTMRSQTREHSTAPTIPATTQTRTRAAKTATHVSSQLRTTRSQSRELSMAPTATPPPSTLRTIAEEDAPIDSTTPTTRISLAAHNEPTSAEDMGPSENVGGKSVVIKEFNRFFNMVLAVNGTKPKRLLRFRINPEHPVIKVVDRIVEKKLSELEKSVKNSNRKHELSKMAILAGAYTLRKRIAGRVGALKVMPKYLATEKKIARLEKRSKTAKVIQNGGFKPTKAINEEINEMRKLRMAPNQYIQSCKDRVDLLREELTKQKERHQTNKTRFKFENQPSMKALKGRNADTELNFEEAEEVYKKLYRKKPDTLESPQFDEWLEMFSNEQLTTLPMELSEERLKKMVAECLKTSALWKAPGHDQVPNFAYKTLKSAKKYLTGWIGRNLKNEYELSRKDVKGLCHLIYKDGDANDVLNYRPISLLNTDYKLLTKVLTVIIKENLPANLIPEEQMARENTWGTLHGLLLDKAYSQDARFQKKSHVSAWYDFSKAFDSISHAQIAKLVDALNIDPAIKKMAKSMMGRWNIELIRKDLSTPKEIDIQQGVYQGDSWSPLIFILITAGIIHKVKTNEELGRATGGYRHRIIAFMDDIKVHSPNMEGLNMMTKMIEGGAAELGLKLNRRKCGHFARNRVEAEGNGDGDEESQFLPEVKRGYKYLGIIQLERDDAEGNFEKMSAKYLERTQTILESCLTINQKRRLYNTAVIPAGIYVTGNLFPEERVASTLLRCRRIDLEVRKMAVVHNIKTRPTANARFYLPNKYGGLAFRSLEVETCIQYIRRYVYLMSKDEVKEAKRIYMAMDKKGWRNPISDFKHVAKKYGLTDLKLEKKKDIDFRAVCKDLIEEVKKADLEAKKDDWSKAMTYPKLVLSLEDTISFPAMKSVNLDSSKLSLINASAEEQVFFKGKKMSTGVGTDGKCRFGCGVDETNYHVTSACRRSALITRHDMVVWNILKLLRRKFGPPEKGPPKSLQVGQAALDEDYANFKIRAGAPMLMDKKIKSNKPDIVIFRKEPKLAVVLEVSIPALKNYNLQKDIKLTKYTKNSVLDINMDNVRTVTRDQNFCEILEATHHCRALFCPVIIGTYGEFLESENAGLYKIFGELGVTEKEVERLKETLCLSVITSTTRMILKHLKAPETD

SEQ ID NO: 26875 - protein, 1012 aa, Periplaneta americana
MNASESIKCLLCDNPRTSQEYSLILCAECKCWLHGSCVYLCSDEVKVLGESNSPWLCPSCSSKGGTHNISAPNYVELVSCPICTDSDAKCYKGLKGLRIHWARAHPNEPPDDLLLNSENTSFEFFHQKIANCKLNTRVLRRIPKGARNFAAEKLTQLIDKCIFENSEECWQELLLFAYIALRIPVRSKKKSDKSLVSKIKENINDFTLEIPPRKNKSTLSRSRIVEAKVADSDIKGVVRILSSDSGVARASRVTHEALVQKHPPPSRPLAFPDPPTTDEVCLSVSQDLVLQGIKNIPNGSASGIDGIRPQHLKDLISKSAGDSGRRLLNAITRLCNLMLAGKVNPEICPLLYGAPLIAIEKKNGGIGAIAVGNTFRRLSAKLACTSVKEKVGQHLRPRQLGFGTAKGCEAITHSVRSFLNQNEGSQNVLLKIDFRNAFNCLERDTMLELVKSKIPQLYAFLWQAYRNPSNLYYNSDIISSQTEIQQGVPIGPLLFSLTLNSVIIHLNSTLNLFYLDDGTLGGYPDMVLSDLEKLIDSCRSIGLEINPDKCELYFCSTQDDTAVSAFNNIAPGIKIVSRSNLTLLGSPIFLPAVESSMREKLEIMKQLFVGLQSLSTHTAYFLLKNCYLIPKLTYFLRTTPLWLFPSLLQETDDLLRNCLESILNLRLEDNNWILATLPIAFGGIGILNVSDVCLPAFLASAYGVLDFVKSILSINGDEIGICYVNEALEKWFSITGNNNLPASRDIQKQWDHIHVSDIYQALLASSSSEIDQARYHAIRQKESGSWLETIPSSNIGTLMDNISFKIAVALRLGCKICFPHKCLCGATVDPYGHHGLSCPKNTGRFARHFQLNDIIKRALVSAGFPSILEPIGICRSDGKRPDGLTLIPWSHGKSLLWDATCVDTLTPSHLPVTSKVAGSAATSALSIKSNKYRDLQDRYLFSVFAVETLGPWCSEAKMLVSDIGKKLQGLNGDSRSTDFLRQRIAIAIQRGNAASVMGTFPQTLALGEIFYF

SEQ ID NO: 26876 - protein, 1018 aa, Sitophilus oryzae
MNEVAEYQNLDVTETDTTRQSLPSQNNPTDEEEEVTQKLLSNFELFRGSDPSNRPSIPKLKFNNLTSRYITNANFSLQSNLHRFENLTDIHTAIYATAVTVIELNGQKILERTSIPPKPTKVKPSWQRRLESDINTLRTRNNIIREYLNNNNSKKVKIKIEVIIRTAKLNKQDPEFREKLITYQDELRQKLQVKGARLRRYNEASKRKQQNRNFQANQRAFYRNFDTTNRISSEEHVDQQRFEKYWQDIWSNPTHFNQQAPWIDQVEESTNDYQEMVDIQIEENDIKSCIVKTSNWKATGLDKIHNFWLKHLTCIHSLLAKFFTNVLRDPDEFPEFLAQGITYLLPKKGDMKDPKNYRPITCLSVFYKLLTAIVHKKIYEHCQLNNLIAVEQKGCIKNSLGCKEQLTIDAIIMKQAETKCRNLSMGYIDYRKAFDSVPHDWLLKVLELYKINPNIITFLSHIMKKWKSQILLNNRYMTTINIRKGIFQGDSLSPLWFCLALNPLSHLLNQCKSGYRPDLKDSINISHLLFMDDIKLYSESNNNLKYLLKTVQIFSDDIRMDFGMDKCAEIHIRKGKIAELPNEEVLFHQLTSDESYHYLGIQQNKRIDHTRLKKEFKIKYKSRLTKLLNTKLNAKNLITAINTYAVPILTYSFGILKYSDTDLRNLDILTRTTFTKFRIHHPKSATQRLYLPRKEGGRGLTNITELCRSQEKKMREYFHCSNHPLLRKIAKCDTNFTPLNLHCPEDIIDDHRRKEEMHLEWQNKVLHGKYPTALNDPTVDKASSLLWLTKGNLHAETEGFIISVQDGVIRTRNYERYILKNTEIVDVCRVCHSFGETIEHVIGGCSGLSNSAYLGRHNQIAKIIHRQLAIQYRLIDNPPPYYKYLPAAVLESDNTVLYWDRPIITDRTVDYNRPDIVIIDKANKNAILVDIACPLSANLQKAEREKNSKISKFVCGNQTCLEVKRSTNYPHRYIFNWNRIRVLCGNLERLALPNGLIVTIQNAAILQTCHIVRKFLSI

SEQ ID NO: 26877 - protein, 966 aa, Sitophilus oryzae
MNVEMILYQVGDKSSILNFLRDIPDINVTEQNLVDRKRTIIRNNYLTQTDIDQLRRDVGNELNLMNEVAEYQNLDVTETDTTRQSLPSQNNPTDEEEEVTQKLLSNFELFRGSDPSNRPSIPKLKFNNLTSRYITNANFSLQSNLHRFENLTDIHTAIYATAVTVIELNGQKILERTSIPPKPTKVKPSWQRRLESDINTLRTRNNIIREYLNNNNSKKVKIKIEVIIRTAKLNKQDPEFREKLITYQDELRQKLQVKGARLRRYNEASKRKQQNRNFQANQRAFYRNFDTTNRISSEEHVDQQRFEKYWQDIWSNPTHFNQQAPWIDQVEESTNDYQEMVDIQIEENDIKSCIVKTSNWKATGLDKIHNFWLKHLTCIHSLLAKFFTNVLRDPDEFPEFLAQGITYLLPKKGDMKDPKNYRPITCLSVFYKLLTAIVHKKIYEHCQLNNLIAVEQKGCIKNSLGCKEQLTIDAIIMKQAETKCRNLSMGYIDYRKAFDSVPHDWLLKVLELYKINPNIITFLSHIMKKWKSQILLNNRYMTTINIRKGIFQGDSLSPLWFCLALNPLSHLLNQCKSGYRPDLKDSINISHLLFMDDIKLYSESNNNLKYLLKTVQIFSDDIRMDFGMDKCAEIHIRKGKIAELPNEEVLFHQLTSDESYHYLGIQQNKRIDHTRLKKEFKIKYKSRLTKLLNTKLNAKNLITAINTYAVPILTYSFGILKYSDTDLRNLDILTRTTFTKFRIHHPKSATQRLYLPRKEGGRGLTNITELCRSQEKKMREYFHCSNHPLLRKIAKCDTNFTPLNLHCPEDIIDDHRRKEEMHLEWQNKVLHGKYPTALNDPTVDKASSLLWLTKGNLHAETEGFIISVQDGVIRTRNYERYILKNTEIVDVCRVCHSFGETIEHVIGGCSGLSNSAYLGRHNQIAKIIHRQLAIQYRLIDNPPPYYKYLPAAVLESDNTVLYWTGQ

SEQ ID NO: 26878 - protein, 627 aa, Sitophilus oryzae
MVDIQIEENDIKSCIVKTSNWKATGLDKIHNFWLKHLTCIHSLLAKFFTNVLRDPDEFPEFLAQGITYLLPKKGDMKDPKNYRPITCLSVFYKLLTAIVHKKIYEHCQLNNLIAVEQKGCIKNSLGCKEQLTIDAIIMKQAETKCRNLSMGYIDYRKAFDSVPHDWLLKVLELYKINPNIITFLSHIMKKWKSQILLNNRYMTTINIRKGIFQGDSLSPLWFCLALNPLSHLLNQCKSGYRPDLKDSINISHLLFMDDIKLYSESNNNLKYLLKTVQIFSDDIRMDFGMDKCAEIHIRKGKIAELPNEEVLFHQLTSDESYHYLGIQQNKRIDHTRLKKEFKIKYKSRLTKLLNTKLNAKNLITAINTYAVPILTYSFGILKYSDTDLRNLDILTRTTFTKFRIHHPKSATQRLYLPRKEGGRGLTNITELCRSQEKKMREYFHCSNHPLLRKIAKCDTNFTPLNLHCPEDIIDDHRRKEEMHLEWQNKVLHGKYPTALNDPTVDKASSLLWLTKGNLHAETEGFIISVQDGVIRTRNYERYILKNTEIVDVCRVCHSFGETIEHVIGGCSGLSNSAYLGRHNQIAKIIHRQLAIQYRLIDNPPPYYKYLPAAVLESDNTVLYWTGQ

SEQ ID NO: 26879 - protein, 931 aa, Sitophilus oryzae
MNEVAEYQNLDVTETDTTRQSLPSQNNPTDEEEEVTQKLLSNFELFRGSDPSNRPSIPKLKFNNLTSRYITNANFSLQSNLHRFENLTDIHTAIYATAVTVIELNGQKILERTSIPPKPTKVKPSWQRRLESDINTLRTRNNIIREYLNNNNSKKVKIKIEVIIRTAKLNKQDPEFREKLITYQDELRQKLQVKGARLRRYNEASKRKQQNRNFQANQRAFYRNFDTTNRISSEEHVDQQRFEKYWQDIWSNPTHFNQQAPWIDQVEESTNDYQEMVDIQIEENDIKSCIVKTSNWKATGLDKIHNFWLKHLTCIHSLLAKFFTNVLRDPDEFPEFLAQGITYLLPKKGDMKDPKNYRPITCLSVFYKLLTAIVHKKIYEHCQLNNLIAVEQKGCIKNSLGCKEQLTIDAIIMKQAETKCRNLSMGYIDYRKAFDSVPHDWLLKVLELYKINPNIITFLSHIMKKWKSQILLNNRYMTTINIRKGIFQGDSLSPLWFCLALNPLSHLLNQCKSGYRPDLKDSINISHLLFMDDIKLYSESNNNLKYLLKTVQIFSDDIRMDFGMDKCAEIHIRKGKIAELPNEEVLFHQLTSDESYHYLGIQQNKRIDHTRLKKEFKIKYKSRLTKLLNTKLNAKNLITAINTYAVPILTYSFGILKYSDTDLRNLDILTRTTFTKFRIHHPKSATQRLYLPRKEGGRGLTNITELCRSQEKKMREYFHCSNHPLLRKIAKCDTNFTPLNLHCPEDIIDDHRRKEEMHLEWQNKVLHGKYPTALNDPTVDKASSLLWLTKGNLHAETEGFIISVQDGVIRTRNYERYILKNTEIVDVCRVCHSFGETIEHVIGGCSGLSNSAYLGRHNQIAKIIHRQLAIQYRLIDNPPPYYKYLPAAVLESDNTVLYWDRPIITDRTVDYNRPAQTSSSSIKANKKCHSC

SEQ ID NO: 26880 - protein, 1075 aa, Sitophilus oryzae
MKWSREMNLNVIRTYLLVNECRDDPLPGWRQKLYSEFLKRYPDINVTEQNLVDRKRTIIRNNYLTQTDIDQLRRDVGNELNLMNEVAEYQNLDVPETDTTRQSLPSQNNPTDEEEEVTQKLLSNFELFRGSDPSNRPSIPKLKFNNLTSRYITNANFSLQSNLHRFENLTDIHTAIYATAVTVIELNGQKILERTSIPPKPTKVKPSWQRRLESDINTLRTRNNIIREYLNNNNSKKVKIKIEVIIRTAKLNKQDPEFREKLITYQDELRQKLQVKGARLRRYNEASKRKQQNRNFQANQRAFYRNFDTTNRISSEEHVDQQRFEKYWQDIWSNPTHFNQQAPWIDQVEESTNDYQEMVDIQIEENDIKSCIVKTSNWKATGLDKIHNFWLKHLTCIHSLLAKFFTNVLRDPDEFPEFLAQGITYLLPKKGDMKDPKNYRPITCLSVFYKLLTAIVHKKIYEHCQLNNLIAVEQKGCIKNSLGCKEQLTIDAIIMKQAETKCRNLSMGYIDYRKAFDSVPHDWLLKVLELYKINPNIITFLSHIMKKWKSQILLNNRYMTTINIRKGIFQGDSLSPLWFCLALNPLSHLLNQCKSGYRPDLKDSINISHLLFMDDIKLYSESNNNLKYLLKTVQIFSDDIRMDFGMDKCAEIHIRKGKIAELPNEEVLFHQLTSDESYHYLGIQQNKRIDHTRLKKEFKIKYKSRLTKLLNTKLNAKNLITAINTYAVPILTYSFGILKYSDTDLRNLDILTRTTFTKFRIHHPKSATQRLYLPRKEGGRGLTNITELCRSQEKKMREYFHCSNHPLLRKIAKCDTNFTPLNLHCPEDIIDDHRRKEEMHLEWQNKVLHGKYPTALNDPTVDKASSLLWLTKGNLHAETEGFIISVQDGVIRTRNYERYILKNTEIVDVCRVCHSFGETIEHVIGGCSGLSNSAYLGRHNQIAKIIHRQLAIQYRLIDNPPPYYKYLPAAVLESDNTVLYWDRPIITDRTVDYNRPDIVIIDKANKNAILVDIACPLSANLQKNRKGKNSKISKFVCGNQTCLEVKRSTNYPHRYIFNWNRIRVLCGKSRTVGST

SEQ ID NO: 26881 - protein, 943 aa, Sitophilus oryzae
MNEVAEYQNLDVTETDTTRQSLPSQNNPTDEEEEVTQKLLSNFELFRGSDPSNRPSIPKLKFNNLTSRYITNANFSLQSNLHRFENLTDIHTAIYATAVTVIELNGQKILERTSIPPKPTKVKPSWQRRLESDINTLRTRNNIIREYLNNNNSKKVKIKIEVIIRTAKLNKQDPEFREKLITYQDELRQKLQVKGARLRRYNEASKRKQQNRNFQANQRAFYRNFDTTNRISSEEHVDQQRFEKYWQDIWSNPTHFNQQAPWIDQVEESTNDYQEMVDIQIEENDIKSCIVKTSNWKATGLDKIHNFWLKHLTCIHSLLAKFFTNVLRDPDEFPEFLAQGITYLLPKKGDMKDPKNYRPITCLSVFYKLLTAIVHKKIYEHCQLNNLIAVEQKGCIKNSLGCKEQLTIDAIIMKQAETKCRNLSMGYIDYRKAFDSVPHDWLLKVLELYKINPNIITFLSHIMKKWKSQILLNNRYMTTINIRKGIFQGDSLSPLWFCLALNPLSHLLNQCKSGYRPDLKDSINISHLLFMDDIKLYSESNNNLKYLLKTVQIFSDDIRMDFGMDKCAEIHIRKGKIAELPNEEVLFHQLTSDESYHYLGIQQNKRIDHTRLKKEFKIKYKSRLTKLLNTKLNAKNLITAINTYAVPILTYSFGILKYSDTDLRNLDILTRTTFTKFRIHHPKSATQRLYLPRKEGGRGLTNITELCRSQEKKMREYFHCSNHPLLRKIAKCDTNFTPLNLHCPEDIIDDHRRKEEMHLEWQNKVLHGKYPTALNDPTVDKASSLLWLTKGNLHAETEGFIISVQDGVIRTRNYERYILKNTEIVDVCRVCHSFGETIEHVIGGCSGLSNSAYLGRHNQIAKIIHRQLAIQYRLIDNPPPYYKYLPAAVLESDNTVLYWDRPIITDRTVDYNRPDIVIIDKQTKFLLILLPAECQLTKTEREK

SEQ ID NO: 26882 - protein, 1069 aa, Sitophilus oryzae
MLGAAIYTPGSRYKMHTHFKMEKKTRKKASDTAGNRAIPDVDRQPKINDDSSNENGQDQTAVLSGPPTNLQINRKASRRAETTKRMKWSREMNLNVIRTYLLVNECRDDPLPGWRQKLHSEFLKRYPDINVTEQNLVDRKRTIIRNNYLTQTDIDQLRRDVGNELNLMNEVAEYQNLDVTETDTTRQSLPSQNNPTDEEEEVTQKLLSNFELFRGSDPSNRPSIPKLKFNNLTSRYITNANFSLQSNLHRFENLTDIHTAIYATAVTVIELNGQKILERTSIPPKPTKVKPSWQRRLESDINTLRTRNNIIREYLNNNNSKKVKIKIEVIIRTAKLNKQDPEFREKLITYQDELRQKLQVKGARLRRYNEASKRKQQNRNFQANQRAFYRNFDTTNRISSEEHVDQQRFEKYWQDIWSNPTHFNQQAPWIDQVEESTNDYQEMVDIQIEENDIKSCIVKTSNWKATGLDKIHNFWLKHLTCIHSLLAKFFTNVLRDPDEFPEFLAQGITYLLPKKGDMKDPKNYRPITCLSVFYKLLTAIVHKKIYEHCQLNNLIAVEQKGCIKNSLGCKEQLTIDAIIMKQAETKCRNLSMGYIDYRKAFDSVPHDWLLKVLELYKINPNIITFLSHIMKKWKSQILLNNRYMTTINIRKGIFQGDSLSPLWFCLALNPLSHLLNQCKSGYRPDLKDSINISHLLFMDDIKLYSESNNNLKYLLKTVQIFSDDIRMDFGMDKCAEIHIRKGKIAELPNEEVLFHQLTSDESYHYLGIQQNKRIDHTRLKKEFKIKYKSRLTKLLNTKLNAKNLITAINTYAVPILTYSFGILKYSDTDLRNLDILTRTTFTKFRIHHPKSATQRLYLPRKEGGRGLTNITELCRSQEKKMREYFHCSNHPLLRKIAKCDTNFTPLNLHCPEDIIDDHRRKEEMHLEWQNKVLHGKYPTALNDPTVDKASSLLWLTKGNLHAETEGFIISVQDGVIRTRNYERYILKNTEIVDVCRVCHSFGETIEHVIGGCSGLSNSAYLGRHNQIAKIIHRQLAIQYRLIDNPPPYYKYLPAAVLESDNTVLYWTGQ

SEQ ID NO: 26883 - protein, 1063 aa, Nysson spinosus
MYLRPGKRSRLLAGPWVCQPPGPLFAGATRKNQPRMKHTGSSGPVNQQTHSSPPPSPILLSHSCPVCARSFTTKTGLGVHKRRAHPNEMDQMQARIDIKARWGEEEILLLARKEAELTVVGASRFMNQDLAKIFTHRSLEAIKKARQKTTYRDAVRHYMDETQAGSSQPLTDAMAPVRSSHSTVSASTPPESSECQGEESVERPPNSFLDLLLSQPQLKETSYNGATLQSIIDQANTSDRDATLLRLSSYLLNIWPLYKRARPHLKPNTSSLPKNKRLLRRQEYALTQRNWTKHQSRCIKTILDGPNQSTIPPKYIMEPFWKTVMEQKCFSAPPVQNLQQHLDSLWKPITIDEITHSRLPLSTSPGPDGITSRQLRAMPINILWRIFNLTLWCGKLPQHLRRARTILIPKKRLSTDPGDFRPITIPSVFVRQLHGILAKRLMVSLNLDPRQRGLQPTDGCADNTTLFDMLLRTHHQKYASCYIASLDISKAFDSVSHNAIFEILKSYGAPDGFIQYVEDFYKTSSTQLIGDGWLSDDFRPERGVKQGDPMSPIIFNIVMDRLLKSLPSDIGCSIETAKINAVAFADDLLLCASTPQGLQDLIDITHAYLSSCGMALNSAKCITISIKGQPKQKNTVIEQRTFRVARNTMPSLRRSEEFKYLGISFTVEGKCKYRPSNELQPKLDRLSKALLKPQQRLHALRTVLIPQLYHKLTLGNIMIGCLNTTDKMIRAAIRNWLNLPKDTPTAFFHTPIEQGGIGIPSLRWHAPWLRKQRLTNLRLPNLGEVVAANTFIATELDKVNKRLHVDGRLLNTLSDISEYWSAKLHKSVDGFGLREAGCCKCAHRWLREPTRLLSGRDFINCIKIRINAMPSRSRTSRGRHDKDRTCRAGCTAPETLNHIAQQCYRTHAGRIERHNSIVAYIGHNFNRKGYLTIQEPTFRTPEGTRKPDLVASKDGIAVVLDAQVVTDSRPLDDAHQRKATYYNTSEIRQEIRSRFAVQNIIFATATLNWRGIWSGSSLGQLLARSIIKKSDAALISTRVALGTVRCFRTFNAVTSVAYRRGIE

SEQ ID NO: 26884 - protein, 874 aa, Eilema sororculum
MRHVPKGARNQAAAKLCEVIDRCISENGVEDWGALLTFAYGALRVPSKDAPGNMTTKVKANIQSFGSGLFPEEPGGLGFSGLRGSRRAIETKVYEGDLRGAVRILVSDDSFARNDSDTLDALRAKHPSPSCPLNFPPEPDSSFSSVSVSAEDVALALSTFYSGSAAGLDGIRPGYLKELTSGSAGESGERLLGCLARLATFLLSGQLNPVVCPYLYGAALCALAKKDGGLRPIAIGSVFRRLTGKLACRSVREAMADYLLSYQLGFGAPRGCEAAIHATRAFVMEPNHSDCVVLKLDLRNAFNTLERDVLLSEVKDRVPSLYPFLYQVYYHPSNLFFNKNLISSQVGAQQGDPLGPLVFSLAIHRVISELKSNLNLWYLDDGTLGGSPEDVFQDLNALIPRLKELGLEVNPSKCELFPCSTGARACFPSFSSLLPGLKELSSHSFTLLGSPIFPDGVPDAISFRNKLLLTAQERLKDLSAHVAMVLLRMCFALPKLTYLLRTTPTWVCPVEVAAFDAILRATVESIINISLNEDQWIQATLPIRHGGIGVRRAQDVGVPAFLASAHGVADLVTVILHKDGGRVTVPYVADAETAWFARSLAASSPGTPQVQHAWDEGIAERLKGQLVEGATGADLARLRAVSQPESGAWLHALPSPHVGTLLDDNSLRVAVALRLGCRVCEPHRCTCGSMVGDDGQHALSCRRSTGRFPRHHALNDILRRAFVSADIPCLLEPPGLSRSDGKRPDGMTLVPWKNGRCLLWDATCVSTIAPSHLSRTVLSPAAAAEDAAEKKRGKYAALTERYIFTPFAVETMGSWGTDAKKLVSEVGRRLRDKTNDSRSASYLRQRLAIAIQRGNAASVMGTFAPGATRGGLID

SEQ ID NO: 26885 - protein, 887 aa, Eilema depressum
MSSSTAPVRCPHCPGSLRTFSVHGLKVHIGRKHKNLPGTASRSIGVDSQPLGQQAQVPHGCALCPLERVSALKASTAVIKHVPKGARNQAAGKLCEVIDKCIGSNDVEDWGALLTFAYGALRVPSKDAPGNMTTKVKSNIQSFGEGSFPEEPGGSGFPGSRGVCRAIETKVYEGDLRGAVRMLVSDDSFARRDSGTLDALRAKHPSPSRPLNFPPEPDTSLSVVTVSTEDVALALSTFYSGSAAGLDGIRPGHLKELTSGSAGESGERLLGCLAKLVNLLLSGQLNPTVCPYLYGASLCALAKKDGGLRPIAIGSVFRRLTAKLACRSVREVMTEYLLPHQLGFGARRGCEAAIHATRAFVMDPDRSDCVVLKLDLRNAFNTLERDVLLSEVKNQVPSLYPFLFQVYYHPSNLFFDNILISSQVGAQQGDPLGPLVFSLAIHKIIKELKSYLNVWYLDDGTLGGTPENVYQDLDALIPRLKELGLEVNPSKCELFPCGAEARACFSRFNSLLPGLKELTPHSFTLLGSPIFPDGVPDAICSRNKLLLTARERLKDLSAHVAMVLLRMCFALPRLTYLLRTTPTWVCPAEVAAFDDSLKSTVESILNVSLNEEQWIQATLPIRHGGIGVRRAQDVGLPAFLASAYGAADLVTVILYKNGGRVKVPFAADAETAWLARSSATSSPVTPHIQRTWDEGIAGRVRERLVEGATGADLARLRAVSQPESGAWLHALPSPHLGTLLDDNSLRVAVALRLGCKVCETHRCTCGSMVGDDGQHALSCRRSTGRFPRHHALNDILRRALVSADIPCLLEPPGLSRSDGKRPDGMTLVPWKNGKCLLWDATCVSTVAPSHLSRTVLSPAAAAEDAAEKKTRQVCGLDRAIHFRSLWG

SEQ ID NO: 26886 - protein, 956 aa, Erannis defoliaria
MSSLTSPLTCPHCPGSSRIFSQHGLKVHIGRKHKDVRQTAARSQTSPIVLISQLPSQTSRVTQIPRPCLLERISSLKMSTPVLRHIPRGARNQAAGKLCDVIDRCVTCNGVEDWGALLTFAFGALKVPSKDAPGSVTAKVKANIQSSGLDQLADETYVPGFSRSCGNRKAIESKVYDGDLRGAVRLLVSDDSFAHHDPVTLNALELKHPSPSRPLSFPPAPDTSFAAVTVSVEDVSLALSSFYSGSAAGLDGIRPGHLKELTSGSAGENSQRLLECLTRLVNFLLSGQINPAVCPYLYGATLCALTKKDGGIRPIAIGSVFRRLTAKLACRSVREAMSEYLRPHQLGFGTRQGCEAAIHATRAFVMDPDHSDCVVLKLDICNAFNTLERDVLLSEVKDLTPSLYPFLYQVYSSSSNLYFNDSLISSQVGAQQGDPLGPLVFSLAIHKVISELKSTLNLWYLDDGTLGGSPKDVYQDLEALISRLRDLGLEVNPSKCEFFPCSTGARTHFLQFSSLLPGLKELSSQSFTLLGSPIFPDGVPEAIFSRQKLLLTAQERLKDLSAHVAIVLLRMCFALPKLTYLLRTAPTWLCPVEVSAFDETLKAIVESILNVSLNQTQWIQATLPIRHGGIGIRCARDVGLPAFLASAHGVADLVTIILRSSGGGVSLPFVAGAESAWSVCSSGATNPVIPQVQRAWDDITARQIKERLRLDASGADLARLRAVSEPESGAWLHALPSPYLGNLLDDNSLRVAVALRLGCKVCEPHRCTCGSMVEADGHHALSCRRCAGRFPRHHALNDIVRRALVSADVPCLLEPPGLSRSDGKRPDGMTLVPWKNGRCLLWDATCVSTVAPSHLGRTVLSPAAAAEDAAVKKRLKYAALEGQYIFVPLAVETLGSWGIDAKNVVGEIGRRLKDKSGDPRSSSYLVQRLAIAIQRGNAASVMGTFAPGAVRGGLFD

SEQ ID NO: 26887 - protein, 887 aa, Eilema depressum
MSSSTAPVRCPHCPGSLRTFSVHGLKVHIGRKHKNLPGTASRSIGVDSQPLGQQAQVPHGCALCPLERVSALKASTAVIKHVPKGARNQAAGKLCEVIDKCIGSNDVEDWGALLTFAYGALRVPSKDAPGNMTTKVKSNIQSFGEGSFPEEPGGSGFPGSRGVCRAIETKVYEGDLRGAVRMLVSDDSFARRDSGTLDALRAKHPSPSRPLNFPPEPDTSLSVVTVSTEDVALALSTFYSGSAAGLDGIRPGHLKELTSGSAGENGERLLGCLAKLVNLLLSGQLNPTVCPYLYGASLCALAKKDGGLRPIAIGSVFRRLTAKLACRSVREVMTEYLLPHQLGFGARRGCEAAIHATRAFVMDPDRSDCVVLKLDLRNAFNTLERDVLLSEVKNQVPSLYPFLFQVYYHPSNLFFDNILISSQVGAQQGDPLGPLVFSLAIHKIIKELKSYLNVWYLDDGTLGGTPENVYQDLDALIPRLKELGLEVNPSKCELFPCGAEARACFSRFNSLLPGLKELTPHSFTLLGSPIFPDGVPDAICSRNKLLLTARERLKDLSAHVAMVLLRMCFALPSLTYLLRTTPTWVCPAEVAAFDDSLKSTVESILNVSLNEEQWIQATLPIRHGGIGVRRAQDVGLPAFLASAYGAADLVTVILYKNGGRVKVPFAADAETAWLARSSATSSPVTPHIQRTWDEGVAGRVRERLVEGATGADLARLRAVSQPESGAWLHALPSPHLGTLLDDNSLRVAVALRLGCKVCETHRCTCGSMVGDDGQHALSCRRSTGRFPRHHALNDILRRALVSADIPCLLEPPGLSRSDGKRPDGMTLVPWKNGKCLLWDATCVSTVAPSHLSRTVLSPAAAAEDAAEKKTRQVCGLDRAIHFRSLCG

SEQ ID NO: 26888 - protein, 952 aa, Blastobasis lacticolella
MNTPHTQLTCPHCPESRRTFGPHGLKVHIGLKHKNVCQKTATVTLTDLAPQRDVQVPQTPRPCPLERLSALKASTPVLWHIPKGARNQAAGKLCELIDGCVNCNGVDDWSALLTFAYSALKVPRKDAPGNMTAKVKRNIGSSDQFADELDGVAGSRPRSHEARKAIESKVHEGDLRGAVRLLISEDSFAQHDPSTLDALGQKHPNPSRPLSFPSAPDSSIVATTVSVEDIIMAVSSFYSGSAAGLDGIRPGHLKELTSGSAGENGRRLLGCLTKLANFLLSGQLNLIVCPYLYGASLCAIAKKDGGVRPIAIGSIFRRLTAKVACWSAREAMSEYLQPYQLGFGTRRGCEAAIHATRAFVMDPDRLDCVLLKLDIRNAFNTLERDVLLSEVKDKIPSLYPFLYQVYFSPSNLFFNNNLISSQVGAQQGDPLGPLVFCLGIHRVISELKSPLNLWYLDDGTLGGSPEEVYQDLEVLVPRFKELGLEVNPSKCEFYSCGAHARTYFSRFSSVMPGLKEITTSSFNLLGSPMFLDGVPEAILSQKRLLLIAQERLKDISAHVALVLLRMCFALPKLTYLLRTTPTWICQDEVSSFDEALKLTTGSILNVNFSELQWKQAALPVRYGGIGVRCARDVGLPAFLASAHGVAGLVATIHKADGDEMSIPFVSGAITAWSALNAGATKPLLPYVQRAWDDISAKRSREQLLEIASGADLARLRAVSQPESGAWLHALPSPHLGTLLDDSSLRVAVALRLGCKVCEPHTCICGSMVEADGHHALSCRRCTGRFPRHHSLNDLVRRALVSADVPCLLEPPGLNRSDGRRPDGMTLVPWKKGKCLVWDATCVSTVAPSHLSHTVLSAAAAAEDAAHKKHQKYEALEAQYYFVPIAVETMGSWGSEAKAMVSELRRRLREKSGDPRSGSYLVQRLAIAIQRGNAASVMGTFAPGTVRGGLFVE

SEQ ID NO: 26889 - protein, 949 aa, Blastobasis adustella
MSASAAPTICPHCPGSTRTFCVRGLSIHIGKVHRNHRHQAAATQAAPAADSSQVPVQSSNRCLLERLAAFKEGTPVLRHIPKGARNQAAGRLCDVLNSCIGSNSVDDWGLLLAFAFIALKVPSKDLPGNMTAKVRANIESSVIHDDFVSELKHRYSTVQKKIENKVFEGDLRGAVRLLISEDSFAQHGPDTLAALKRKHPEPSRPLDFPSPPDLSIEPVTVSVEEVSRALGSFYNGSAAGLDGLRPNHLKELTSESAGENGPRLLECLTKLCNFLLSGRVNPEVCPYLYGASLCALTKKDGGVRPIAIGSVFRRLAAKLACQFVKEEIAGYLQPHQLGFGSRMGCEAAIHATRAYVTDPANSNSVVIKLDICNAFNALERDVLLNEIKEKLPSLFHFLHQVYRFPSNLFFNNELISSQVGAQQGDPLGPLIFSLAIHTAVKEIKSTLNIWYLDDGVIGGNPEDVLQDLDVLVPRLQELGLEANTSKCEFYPCSSAARIHFSRFNSLLPGIRELSSCTFYLLGSPLFPDAIPEAIDIRKKLLLVAQERLSKLSAHVALTLLRMCFALPKVTYLLRTTPTWLSADNVSSFDTTLKSTVESILNVFLDDSQWSLASQPIRYGGLGVRCMQDVGLAAFLASAHGVANLVASILCCDDDKASIPYASDALIAWSARNPTALPPSAPHIQRHWDDLSAKRVNKQLLDNATGTNLARLRAVSQSESGAWLHALPSPHLGTFLDDNSLRVAVALRLGCKVCESHECTCGSVVEADGHHGLSCRRCAGRFPRHHSLNDILRRAFVSANVPCVLEPPSLCRSDGKRPDGLTLVPWKNGKCLVWDATCVCTVTASHLSRSVISPAAAAEDAAAKKRQKYAALQATYLFVPFAVETLGSWCSEAKSLVRDLGSRIRNSSGDPRSGWFLAQRIAIAIQRGNAAGVMGTFAPGTIRGGLFDLV

SEQ ID NO: 26890 - protein, 952 aa, Blastobasis lacticolella
MNTPHAQLTCPHCPESRRTFGPHGLKVHIGLKHKNVCQKTATVTLTDLAPQRDVQVPQTPRPCPLERLSALKASTPVLRHIPKGARNQAAGKLCELIDGCVNCNGVDDWSALLTFAYSALKVPRKDEPGNMTAKVKRNIGSSDQFADELDGVAGSRPRSHEARKAIESKVHEGDLRGAVRLLISEDSFAQHDPSTLDALSQKHPNPSRPLSFPSAPDSSIVATTVSVEDIIMAVSSFYSGSAAGLDGIRPGHLKELTSGSAGENGRRLLGCLTKLANFLLSGQLNLIVCPYLYGASLCAIAKKDGGVRPIAIGSIFRRLTAKVACWSAREAMSEYLQPYQLGFGTRRGCEAAIHATRAFVMDPDRLDCVLLKLDIRNAFNTLERDVLLSEVKDKIPSLYPFLYQVYFSPSNLFFNNNLISSQVGAQQGDPLGPLVFCLGIHRVISELKSPLNLWYLDDGTLGGSPEEVYQDLEVLVPRFKELGLEVNPSKCEFYPCGAHARTYFSRFSSVMPGLKEITTSSFNLLGSPIFLDGVPEAIISQKRLLLIAQERLKDISAHVALVLLRMCFALPKLTYLLRTTPTWICQDEVSSFDEALKLTTGSILNVNFSELQWKQAALPVRHGGIGVRCARDVGLPAFLASAHGVAGLVATIHKTDGDEMSIPFVSGAITAWSALNAGATKPLLPYVQRAWDDISAKRSREQLLEIASGADLARLRAVSQPEAGAWLHALPSPHLGTLLDDSSLRVAVALRLGCKVCEPHTCICGSMVEADGHHALSCRRCTGRFPRHHSLNDLVRRALVSADVPCLLEPPGLNRSDGRRPDGMTLVPWKKGKCLVWDATCVSTVAPTHLSHTVLSAAAAAEDAAHKKHQKYAALEAQYYFVPIAVETMGSWGSEAKAMVSELGRRLREKSGDSRSGSYLVQRLAIAIQRGNAASVMGTFAPGTVRGGLFVE

SEQ ID NO: 26891 - protein, 952 aa, Blastobasis lacticolella
MNTPHTQLTCPYCPESRRTFGPHGLKVHIGLKHKNVCQKTATVTLTDLAPQRDVQVPQTPRPCPLERLSALKASTPVLRHIPKGARNQAAGKLCELIDGCVNCNGVDDWSALLTFAYSALKVPRKDAPGNMTAKVKRNIGSSDQFADELDGVAGSRPRSHEARKAIESKVHEGDLRGAVRLLISEDSFAQHDPSTLDALGQKHPNPSRPLSFPAAPDSSIVATTVSVEDIIMAVSSFYSGSAAGLDGIRPGHLKELTSGSAGENGRRLLGCLTKLANFLLSGQLNLIVCPYLYGASPCAIAKKDGGVRPIAIGSVFRRLTAKVACWSAREAMSEYLQPYQLGFGTRRGCEAAIHATRAFVMDPDRLDCVLLKLDIRNAFNTLERDVLLSEVKDKIPSLYPFLYQVYFSPSNLFFNNNLISSQVGAQQGDPLGPLVFCLGIHRVISELKSPLNLWYLDDGTLGGSPEEVYQDLEVLVPRFKELGLEVNPSKCEFYPCGAHARTYFSRFSSVMPGLKEITTSSFNLLGSPMFLDGVPEAILSQKRLLLIAQERLKDISAHVALVLLRMCFALPKLTYLLRTTPTWICQDEVSSFDEALKLTTGSILNVNFSELQWKQAALPVRHGGIGVRCARDVGLPAFLASSHGVAELVATIHKADGDEMSIPFVSGAITAWSALNAGATKPLLPYVQRAWDDISAKRSREQLLEIASGDDLARLRAVSQPESGAWLHALPSPHLGTLLDDSSLRMAVALRLGCKVCEPHTCICGSMVEADGHHALSCRRCTGRYPRHHSLNDLVRRALVSADVPCLLEPPGLNRSDGRRPDGMTLVPWKKGKCLVWDATCVSTVAPSHLSHTVLSAAAAAEDAAHKKHQKYEALEAQYYFVPIAVETMGSWGSEAKAMVSELGRRLREKSGDPRSGSYLVQRLAIAIQRGNAASVMGTFAPGTVRGGLFVE

SEQ ID NO: 26892 - protein, 952 aa, Blastobasis lacticolella
MNTPHTQLTCPHCPESRRTFGPHGLKVHIGLKHKNVCQKTATVTLTDLAPQRDVQVPQTPRPCPLERLSALKASTPVLRHIPKGARNQAAGKLCELIDGCVNCNGVDDWSALLTFAYSALKVPRKDAPGNMTAKVKRNIGSSDQFADELDGVAGSRPRSHEARKAIESKVHEGDLRGAVRLLISEDSFAQHDPSTLDALGQKHPNPSRPLSFPSAPDSSIVATTVSVEDIIMAVSSFYSGSAAGLDGIRPGHLKELTSGSAGENGRRLLGCLTKLANFLLSGQLNLIVCPYLYGASLCAIAKKDGGVRPIAIGSIFRRLTAKVACWSAREAMSEYLQPYQLGFGTRRGCEAAIHATRAFVMDPDRLDCVLLKLDIRNAFNTLERDVLLSEVKDKIPSLYPFLYQVYFSPSNLFFNNNLISSQVGAQQGDPLGPLVFCLGIHRVISELKSPLNLWYLDDGTLGGSPEEVYQDLEVLVPRFKELGLEVNPSKCEFYSCGAHARTYFSRFSSVMPGLKEITTSSFNLLGSPMFLDGVPEAILSQKRLLLIAQERLKDISAHVALVLLRMCFALPKLTYLLRTTPTWICQDEVSSFDEALKLTTGSILNVNFSELQWKQAALPVRYGGIGVRCARDVGLPAFLASAHGVAGLVATIHKADGDEMSIPFVSGAITAWSALNAGATKPLLPYVQRAWDDISAKRSREQLLEIASGADLARLRAVSQPESGAWLHALPSPHLGTLLDDSSLRVAVALRLGCKVCEPHTCICGSMVEADGHHALSCRRCTGRFPRHHSLNDLVRRALVSADVPCLLEPPGLNRSDGRRPDGMTLVPWKKGKCLVWDATCVSTVAPSHLSHTVLSAAAAAEDAAHKKHQKYEALEAQYYFVPIAVETMGSWGSEAKAMVSELGRRLREKSGDPRSGSYLVQRLAIAIQRGNAASVMGTFAPGTVRGGLYVE

SEQ ID NO: 26893 - protein, 956 aa, Blastobasis lacticolella
MNTPHTQLTCPHCPESRRTFGPHGLKVHIGLKHKNVCQKTATVTPQTSLTDLAPQRDVQVPQTPRPCPLERLSALKASTPVLRHIPKGARNQAAGKLCELIDGCVNCNGVDDWTALLTFAYSALKVPRKDAPGNMTAKVKRNIGSSDQFADELDGVAGSRPRSHEARKAIESKVHEGDLRGAVRLLISEDSFAQHDPSTLDALGQKHPNPSRPLSFPSAPDSSIVATTVSVEDIIMAVSSFYSGSAAGLDGIRPGHLKELTSGSAGENGRRLLGCLTKLANFLLSGQLNLIVCPYLYGASLCAIAKKDGGVRPIAIGSIFRRLTAKVACWSAREAMSEYLQPYQLGFGTRRGCEAAIHVTRAFVMDPDRLDCVLLKLDIRNAFNTLERDVLLSEVKDKIPSLYPFLYQVYFSPSNLFFNNNLISSQVGAQQGDPLGPLVFCLGIHRVISELKSPLNLWYLDDGTLGGSPEEVYQDLEVLVPRFKELGLEMNPSKCEFYPCGAHARTYFSRFSSVMPGLKEITTSSFNLLGSPMFLDGVPEAILSQKRLLLIAQERLKDISAHVALVLLRMCFALPKLTYLLRTTPTWICQDEVSSFDEALKLTTGSILNVDFSELQWKQAALPVRHGGIGVRCARDVGLPAFLASAHGVAGLVATIHKADGDEMSIPFVSGAITAWSALNAGATKPLLPYVQRVWDDISAKRSKEQLLEIASGADLARLRAVSQPESGAWLHALPSPHLGTLLDDSSLRVAVALRLGCKVFEPHTCICGSMVEADGHHALSCRRCTGRFPRHHSLNYLVRRALVSADVPCLLEPPGLNRSDGRRPDGMTLVPWKKGKCLVWDATCVSTVAPSHLSHTVLSAAAAAEDAAHKKHQKYAALEAQYYFVPIAVETMGSWGSEAKAIVSELGRRLREKSGNSRSGSYLVQKLAIAIQRGNAASVMSTFAPGTVRGGLFVE

SEQ ID NO: 26894 - protein, 822 aa, Blastobasis lacticolella
MTAKVKRNIGSSDQFADELDGVAGSRPRSHEARKAIESKVHEGDLRGAVRLLISEDSFAQHDPSTLDALGQKHPNPSRPLSFPSAPDSSIVATTVSVEDIIMAVSSFYSGSAAGLDGIRPGHLKELTSGSAGENGRRLLGCLTKLANFLLSGQLNLIVCPYLYGASLCAIAKKDGGVRPIAIGSIFRRLTAKVACWSAREAMSEYLQPYQLGFGTRRGCEAAIHATRAFVMDPDRLDCVLLKLDIRNAFNTLERDVLLSEVKDKIPSLYPFLYQVYFSPSNLFFNNNLISSQVGAQQGDPLGPLVFCLGIHRVISELKSPLNLWYLDDGTLGGSPEEVYQDLEVLVPRFKELGLEVNPSKCEFYSCGAHARTYFSRFSSVMPGLKEITTSSFNLLGSPMFLDGVPEAILSQKRLLLIAQERLKDISAHVALVLLRMCFALPKLTYLLRTTPTWICQDEVSSFDEALKLTTGSILNVNFSELQWKQAALPVRYGGIGVRCARDVGLPAFLASAHGVAGLVATIHKADGDEMSIPFVSGAITAWSALNAGATKPLLPYVQRAWDDISAKRSREQLLEIASGADLARLRAVSQPESGAWLHALPSPHLGTLLDDSSLRVAVALWLGCKVCESHTCICGSMVEADGHHALSCRRCTGRFPRHHSLNDLVRRALVSADVPCLLEPPGLNRSDGRRPDGMTLVPWKKGKCLVWDATCVSTVAPSHLSHTVLSAAAAAEDAAHKKHQKYEALEAQYYFVPIAVETMGSWGSEAKAMVSELGRRLREKSGDPRSGSYLVQRLAIAIQRGNAASVMGTFAPGTVRGGLFVE

SEQ ID NO: 26895 - protein, 952 aa, Blastobasis lacticolella
MNTPHTQLTCPHCPESRRTFGPHGLKVHIGLKHKNVCQKTATVTLTDLAPQRAVQVPQTPRPCPLERLSALKASTPVLRHIPKGARNQAAGKLCELIDGCVNCNGVDDWSALLTFAYSALKVPRKDAPGNMTAKVKRNIGSSDQFADELDGVAGSRPRSHEARKAIESKVHEGDLRGAVRLLISEDSFAQHDPSTLDALGQKHPNPSRPLSFPSAPDSSIVATTVSVEDIIMAVSSFYSGSAAGLDGIRPGHLKELTSGSAGENGRRLLGCLTKLANFLLSGQLNLIVCPYLYGASLCAIAKKDGGVRPIAIGSIFRRLTAKVACWSAREAMSEYLQPYQLGFGTRRGCEAAIHATRAFVMDPDRLDCVLLKLDIRNAFNTLERDVLLSEVKDKIPSLYPFLYQVYFSPSNLFFNNNLISSQVGAQQGDPLGPLVFCLGIHRVISELKSPLNLWYLDDGTLGGSPEEVYQDLEVLVPRFKELGLEVNPSKCEFYPCGAHARTYFSRFSSVMPGLKEITTSSFNLLGSPMFLDGVPEAILSQKRLLLIAQERLKDISAHVALVLLRMCFALPKLTYLLRTTPTWICQDEVSSFDEALKLTTGSILNVNFSELQWKQAALPVRHGGIGVRCARDVGLPAFLASAHGVAGLVATIRKADGDEMSIPFVSGAITAWSALNAGATKPLLPYVQRAWDDISAKRSREQLLEIASGADLARLRAVSQPESGAWLHALPSPHLGTLLDDSSLRVAVALRLGCKVCEPHTCICGSMVEADGHHALSCRRCTGRFPRHHSLNDLVRRALVSADVPCLLEPPGLNRSDGRRPDGMTLVPWKKGKCLVWDATCVSTVAPSHLSHTVLSAAAAAEDAAHKKHQKYEALEAQYYFVPIAVETMGSWGSEAKAMVSELGRRLREKSGDPRSGSYLVQRLAIAIQRGNAASVMGTFAPGTVRGGLFVE

SEQ ID NO: 26896 - protein, 954 aa, Agriopis aurantiaria
MSSLPAQLTCPCCPGSARVFSAHGLKVHIGRMHKSVRGPAAASQFTPPGSDLTSPSQASASHPCILDRLAGLKDKTPVLRHIPKGARNQAAGKLCEIIDRCVSYNSLEDWCALLTFAYGALRVPSRDAPGNMTTKVKANIESPASDQLIDELSNSTFNSRSRAIVKSIESKVFEGDLRGAVRLLVSDDSFAQHDPATLAALELKHPSPSRPLSFPPAPDASYSPVTVSVEDVSRALSSFYSGSAAGLDGIRPGHLKELASSSAGENSQRLLGCLTKLANFLLSGQLNLQVCPYLYGASLCALTKKDGGVRPIAIGSVFRRLTAKLACWSVREAMSEYLQPHQLGFGTRRGCEAAIHATRAFVMDPSNVNCVLLKLDVRNAFNTIERDVLLSEVKDKIPSLYPFLYQVYYSPSHLFFNNSVISSQVGAQQGDPLGPLVFSLAIHMAISDLKSALNVWYLDDGTIGGSLEDVYHDLADLIPRLKELGLEVNPSKCEYFPCGAGARIHFSRFSALLPGLKELTPNTFTLLGSPIFLEGLPAALTSHKEFLLNAQERLRGLSAHVAIVLLRTCFALPKMTYLLRTAPTWICPGEIACFDKVLKSTVETVLNVSLDETQWIQAALPIRYGGLGLRCARDVGLPAFLASAHGVADLVTVILHSNGVGASIPFVSDAVSAWLALNTGASSPVAALDVQRAWDDIGAKRIQKQLLESSTGADLARLRAVSQSESGAWLYALPSPHLGTLMDDDSLRVAVAFRLGCKVCEPHLCICGSMVEANGHHALSCRRCSGRFPRHHALNDIVRRALVSANIPCVLEPPGLCRSDGKRPDGLTLVPWKNGKCLVWDATCVSTVAATHLGRTVHSPAAAAENAACMKRLKYAAMVPHYIFVPIAVETMGSWATEARSFIGELGRRLREKNNDPRSGSYLVQRLAIAIQRGNAASIMGTFAPGTVRGGLFD

SEQ ID NO: 26897 - protein, 954 aa, Agriopis aurantiaria
MSSLPAQLTCPCCPGSARVFSAHGLKVHIGRMHKSVRGPAAASQFTPPGSDLTSPSQASASHPCILDRLAGLKDKTPVLRHIPKGARNQAAGKLCEIIDRCVSYNSLEDWCALLTFAYGALRVPSRDAPGNMTTKVKANIESPASDQLIDELSNSTFNSRSRAIVKSIESKVFEGDLRGAVRLLVSDDSFAQHDPATLAALELKHPSPSRPLSFPPAPDASYSPVTVSVEDVSRALSSFYSGSAAGLDGIRPGHLKELASSSAGENSQRLLGCLTKLANFLLSGQLNLQVCPYLYGASLCALTKKDGGVRPIAIGSVFRRLTAKLACWSVREAMSEYLQPHQLGFGTRRGCEAAIHATRAFVMDPSNVNCVLLKLDVRNAFNTIERDVLLSEVKDKIPSLYPFLYQVYYSPSHLFFNNSVISSQVGAQQGDPLGPLVFSLAIHMAISDLKSALNVWYLDDGTIGGSLEDVYHDLADLIPRLKELGLEVNPSKCEYFPCGAGARIHFSRFSALLPGLKELTPNTFTLLGSPIFLEGLPAALTSHKEFLLNAQERLRGLSAHVAIVLLRTCFALPKMTYLLRTAPTWICPGEIACFDKVLKSTVETVLNVSLDETQWIQAALPIRYGGLGLRCARDVGLPAFLASAHGVADLVTVILHSNGVGASIPFVSDAVSAWLALNTGASSPVAALHVQRAWDDIGAKRIQKQLLESSTGADLARLRAVSQSESGAWLYALPSPHLGTLMDDDSLRVAVAFRLGCKVCEPHLCICGSMVEANGHHALSCRRCSGRFPRHHALNDIVRRALVSANIPCVLEPPGLCRSDGKRPDGLTLVPWKNGKCLVWDATCVSTVAATHLCRTVHSPAAAAENAACMKRLKYAAMVPHYIFVPIAVETMGSWATEARSFIGELGRRLREKNNDPRSGSYLVQRLAIAIQRGNAASIMGTFAPGTVRGGLFD

SEQ ID NO: 26898 - protein, 954 aa, Agriopis aurantiaria
MSSLPAQLTCPCCPGSARVFSAHGLKVHIGRMHKSVRGPAAASQFTPPGSDLTSPSQASASHPCILDRLAGLKDKTPVLRHIPKGARNQAAGKLCEIIDRCVSYNSLEDWCALLTFAYGALRVPSRDAPGNMTTKVKANIESPASDQLIDELSNSTFNSRSRAIVKSIESKVFEGDLRGAVRLLVSDDSFAQHDPATLAALELKHPSPSRPLSFPPAPDASYSPVTVSVEDVSRALSSFYSGSAAGLDGIRPGHLKELASSSAGENSQRLLGCLTKLANFLLSGQLNLQVCPYLYGASLCALTKKDGGVRPIAIGSVFRRLTAKLACWSVREAMSEYLQPHQLGFGTRRGCEAAIHATRAFVMDPSNVNCVLLKLDVRNAFNTIERDVLLSEVKDKIPSLYPFLYQVYYSPSHLFFNNSVISSQVGAQQGDPLGPLVFSLAIHMAISDLKSALNVWYLDDGTIGGSLEDVYHDLADLIPRLKELGLEVNPSKCEYFPCGAGARIHFSRFSALLPGLKELTPNTFTLLGSPIFLEGLPAALTSHKEFLLNAQERLRGLSAHVAIVLLRTCFALPKMTYLLRTAPTWICPGEIACFDKVLKSTVETVLNVSLDETQWIQAALPIRYGGLGLRCARDVGLPAFLASAHGVADLVTVILHSNGVGASIPFVSDAVSAWLALNTGASSPVAALHVQRAWDDIGAKRIQKQLLESSTGADLARLRAVSQSESGAWLYALPSPHLGTLMDDDSLRVAVAFRLGCKVCEPHLCICGSMVEANGHHALSCRRCSGRFPRHHALNDIVRRALVSANIPCVLEPPGLCRSDGKRPDGLTLVPWKNGKCLVWDATCVSTVAATHLGRTVHSPAAAAENAACMKRLKYAAMVPHYIFVPIAVETMGSWATEARSFIGELGRRLREKNNDPRSGSYLVQRLAIAIQRGNAASIMGTFAPGTVRGGLFD

SEQ ID NO: 26899 - protein, 823 aa, Agriopis aurantiaria
MTTKVKANIESPASDQLIDELSNSTFNSRSRAIVKSIESKVFEGDLRGAVRLLVSDDSFAQHDPATLAALELKHPSPSRPLSFPPAPDASYSPVTVSVEDVSRALSSFYSGSAAGLDGIRPGHLKELASSSAGENSQRLLGCLTKLANFLLSGQLNLQVCPYLYGASLCALTKKDGGVRPIAIGSVFRRLTAKLACWSVREAMSEYLQPHQLGFGTRRGCEAAIHATRAFVMDPSNVNCVLLKLDVRNAFNTIERDVLLSEVKDKIPSLYPFLYQVYYSPSHLFFNNSVISSQVGAQQGDPLGPLVFSLAIHMAISDLKSALNVWYLDDGTIGGSLEDVYHDLADLIPRLKELGLEVNPSKCEYFPCGAGARIHFSRFSALLPGLKELTPNTFTLLGSPIFLEGLPAALTSHKEFLLNAQERLRGLSAHVAIVLLRTCFALPKMTYLLRTAPTWICPGEIACFDKVLKSTVETVLNVSLDETQWIQAALPIRYGGLGLRCARDVGLPAFLASAHGVADLVTVILHSNGVGASIPFVSDAVSAWLALNTGASSPVGALHVQRAWDDIGAKRIQKQLLESSTGADLARLRAVSQFESGAWLYALPSPHLGTLMDDDSLRVAVAFRLGCKVCEPHLCICGSMVEANGHHALSCRRCSGRFPRHHALNDIVRRALVSANIPCVLEPPGLCRSDGKRPDGLTLVPWKNGKCLVWDATCVSTVAATHLGRTVHSPAAAAENAACMKRLKYAAMVSHYIFVPIAVETMGSWATEARSFIGELGRRLREKNNDPRSGSYLVQRLAIAIQRGNAASIMGTFAPGTVRGGLFD

SEQ ID NO: 26900 - protein, 954 aa, Agriopis aurantiaria
MSSLPAQLTCPCCPGSARVFSAHGLKVHIGRMHKSVRGPAAASQFTPPGSDLTSPSQASASHPCILDRLAGLKDKTPVLRHIPKGARNQAAGKLCEIIDRCVSYNSLEDWCALLTFAYGALRVPSRDAPGNMTTKVKANIESPASDQLIDELSNSTFNSRSRAIVKSIESKVFEGDLRGAVRLLVSDDSFAQHDPATLAALELKHPSPSRPLSFPPAPDASYSPVTVSVEDVSRALNSFYSGSAAGLDGIRPGHLKELASSSAGENSQRLLGCLTKLANFLLSGQLNLQVCPYLYGASLCALTKKDGGVRPIAIGSVFRRLTAKLACWSVREAMSEYLQPHQLGFGTRRGCEAAIHATRAFVMDPSNVNCVLLKLDVRNAFNTIERDVLLSEVKDKIPSLYPFLYQVYYSPSHLFFNNSVISSQVGAQQGDPLGPLVFSLAIHMAISDLKSALNVWYLDDGTIGGSLEDVYHDLADLIPRLKELGLEVNPSKCEYFPCGAGARIHFSRFSALLPGLKELTPNTFTLLGSPIFLEGLPAALTSHKEFLLNAQERLRGLSAHVAIVLLRTCFALPKMTYLLRTAPTWICPGEIACFDKVLKSTVETVLNVSLDETQWIQAALPIRYGGLGLRCARDVGLPAFLASAHGVADLVTVILHSNGVGASIPFVSDAVSAWLALNTGASSPVAALHVQRAWDDIGAKRIQKQLLESSTGADLARLRAVSQSESGAWLYALPSPHLGTLMDDDSLRVAVAFRLGCKVCEPHLCICGSMVEANGHHALSCRRCSGRFPRHHALNDIVRRALVSANIPCVLEPPGLCRSDGKRPDGLTLVPWKNGKCLVWDATCVSTVAATHLGRTVHSPAAAAENAACMKRLKYAAMVPHYIFVPIAVETMGSWATEARSFIGELGRRLREKNNDPRSGSYLVQRLAIAIQRGNAASIMGTFAPGTVRGGLFD

SEQ ID NO: 26901 - protein, 954 aa, Agriopis aurantiaria
MSSLPAQLTCPCCPGSARVFSAHGLKVHIGRMHKSVRGPAAASQFTPPGSDLTSPSQASASHPCILDRLAGLKDKTPVLRHIPKGARNQAAGKLCEIIDRCVSYNSLEDWCALLTFAYGALRVPSRDAPGNMTTKVKANIESPASDQLIDELSNSTFNSRSRAIVKSIESKVFEGDLRGAVRLLVSDDSFAQHDPATLAALELKHPSPSRPLSFPPAPDASYSPVTVSVEDVSRALSSFYSGSAAGLDGIRPGHLKELASSSAGENSQRLLGCLTKLANFLLSGQLNLQVCPYLYGASLCALTKKDGGVRPIAIGSVFRRLTAKLACWSVREAMSEYLQPHQLGFGTRRGCEAAIHATRAFVMDPSNVNCVLLKLDVRNAFNTIERDVLLSEVKDKIPSLYPFLYQVYYSPSHLFFNNSVISSQVGAQQGDPLGPLVFSLAIHMAISDLKSALNVWYLDDGTIGGSLEDVYHDLADLIPRLKELGLEVNPSKCEYFPCGAGARIHFSRFSALLPGLKELTPNTFTLLGSPIFLEGLPAALTSHKEFLLNAQERLRGLSAHVAIVLLRTCFALPKMTYLLRTAPTWICPGEIACFDKVLKSTVETVLNVSLDETQWIQAALPIRYGGLGLRCARDVGLPAFLASAHGVADLVTVILHSNGVGASIPFVSDAVSAWLALNTGASSPVGALHVQRAWDDIGAKRIQKQLLESSTGADLARLRAVSQSESGAWLYALPSPHLGTLMDDDSLRVAVAFRLGCKVCEPHLCICGSMVEANGHHALSCRRCSGRFPRHHALNDIVRRALVSANIPCVLEPPGLCRSDGKRPDGLTLVPWKNGKCLVWDATCVSTVAATHLGRTVHSPAAAAENAACMKRLKYAAMVSHNIFVPIAVETMGSWATEARSFIGELGRRLREKNNDPRSGSYLVQRLAIAIQRGNAASIMGTFVPGTVRGGLFD

SEQ ID NO: 26902 - protein, 951 aa, Eilema sororculum
MSSSTAPVRCPHCPASLRTFNAHGLKIHIGRMHKTLQTAPTLSETDSQPPSQESQVPQASGPYPLERVAALKASTAVIRHIPKGARNQAAGKLCEIIDECIDNNSVEDWGALLTFAYGALRVPSKDAPGNMTTKVKANIRSFGSDLFPEEPGGPGFPGSRGSRKAIEAKVYEGDLRGAVRLLVSDDSFARHNSDTLDALRAKHPSPSRPLHYPPEPDTSVPAVTVSAQDVAQALSTFYSGSAAGLDGIRPAHLKELTSGSAGENGERLLGSLARLANFLLSGQLNPAVCPYVYGASLCALAKKDGGLRPIAIGSVIRRLTAKLACRSVREAMTEYLLPHQLGFGARRGCEAAIHATRTYVMDTSNSNCVVLKLDLRNAFNTLERDVLLSEVKDLIPSLYPFLFQVYHHPSNLFFNNTLISSQVGAQQGDPLGPLVFSLAIHKVITELKSDLNVWYLDDGTLGGTPEVVCQDLNALIPRFRELGLEVNPSKCELFPCSTEARACFPCFSALLPGLKELSSHSFTLLGSPIFVDGVPEAIFSRNKLLLTARERLKDLSAHVALVLLRMCFALPKLTYLLRTVPTWVCPAEVAAFDDTLKSTVESILNISLNEDQWTQATLPIRHGGIGVRRAWDVGLSAFLASAHGAADLVTVILNNNGGKVSVPYAAGAETEWLARSSAVSSPVTAHAQRAWDESMVEGLRERLVEGAAGANLARLRAVSQPESGAWLHALPSPHMGTLLDDNSLRVAVALRLGCKVCETHRCTCGSMVGDDGQHALSCRRSAGRFPRHHALNDILRRAFVSADIPCLLEPPGLSRSDGKRPDGMTLVPWRNGKCLLWDATCVSTVASSHLSRTVLFPAAAAEDAAEKKRGKYAALAERYIFAPFAVETMGSWGADAKNLVSELGRRLRDKTGDSRSASYLGQRLSVAIQRGNAASVMGTFAPGTVRSGLID

SEQ ID NO: 26903 - protein, 951 aa, Eilema sororculum
MSSSTAPVRCPHCPASLRTFNAHGLKIHIGRMHKTLQTAPTLSETDSQPPSQQSQVPQASGPYPLERVAALKASTAVIRHIPKGARNQAAGKLCEIIDECIDNNSVEDWGALLTFAYGALRVPSKDAPGNMTTKVKANIRSFGSDLFPEEPGGPGFPGSRGSRKAIEAKVYEGDLRGAVRLLVSDDSFARHNSDTLDALRAKHPSPSRPLHYPPEPDTSVPAVTVSAQDVAQALSTFYSGSAAGLDGIRPAHLKELTSGSAGENGERLLGSLARLANFLLSGQLNPAVCPYVYGASLCALAKKDGGLRPIAIGSVIRRLTAKLACRSVREAMTEYLLPHQLGFGARRGCEAAIHATRTYVMDTSNSNCVVLKLDLRNAFNTLERDVLLSEVKDLIPSLYPFLFQVYHHPSNLFFNNTLISSQVGAQQGDPLGPLVFSLAIHKVITELKSDLNVWYLDDGTLGGTPEVVCQDLNALIPRFRELGLEVNPSKCELFPCSTEARACFPCFSALLPGLKELSSHSFTLLGSPIFVDGVPEAIFSRNKLLLTARERLKDLSAHVALVLLRMCFALPKLTYLLRTVPTWVCPAEVAAFDDTLKSTVESILNISLNEDQWTQATLPIRHGGIGVRRAWDVGLSAFLASAHGAADLVTVILNNNGGKVSVPYAAGAETEWLARSSAVSSPVTAHAQRAWDESMVEGLRERLVEGAAGANLARLRAVSQPESGAWLHALPSPHMGTLLDDNSLRVAVALRLGCKVCETHRCTCGSMVGDDGQHALSCRRSAGRFPRHHALNDILRRAFVSADIPCLLEPPGLSRSDGKRPDGMTLVPWRNGKCLLWDATCVSTVASSHLSRTVLFPAAAAEDAAEKKRGKYAALAERYIFAPFAVETMGSWGADAKNLVSELGRRLRDKTGDSRSASYLGQRLSVAIQRGNAASVMGTFAPGTVRSGLID

SEQ ID NO: 26904 - protein, 873 aa, Zygaena filipendulae
MAAGRLSDIINKCVDCNGEEEWYSLLSFAYTALRVPSRNLPGNMTTKVKANILSSESSNSLGLSDGLESADGVSGSRSVRKILEAKVFEGDLRGAVRLLVSDDSFAQHVPETLAELERKHPGPSRPHDFPAAPDSPPSAATCTADEVAGALGSFYSGSAAGLDGVRPGHLKELTSGSAGDAGVRLLDSLTRLSNFMLSGRINSTVCPFLYGGSLCALAKKGGGIRPIAIGSVFRRLTAKLACRAVREEISSYLRPHQLGFGTRLGCEAAIHATRAYVTDNSNSDSVLIKLDIRNAFNSLERDTLLSEAIEHIPSLYPFLYQVYRFPSNLYYNHELILSQVGAQQGDPLGPLVFSLAIHKAILDIKSPLNLWYLDDGTIGGKPEELRRDLETLIPRFKELGLEVNPSKCEFFPCSSGARAHFAGFGSLLPGLREVSPDNFYLLGSPVFLEAVPEALKSRENTLRSVRDRLEGLSAHVALVLLRVCFALPSVTYLLRTAPTWLCPEEVSSFDRTLKSTVEAIINVRLEEAQWSLAAQPIRYGGLGVRRVGDVSLPAFLASAHGVADLVAIILRYSGDGVSIPFVARALEAWSDLSEGAAVPASPHVQRAWDDVVAKLSHGRILEEATGADLARLKAVAQPESGAWLHALPSPHLGTMLDDSSLRVAVALRLGCKVCEPHRCTCGSMVEADGHHALSCRRSAGRFSRHHALNDIIRRAFVSANVPCLLEPPGLSRSDGKRPDGVTLVPWRNGKCLIWDATCVSTVAASHLGRSTLFPAAAAEDAASRKRLKYAELEPQYKFVPIAVETLGSWGADAKTLVRELGNRIRDQCGDSRSGSFLVQRLAMAIQRGNAASLMGTFAPGTVRGGLFDIHQIG

SEQ ID NO: 26905 - protein, 951 aa, Eilema sororculum
MSSSTAPVRCPHCPASLRTFNAHGLKIHIGRMHKTLQTAPTLSETDSQPPSQQSQVPQASGPYPLERVAALKASTAVIRHIPKGARNQAAGKLCEIIDECIDNNSVEDWGALLTFAYGALRVPSKDAPGNMTTKVRANIRSFGSDLFPEEPGGPGFPGSRGSRKAIEAKVYEGDLRGAVRLLVSDDSFARHNSDTLDALRAKHPSPSRPLHYPPEPDTSVPAVTVSAQDVAQALSTFYSGSAAGLDGIRPAHLKELTSGSAGENGERLLGSLARLANFLLSGQLNPAVCPYVYGASLCALAKKDGGLRPIAIGSVIRRLTAKLACRSVREAMTEYLLPHQLGFGARRGCEAAIHATRTYVMDTSNSNCVVLKLDLRNAFNTLERDVLLSEVKDLIPSLYPFLFQVYHHPSNLFFNNTLISSQVGAQQGDPLGPLVFSLAIHKVITELKSDLNVWYLDDGALGGTPEVVCQDLNALILRFRELGLEVNPSKCELFPCSTEARACFPFFSALLPGLKELSSHSFTLLGSPIFVDGVPEAIFSRNELLLTARERLKDLSAHVALVLLRMCFALPKLTYLLRTVPTWVCPAEVAAFDDTLKSTVESILNISLNEDQWTQATLPIRHGGIGVRRAWDVGLSAFLASAHGAADLVTVILNNNGGKVSVPYAAGAETEWLARSSAVSSPVTAHAQRAWDESMVEGLRERLVEGAAGANLARLRAVSQPESGAWLHALPSPHMGTLLDDNSLRVAVALRLGCKVCETHRCTCGSMVGDDGQHALSCRRSAGRFPRHHALNDILRRAFVSADIPCLLEPPGLSRSDGKRPDGMTLVPWRNGKCLLWDATCVSTVASSHLSRTVLFPAAAAEDAAEKKRGKYAALAERYIFAPFAVETMGSWGADAKNLVSELGRRLRDKTGDSRSASYLGQRLSVAIQRGNAASVMGTFAPGTVRSGLID

SEQ ID NO: 26906 - protein, 951 aa, Eilema sororculum
MSSSTAPVRCPHCPASLRTFNAHGLKIHIGRMHKTLQTAPTLSETDSQPPSQQSQVPQASGPYPLERVAALKASTAVIRHIPKGARNQAAGKLCEIIDECIDNNSVEDWGALLTFAYGALRVPSKDAPGNMTTKVKANIRSFGSDLFPEEPGGPVFPGSRGSRKAIEAKVYEGDLRGAVRLLVSDDSFARHNSDTLDALRAKHPSPSRPLHYPPEPDTSVPAMTVSAQDVAQTLSTFYSGSAAGLDGIRPAHLKELTSCSAGENGERLLGSLARLANFLLSGQLNPAVCPYVYGASLCALAKKDGGLRPIAIGSVIRRLTAKLACRTVREAMTEYLLPHQLGFGARRGCEAAIHATRTYVMDTSNSNCVVLKLDLQNAFNTLERDVLLSEVKDLIPSLYPFLFQVYHHPSNLFFNNTLISSQVGAQQGDPLGPLVFSLAIHKVITELKSDLNVWYLDDGTLGGTPEVVCQDLKALIPRFRELGLEVNPSKCELFPCSTEARACFPCFSALLPGLKELSPHSFTLLGSPIFADGVPEAIFSRKKLLLTARERLKDLYAHVALVLLRMCFALPKLTYLLRTVPTWVCPAEVAAFDDTLKSTVESILNISLNENQWTQATLPIRHGGIGVRRACDVGLSAFLASAHGAADLVTVILNNNGGKVSVPYAAGAETEWLARSSAVSSPVTTHAQRAWDESMVEELRERLVGGAAGANLARLRAVSQPESGAWLRALPSPHMGTLLDDNSLRVAVALRLGCKVCETHRCTCGSMVGDDGQHALSCRRSAGRFPRHHALNDILRRAFVSADIPCLLEPPGLSRSDGKRPDGMTLVPWRNGKCLLWDATCVSTVASSHLSRTVLFPAAAAEDAAEKKRGKYAALAERYIFTPFAVETMGSWGADAKNLVSELGRRLRDKTSDSRSASYLGQRLSVAIQRGNAASVMGTFAPGTVRSGLID

SEQ ID NO: 26907 - protein, 908 aa, Eilema sororculum
MAATLHTPPTPSSPRIPQVSDAGTLGRVPSLRAGTAVLRHIPKGARNQAAGRLSDIINSCVDRNGVDEWSALLTFAYGALKNPPRDAPGNVTAKVKANIQSFGTSETTGELQEIIARRPGTRGKRTAIEAKVFEGDLRGAVRLLVSSESFTQHNTDALNALELKHPSPSRPLSFPPAPDSSFRALSVSEEDVASALNSFYSGSAAGLDGLRPGHLKELTSGSAGENGRRLLECLTKLTNFVLSGQLNPEVCPYLYGGSLCALGKKDGGIRPIGSVFRRLSAKLGCRAVREAMADYLQPHQLGFGTSRGCEAAIHATRAFFLNPVNSGSVVLKLDIRNAFNSLERDVLLTEVREQIPSLYPFLFQMYYSPSSLFFGESLIASRVGAQQGDPMGSLVFSLAIHKVIMDLNSELNLWYLDDGTLGDALQDVYQDLEILIPRFKALGLEVNSSKCEIFPCSVEARKHLTPFISLLPNIKELSHSSFLLLGSPIFLEGLPDAICARKDLLLAAQEHLRDLSAHVALVLLRICFALPKLTYLLRTTPTWLCPTEIAEFDDTLRSITESILNVVLDATQWGQATLPIRCGGVGVRCARDVGVPAFLASAHGVSRLVTLILSSNGDGARVPFVADAESVWAARSSGAENPTSRSVQRAWDDVLVGQVRVQLLEGASGADVARLRAVAQPESGAWLHALPSPHLGTLLDDGSLRVALRLGCRVCESHRCTCGSTVEADGHHALSCRKYAGRFSRHYALNDVIRRALVSAGVPCVLEPPGLSRSDGKRPDGMTLVPWKSGKCLLWEATCVSTVAPSHLGRTVRFPAAAAEFAADGKRIKHEALQTRYLFVPFAVETLGCWGVEAKKFVEDIRRSIGEKSGDYRAGSYLMQSLAIAIQRGNAASVMGTFAPGTGLGAPF

SEQ ID NO: 26908 - protein, 950 aa, Eilema sororculum
MDSGSAPSSCPYCPQSSRIFTARGLKTHITRVHKEIRSTAATLHTPPTPLSPRIPQVSDAGTLGRVPSLRAGTAVLRHIPKGARNQAAGRLSDIINSCVDRNGVDEWSALLTFAYGALKIPPRDAPGNVTAKVKANIQSFGTSETTGELQEIIARRPGTRGKRKAIEAKVFEGDLRGAVRLLVSSESFTQHNTDALNALELKHPSPSRPLSFPPAPDPSFRALSVSEEDVASALNSFYSGSAAGLDGLRPGHLKELTSGSAGENGRRLLECLTKLTNFLLSGQLNPEVCPYLYGGSLCALGKKDGGIRPIAIGSVFRRLSAKLGCRAVREAMADYLQPHQLGFGTSRGCEAAIHATRAFVLNPVHSGSVVLKLDIRNAFNSLERDVLLTEVREQIPSLYPFLYQMYYSPSNLFFGESLIASRVGAQQGDPLGPLVFSLAIHKVIMDLKSELNLWYLDDGTLGGAPQDVYQDLEILIPRLKALGLEVNPSKCEIFPCSVEAREHLTPFISLLPNIKELSHSSFLLLGSPIFLDGLPDAICSRKDLLLAAQEHLRDLSAHVALVLLRMCFALPKLMYLLRTTTTWLCPTEIAEFDDTLRSITESILNVALDATQRGQATLPIRCGGVGVRCARDVGVPAFLASVHGVSGLVTLILGSNGDGARVPFVADAESVWAARSSGAENPTSRSVQRAWDDVLVGQVRAQLLEGASGADVARLRAVAQPESGAWLHALPSPHLGTLLDDDSLRVAVALQLGCRVCESHRCTCGSTVEADGHHALSCRKCAGRFSRHYALNDVIRRALVSAGVPCVLEPPGLSRSDGKRPDGMTLVPWKSGKCLLWDATCVSTVAPSHLGRTVRFPAAAAEVAADGKRIKYEALQTRYLFVPFAVETMGCWCVEAKKFVEDIGRRIGEKSGDYRAGSYLVQRLAIAIQRGNAASVMGTFAPGTGLGAPF

SEQ ID NO: 26909 - protein, 885 aa, Eilema sororculum
MDSGSAPSPCPYCPQSSRIFTARGLKTHITRVHKEIRSTAATLHTPPTPPSPRIPQVSDASTLGRVPSLRAGTAVLRHKSKGARNQAAGRLSDIINSCVDRNGVDEWPALLTFAYGALKIPPRDAPGNVTAKVKANIQSFGTSETTGELQEIIARRPGTRGKRKAIEAKVFEGDLRGAVRLLVSSESFTQHNTDALNALELKHPSPSRPLFSSRAGLVVSSIVCFGGGCSALNSFYSGSAAGLDGLRPGHLKELTSGSAGENGRRLLECLTKLTNFLLSRQLNPEVCPYLYGGSLCALGKKDGGIRPIAIGSVFRRLSGKLGCRAVREAMAHPEAQLMRLQVILQPHQLGFGTSRGCEAAIHATRAFVLNPVHSGSVVLKLDIRNAFNSLERDVLLTEVREQIPSLYPFLYQMYYSPSNLFFGESLIASRVGAQQGDTLGPLVFSLAIHKVIMDLKSELNLWYLDDGTLGGAPQDVYQDLEILIPRLKALGLEVNPSKCEIFPCSVEAREHLTPFISLLPNIKELSHSSFLLLGSPIFLDGLPDAICSRKDLLLAAQEHLRDLSAHVALALLRMCFALPKLMYLLRTTPTWLCPTEIAEFDDTLRSITESILHVALDATQWGQATLPIRCGGMGVRCARDVGVPAFLASVHGVSGLVTLILGSNGDGARVPFVADAESVWAARSSGAENPTSRSVQRAWDDVLVGQVRAQLLEGASGADVARLRAVAQPESGAWLHALPSPHLGTLLDDDSLRVAVALRLGCRVCESHRCTCGSTVEADGHHALSCRKCAGRFSRHYALNDVIRRALVSAGVPCVLEPLGLSRSDGKRPDGMTLVPWKSGKCLLWDATCVSTVAPSHLGRTVRFPAAAAEVAADGKRIKYKALQS

SEQ ID NO: 26910 - protein, 724 aa, Eilema depressum
MKDVALAVESFYSGSAAGLDGLRPAHLKELTSASAGDSGRRLMECLTKLSNFLLSGQLNPDVCPYLYGGALCALRKKDGGVRPIAIGSVFRRLAARLACRAVRDGMAEYLRPHQLGFGTSRGCETAIHATRAYIMSSERAGYVVLKLDIRNAFNSLERDVLLSEVREHIPSLYPYLYQVYYSPSNLYFGEKLIASKVGAQQGDPLEPLVFSLAIHKAITELKSELNLWYLDDDGTLGGSPQDVYKDLEGLIPRLRSLGLEVNPSKCEIFPCSAEARLHLERFNTLLPDIKELSHSSFSLLGSPIFPAGLPEAVSSRKDLLVMAQEHLRGLSAHVGIVLLRTCFALPKLTYLLRTTPTWLSPAEVSEFDDTLKAVVESILNVALDGTQWRQATLPIRHGGIGVRCASEVGVPAFLASAHGVSGLVSLIVGTNGDEAEVPFIADAESVWAARTSEAKRPASRCVQRAWDDIVAGQVRAQLVEGAVGADKTRLRAVAQPEAGAWLHALPSPYLGTLLDDNSLRVAVAPRLGCRVCEPHRCTCGSTVEADGHHALSCRKCAGRFSRHHALNDTIRRALVSADVPCMLKPPGLSRSDGRRPDGMTLVPWKNGKCLLWDATCVSTVAPSHLGRTVRFPAAAAEDAAAGKRLKYEALQVWYLFVPFAVETSGCWSAEAKRFVEDIGRRLREKSGDSRAGSYLVQRLAIAIQRGNAASVMGTFATGTGLSAF

SEQ ID NO: 26911 - protein, 1145 aa, Tenthredo notha
MATQIEEHIAASNIINEDPPMFEGGSVQIPMPITDLVHCPVCGPRGLQGAFPNSRSLNRHIESDHAHLDVTWSCKQCNKRFPTHRGIAIHLGKCRNQIEPIPIVGGELCQLCGLRFANKRALGAHENSKHPAIRNEKRKALLERAPPHDAPKLKAWTQDEINVLRTLNERFKGLRDINVKIHGLLPSKTATQIGDKRRSLFGSRSSQAHPAAAILPEPAHPAMATQPEAADEQLDAPIRMIETPAAPSETDRAYIGKWRHSIANHIRGLPRIPESSALHKFDADLTAIIDHALTEAGATKKDLDTITAEIHKQLAPSAEQVPSRRRRRYEPGRLSQKARDKRYRYSRCQNLFSRNPRKLAEMVISGDLSLVNPLIKPPDAAAIKEAYRGLWSGAPPVADRGTNHLAAAGVSNNHRLEDIRPISLEEVYARIKRLQKGTAAGPDRIDKSIIDDPIVGQLLTKLYNVVLLAGHLPELWRSNRTTLIPKKADDLLNIQNWRPITIGPIIARVFSGILDTKLKRTLKLSARQKGFMPENGCCNNISTLATGLREAKRESGAVIAILDTAKAFDTVPHIVICDSLTRAGAPRHLAQFIAESYKDCKTTIKAGDGTQVDIDIKRGVKQGDPLSPTIFNCVLDPLLQELETEERGLVIEGQRVACLAFADDIALLGKDKRSAQSLLETADRFLSCLSMKLAPHKCHAFEIVNKGKTYFTRNPDLKVGASPVPYLDAEGSTGYLGARVGPWKGILKGNESRCLLDAVTRLHGLPLKVGQKLQLLTTYVLPHFLYGLITNGTSKTALVELDTAIRQVIKKMLHLQTSTTNFLFYTRKKDGGLGILNFEKVFLHARLKHWAKLREANDPVLCAIASNETNLKKARDWCKHLGIEWPPSAKDVEKSKIHHKSAFWQSWSSTLGHQGHGAKDFANNTLSNAWLRRPHLLKPNRFITALQMRTNTVGTRVNLALEHPTDDVSCRGCGATAETLGHILGQCSATKPAWIKRHNEIDNFIARKIIDTGNILLREPEVAVGAERFRPDLVEIDKAQSQLVIYDTTVVYERDDYLEAAHAKKVLKYANVARHLAEAHQCQWWSVVPLVVGTRGAIPSSTRSALTAIGCKNRDVITISLMALRSSVEMFHSFIDKYGRRRHRP

SEQ ID NO: 26912 - protein, 1098 aa, Harmonia axyridis
MRWSEEENILIMRIHFVAKELQQSTGRTYREILTTTWNDINPEKQLYPNLLSNRVRCILQNEKFSVVELNAIQQSTRPYAPVMEHDDERIEISQPITNTNEGRNTRQNKIERIFNKNMQMYMGISPQERPRVPRLKGSQYIIKSVHKVNEVLRNRMSEETTLEEIIDYVYIGAITVCEDNNVQLKSVKRTPSRETIPPWKKRLETKITTIRKKIGVLCTYLQSNSPSRKLLRSVHRIASELHIKSRHVDFQHKLEVACDTLKQKAKALGNRIQRYNDRVKRYKNNQLYYKNTKQFFRSLENTMTKEEKTPTAKEMHTAWKEIWGHEEMHDDTAFWIRDAERNAGKYAMKEMRVTEDDITTTIKKTNNWSAPGPDGIHNYWWKYFSSTHGFLAGIFQKALADPSIIPDSITVGITHMIPKGNTNGNPKNYRPITCLSAIYKILTGILTLHIARHVGKHSILAREQGGCRKDARGCKELLVIDSLITKQAKRRQRNISMAWIDYKKAFDSIPHSWLLKTLQLYGVSKDVITLLAHSMKSWRTRLLVNNQQGTDITEELNIKKGLFQGDNLSTLWFCLAINFLSKLLNDSNYGYNIENTNKTKITHQLYVDDLKLFAAGEDQLTRLLKIVSYFTKTIRMEMGLDKCAILHVKRGKIVSGGHVLAQDEVTIQTLNPGETYKYLGIQQGLDINTTEAKTTFKNKFLTRIKKVLQSKLNARAMFTSINTWAMPVLTYSFGVIKWSPTDLKAIDIQVRALLTKHGIHHPRASVNRLYIPRNDGGRGLQNIETAHYKAVTEMRQYFLKKNTTFFKTLFKVDENITPLNLASTNQPAEPSTITSLSEEWHGKALHGRYPTALRRNTFNKEKSVSYLKAGYLFLETEGRLAAIQDQVVPTRAYLKNIVGKNIFTDKCRKCSRATETVQHVTSSCPVLAPREYTDRHNAMAKVYHQAIAIKTGLIKSFKKIHEYSPQELLENDELKLYWDSPLITDRSIPHNRPDIVIFEKAGNRATIIDVTIPADDNAERAYTEKITKYHDLAFELKEIYKLTSTSIIPLIITTNGLVEKHLVENTNRLGLEERLISDAQREVILWTTRIMRGFLTSE

SEQ ID NO: 26913 - protein, 964 aa, Harmonia axyridis
MVKKKKKKKNIYIYIYIYIYIYIYFFFFFFNPPIDGSVRWEHRSTLQTRCPQELVSIYIYIYIKKKKKKKKKKNTIRNKIGILHTYLNTPSPTRKLQRKVTRLTSELHIQSRNEQLKQDLMTACDNLKQKAKALGNRIRRYNERVRRYQNNQLYYKNAKQFYRSLEEKITPEEEYPKKEDMHAVWREIWSRREQHDDEAFWIREAEKDTDKYIMQQVTITEQDIKTTIKKSSNWSAPGPDGIQNYWWKNYTATHKTLARIFQEALVDPSIMPEHITLGITHMLPKGTKNSDPKNYRPITCLPTIYKILTGVLTLHLWKHVEKYNIMAREQNGCRRDTQGCKEVLVVDSLITKQVKKKQRNISVAWIDYRKAFDSIPHSWLLKTLQLYGVSKAIIDLLKHLMVAWKTKLRVNTNEGTYITDEISIKRGIFQGDKLSTLWFCLAINFLSKLLNNTNYGYIIERRNNIKINHRLYIDDLKLYATNEEQLIRQLKIVASFSRSIRMEMGLDKCAVLHVKRGKITTREAMLVQDELEIQRLDPEGTYKYLGIQQGLDIKTSEAKTTFKQKFMDRVKKIVQSKLNAKAMFISISTWAIPCLAYSFGILKWSTTELKAIDTQVRKLLTKYGIHHPHASVNRLYIPRKDGGRGLQNIETTHHRATRELRQYIHSKDTPFFQALITEDENITALNLASTDQQSQPPDIAQLTEEWHGKALHGRYPTALKRNNVDRERSLTYLRNGYLYAETEGRLAAIQDQVVPTRSYLKNIAGCNILNDKCRKCSQHVESIQHITSSCPVLAPRAYTERHNAMAKAYHQAIAIKYGLLKTSKKIHEYLPRDFMENDKVKLYWDHPFATDRSIAHNRPDIVIFEKDPKKVTILDITIPADDNADKAHTEKIVKYHDLAFELKEINHLTSTTILPLIITTNGLVEKHLAENTERLGLDEKLIEKAQKEVILWTTRIVRSFLTTS

SEQ ID NO: 26914 - protein, 1174 aa, Harmonia axyridis
MCQGGRGQRAGLLRSRPEEEPDGVSCGASGAAPRDGTVSPISDPPSRGGNQSLDGTQYRPAEAPRTRDGRVRWTEEENILIMRTHFIAQELQQTTGRTYREILTTIWNEIKPERQSYPNLLSNRVRRMLESGKFSRVELNNIERSTRPFAPVPEDEDQNTECSPSETLTHQETDVNNETSQKRSKIQQIFESNSQMYTGISPQERPQIPRLKGSRKILESVQSVNDIIGTILSSQSNLEETTDCVYAGAVTVCEVNKIRLRSTEPTPRRETTPPWKIRLETKIKNIRKKIGKLHTYLQTDSPTRKLLKSIHRISSEIHIQERGVNFRQKLQMACDTLKQKVKALGNRLKRYNDRVKRYKNNQLYQKNPKQFFRSLEGTTTAQEEPPTAENMHRTWKQIWESEEEHDDTAFWIREAELEANKYTMGEMRITEDDIRTILKKTNNWSAPGPDGIHSYWWKYFDCTHRILANIFQRALTNPSVIPESLTDGITHMLPKGEKSGNPRNYRPITCLSSVYKVLTGVLTLHISRHIGQHNILAREQNGCRRDARGCKEFLTVDSLITRQAKRKQRNISMAWIDYKKAFDSIPHSWLLKTLQLYGVSEALVRLLRHLMNSWRTRLHVNINGRTYTTEELQIRRGIFQGDRLSTLWFCLSINFLSKLLNKSHHGYIIEKRHNTKINHQLYIDDLKLYAANEDQLMSQLRVVASFTETIKMEMGLDKCAVVHVKRGKLMQGEGMLVQDGIEIQRLNTEETYKYLGIKQGLEIKTAETKTTFRIKFLNRVNKILQCKLNAKAMVTSINTWAMPYLAYSFGVVKWSAADLKDIDIQVRKLLTRHGIHHPRASVNRLYIPRKDGGRGLQSVETAHHKAVIEMRNYFYKKNTPFSRVLCKEDENITALNLASSNQPTEPPTSEKLSEEWHGKALYGRYPTALKRRTVNKEKSVSYLKSGYLFAETEGRLAAIQDQVVPTKAYMKNIIGKNIPNDKCRKCAQSLETIQHITSSCSVMAPREYTHRHNAMAKIYHQAIAIQAGLIKETKKVHEYIPREILENDGTRLYWDSLLTTDRPVPHNRPDIVIFDKANRKVIIIDITIPADDNIERAYTEKKTKYHDLSFELKKIYKLTSTTILPLIISTNGLVEEHLVENTHHLGLEERLISDAQREVILWTTRVVRGFLTSE

SEQ ID NO: 26915 - protein, 1174 aa, Harmonia axyridis
MCQGGRGQRAGLLRSRPEEEPDGVSCGASGAAPRDGTVSPISDPPSRGGNQSLDGTQYRPAEAPRTRDGRVRWTEEENILIMRTHFIAQELQQTTGRTYREILTTIWNEIKPERQSYPNLLSNRVRRMLESGKFSKVELNNIERSTRPFAPVPEDEDQNTECSPSETLTHQETDVNNETSQKRRKIQQIFESNLQMYTRISPQERPQIPRLKGSRKILESVQSVNDIIGTILSSQSNLEETTDYVYAGAITVCEVNKIRLRSTEPTPRRETTPPWKIRLETKIKNIRKKIGKLHTYLQTDSPTRKLLKSIHRISSEIHIQERGVNFRQKLQMACDTLKQKVKALGNRLKRYNDRVKRYKNNQLYQKNPKQFFRSLEGTTTAQEEPPTAENMHRTWKQIWESEGEHDDTAFWIREAELEANKYTMGEMRITEDDIRTILKKTNNWSAPGPDGIHSYWWKYFDCTHRILANIFQRALTNPSVIPESLTVGITHMLPKGEKSGNPRNYRPITCLSSVYKVLTGVLTLHISRHIGQHNILAREQNGCRRDARGCKELLTVDSLITRQAKRKQRNISMAWIDYKKAFDSIPHSWLLKTLQLYGVSEALVRLLRHLMNSWRTRLHVNINGRTYTTEELQIRRGIFQGDRLSTLWFCLSINFLSKLLNKSHHGYIIEKRHNTKINHQLYIDDLKLYAANEDQLMSQLRVVASFTETIKMEMGLDKCAVVHVKRGKLMQGEGMLVQDGIEIQRLNTEETYKYLGIKQGLEIKTAETKTTFRIKFLNRVNKILQCKLNAKAMVTSINTWAMPYLAYSFGVVKWSAADLKDIDIQVRKLLTRHGIHHPRASVNRLYIPRKDGGRGLQSVETAHHKAVIEMRNYFYKKNTPFSRVLCKEDENITALNLASSNQPTEPPTSEKLSEEWHGKALHGRYPTALKRRTVNKEKSVSYLKSGYLFAETEGRLAAIQDQVVPTKAYLKNIIGKNIPNDRCRKCAQSLETIQHITSSCSVMAPREYTDRHNAMAKIYHQAIAIQAGLIKETKKVHEYIPREILENDGTRLYWDSLLTTDRPVPHNRPDIVIFDKANRKVIIIDITIPADDNIERAYTEKRTKYHDLSFELKEIYKLTSTTILPLIISTNGLVEEHLVENTHHLGLEERLISDAQREVILWTTRIVRGFLTSE

SEQ ID NO: 26916 - protein, 833 aa, Harmonia axyridis
MACDTLKQKVKALGNRLKRYNDRMKRYKNNQLYQKNPKQFFRSLEGTTTAQEEPPTAENMHRTWKQIWESEGEHDDTAFWIREAELEANKYTMGEIRITEDDIRTILKKTNNWSAPGPDGIHSYWWKYFDCTHRILANIFQRALTNPSVIPESLTVGITHMLPKGEKSGNPRNYRPITCLSSVYKVLTGVLTLHISRHIGQHNILAREQNGCRRDARGCKELLTVDSLITRQAKRKQRNISMAWIDYKKAFDSIPHSWLLKTLQLYGVSEALVRLLRHLMNSWRTRLHVNINGRTYTTEELQIRRGIFQGDRLSTLWFCLSINFLSKLLNKSHHAINHQLYIDDLKLYAANEDQLMSQLRVVASFTETIKMEMGLDKCAVVHVKRGKLMQGEGMLVQDGIEIQRLNTEETYKYLGIKQGLEIKTAETKTTFRIKFLNRVNKILQCKLNAKAMVTSINTWAMPYLAYSFGVVKWSAADLKDIDIQVRKLLTRHGIHHPRASVNRLYIPRKDGGRGLQSVETAHHKAVIEMRNYFYKKNTPFSRVLCKEDENITALNLASSNQPTEPPTSEKLSEEWHGKALHGRYPTALKRRTVNKEKSVSYLKSGYLFAETEGRLAAIQDQVVPTRAYLKNIIGKNIPNDRCRKCAQSLETIQHITSSCSVMAPREYTDRHNAMAKIYHQAIAIQAGLIKETKKVHEYIPREILENDGTRLYWDSLLTTDRPVPHNRPDIVIFDKANRKVIIIDITIPADDNIERAYTKKRTKYHDLSFELKEIYKLTSTTILPLIISTNGLVEEHLVENTHHLGLEERLISDAQREVILWTTRIVRGFLTSE

SEQ ID NO: 26917 - protein, 1087 aa, Coccinella septempunctata
MRWSEEENILLMRTHFVAQELQQITGGTYREILTTTWNEINPSKQSYANLLSNRVKWILQNNKLSSIELDEIQRSVRPFAPVAGNNELPVEVTTPETPMMRQPSRIARIFERNLQMYIGVSPSQRPKIPRLKGSINIIANVHEINNILKIRINGRTSLEEIVDYVYAGAAAVCEENRIPLLKEEPPLRKDKIPPWKIRLESKITAIRKKIGVLHTYLHTQTPTRRVLRTVHHIASSLHVKRSEDFRQKLEVACDILKQKVKVLGNRIQRYNDRVKRFRNNQLYYKNTKQFYRSLEEGEDIEETPPAVESMHMAWKEIWKHEDNHDDTAFWIRDAEEKAKNYTMEEVHITENDIKSVMKKTNNWSAPGPDGIHNYWWKYFDSTHEHLANIFQKALTDPSVIPKSIAAGITRMIPKGKVNGNPKNFRPITCLPAVYKILTGTLTLHISKHIGKYNIIAREQAGCRKDTRGCKELLIIDAPITKQVKKRQRNISIAWIDYRKAFDSIPHSWLLKTLRLYGVAESVVNLLAELMTSWRTRLLVNTKNNTITSNEINIEKGLFQGDRLSTLWFCLAINFLSGLLNNSGYGYIIDKTNNTKTSHQLYVDDLKLYAADKAQLTRMLKIVTSFTNTIRMTIGIDKCATLHVRRGKIVEGDQELIRNEETIQSLEPKGTYKYLGIQQGLDIETRIAKNTFQDKFFSRLRKILQSKLNAKAMFTSVNSWAMPALTYSFGIVKWSKEELKTMDIKVRALLTKHGIHHPHASANRLYIPRKDGGRGLQNIEITHHTTISEIRRYFHGKTNGFIRTICRIDEHVTPLNLAANTQQTQQATMSGFAEGWHGKALHSRYPTALKRENVDRERSVTYLKAGYLFPETEGRLAAIQDQVVPTRAYLKNIAKKNMITDKCRKCSHATETIQHVMSSCPILAPREYTDRHNAMAKVYHQELALKYGLIRKPKKVHKYAPKELLQNDEVKLYWDFPLVTDRPIPHNRSDIVIFEKTGRKVTIVDITIPADDNAERAYTEKITKYHDLAFELKRTHKLTYTAILPLIITTTLAENTRRLKLDERLISDAQREVILWTTRILRGFLTSA

SEQ ID NO: 26918 - protein, 1222 aa, Coccinella septempunctata
MQGGAMPSGTDGPAHPSHPAPRLAAWEAVEQKAPVTRSMMQGGRGQQAGPLRSRLEVEPVGVSCGASGAAPRDGTVSHSSNTFRRNRRSVSLDGIPSRPIPENLLELGSPSLVGINALPTEAPIRRDGRMRWSEEENILLMRTHFVAQELQQITGETYREILTTTWNEINPSKQSYANLLSNRVKWILQNNKLSSIELDEIQRSVRPFAPVAGNNELPVEVTTPETPMMRQPSRIARIFERNLQMYIGVSPSQRPKIPRLKGSRNIIANVHEINNILKIRINGRTSLEEIVDYVYAGAAAVCEENRIPLLKEEPSLRQNKIPPWKIRLESKITALRKKIGVLHTYLHTQTPTRRVLRTVHHIASSLHVKRSEDFRQKLEVACDILKQKVKVLGNRIQRYNNRVKRFRNNQLYYKNTKQFYRSLEEGEDMEETPPAVESMHMAWKEIWKHEDNHDDTAFWIRDAEEKAKNYNMEEVHITENDIKSVMKKTNNWSAPGPDGIHNYWWKYFDSTHEHLANIFQKALTDPSVIPKSITAGITRMIPKGKVNGNPKNFRPITCLPAVYKILTGTLTLHISKHIGKYNIIAREQAGCRKDTRGCKELLIIDALITKQVKKRQRNISIAWIDYRKAFDSIPHSWLLKTLRLYGVAESVVNLLAELMTSWRTRLLVNTKNNTITSNEINIEKGLFQGDRLSTLWFCLAINFLSGLLNNSGYGYIIDKTNNTKTSHQLYVDDLKLYAADKAQLTRMLKIVTSFTNTIRMTIGIDKCATLHVRRGKIVEGDQELIRNEETIQPLEPKETYKYLGIQQGLDIETRIAKNTFQDKFFSRLRKILQSKLNAKAMFTSVNSWAMPALTYSFGIVKWSKEELKTMDIKVRALLTKHGIHHPHASANRLYIPRKDGGRGLQNIEITHHTTISEMRRYFHAKTNSFIRTICRIDEHVTPLNLAAHTQQAQQATMSGFAEEWHGKALHGRYPTALKRENVDRERSVTYLKAGYLFPETEGRLAAIQDQVVPTRAYLKNIAKKNMITDKCRKCSHATETIQHVMSSCPILAPREYTDRHNAMAKVYHQELALKYGLIRKPKKVHKYAPKELLQNDEVKLYWDFPLVTDRPIPHNRPDIVIFEKTGRKVTIVDITIPADDNAERAYTEKISKYHDLAFELKRTHELTYTAILPLIITTNGLVEKHLAENTRRLRLDERLISDAQREVILWTTRILRGFLTSA

SEQ ID NO: 26919 - protein, 1194 aa, Mythimna impura
MLTRSRAREQETHPTSSGSSLSSASQPPGPAPAVSPVIPAAAVASSSSDEYFSPPTTPPPARRRGRGRPPASLRPRGPPASDRVPAAGGSVQRMRWTQSINENVMRSYFGATEGGSNLTAYRGRMLSLFQVLEPTVNVSAQRLSDQVRVIQRNRMLDDAVLDRLRLESQRSRASSATPPAAVQLQPSALPRPDHVGDADDDAAISVSTQCNERLRSALEDAFREYRSTPPGLRPRLPRLPMHKRNRALVCALDSQLSNCFDSSKDLADTHSILYCAAAAACRVAHVKFPNCDRATRPAVPAWQRRIERRIGEARALIGKLICFREGNTRPRVMRFVRRAFLGTDISPQNYLPCVTERIDFLKQKVYAWASRIRRYKRRVERYTQNRTFQSNERWVYRTWERPDQDVTDTRLPDDDAMCSFWRRIWSVPVSHIEGDWIREVERTCDLLPEMGAITISPQDVARAVRPLPNWKSPGPDGLHNFWIKWFQGSHARLASQFQSALESGSLPEFLTTGITHLLHKSGSTADPKNYRPITCLPTVYKVLTSILRAKINTHIETNSIMSASQNGCRNGSRGTKELLLIDMAISQQVRRSRKDLSTCWIDYKKAYDSVPHTWLMRVLELYKVDTTLRTFLMSCMRQWRTVLHYPGCRQIRENSEPIRIERGIFQGDSLSPLWFCLALNPLSTLLEGSGLGYRLKRGGQVISHLLYMDDLKLFAPNNLHLMELLKVTETFSNAIRMEFGVDKCAVMHVKRGEIMESVGTHLRSLCSTETYKYLGMSEALGINAADVKQSLKERFFGRLNMVLKSLLSGGNKVRAFNGWVMPVLMYSFGILKWTQTELDALDRRVRTLLTANRMHHPRSSVMRLYIPRKCGGRGFLNAKTLHNREVCSLREYFLKTDVGMHRDVVTVDKGLTPLSLANGNWRKPIILDTNDRREVWQSKELHGRFYRALHGPDVDLLASVSWLRFGDLFGETEGFVCAIMDEVVMTNNYRKYIVKDGTADICRACHRPGESIRHIISGCSHLANGDYLHRHNLVAKIIHQQLALKYNLVESEVPYYKYVPDPVLDNGSITLYWDRSIITDRTIVANKPDIVVIDRLERRTVIVDIAVPHDDNLVKAEKDKQTKYLDLAREVVDMWEVDTAVIVPIVVTANGLISKSLDQHLRRLSLGSWIKGLIQKAVLLDTARIVRRFLSQEP

SEQ ID NO: 26920 - protein, 1086 aa, Omphaloscelis lunosa
MLTRSRARRLLQSTHPTSSGSSLSSASQLPDPAPDVSPVIPVAAVASSSSDEYFSPPTTPPPARRRGRGRPPASLGLRGPPASDRVPAPGGSVQRMRWTQTVNENVMRAYFGATEGGSNLTAYRGRMLSLFQVLEPAVNVSAQRLSDQVRVIQRNHMLDDVVLDRLRLESRNNHVTPASPQVTVQLQNLPSSSPRPDRVGEEDDDGVISVSSQCNARLRSALDDAFREYRSIPPGLRPHLPRLPMHKKNKALMCTLDSLLSNCFDGSKDLADTHSILYCAAVAACRVAHVKFPNSDRAPRPKPAVPAWQCRIERRIGEARVLIGKLTCLREGNTRPRVMRFVKRAFSGTDISSRDYLSRVTERIDFLKQKICAWANRIRRYRRRVERYTQNRTFQSDERWVYRAWERPDQGVIDMRLPDDDAMCSFWRSIWSAPINHTEGDWTREIERACEQIPEMGALTIGPRDVARAVRPLPNWKSPGPDGLHNFWIKWLQRSHARLASQFQSALESGSLPQFLTTGITHLLHKSGNTAEPKNYRPITCLPTVYKVFTYILRAKINKHIDTNSIMSASQNGCRNGSRGTKELLLIDMAISQQVRRSRRDLSTCWIDYKKAYDSVPHTWLMRVLELYKVDATLRTFLMSCMRQWRTVLRYPGCRHILRNSEPIRIERGIFQGDSLSPLWFCLDLNPLSTLLENSGLGYRLRRGGQVISHLLYMDDLKLFAPNNLQLLELLKVTETYSSAIRMEFGVDKCAVMHVKRGEIVESVGTHLSDSIQLRSLSSIETYKYLGMSEALGVNAADMKQSLKKRFFNRLNKVLNSILSDGNKVRAFNGWVMPVLMYSFGILKWTQTELDALDRRVRTLLTANRMHHARSSVMRLYIPRKCGGRGFLNAKTLHNREVCSLWEYFLEADVGMHRDVVTVDKGLTPLSLANENWHKPIVLDTNDRREVWQSKELHGRFYRALHGPDVDLLASVSWLRFGDLFGETEGFVFAIMDEVMMTNNYRKYIVKDGTVDICPACHRPGESIRHIISGCSRLANGDYLHRHNLVARIIHQQLTLKYSLVESEVPYCYVVRTRSFEKARITVCLR

SEQ ID NO: 26921 - protein, 1207 aa, Omphaloscelis lunosa
MLTRSRARKLIDTHPTSSGSSLSSASQLPDPAPDVSPVIPVAAVASSSSDEYFSPPTTPPPTRQRGRGRPPASLGLRGPPASDRVPAPGGSVQRMRWTQTVNENVMRAYFGATEGGSNLTAYRGRMLSLFQVLEPAVNVSAQRLSDQVRVIQRNHMLDDVVLDRLRLESRNNHVTPASPLVTVQLQNLPSSSPRSDRVGEEDDDGVISVSSQCNVRLRSALEDAFREYRSIPPGLRPQLPRLPMHKKNKALMCTLDSLLSNCFDGSKDLADTHSILYCAAVAACRVAHVKFPNSDRAPRPKPAVPAWQCRIERRIGEARVLIGKLICFREGNTRPRVMRFVKRAFSGTDISFQDYLTRVTERIDFLKQKIYAWANRIRRYRRRVERYTQNRTFQSDERWVYRAWERLDQGVIDTHLPDDDAMCSFWRSIWSAPVSHTEGDWTREIERACEQIPEMEALTISPQDIARAVSPLPNWKSPGPDGLHNFWIKWFQRSHARLASQFQSALESGSLPQFLTTGITHLLHKSGSTAEPKNYRPITCLPTVYKVFTSILRTKINKHIDTNSIMSASQNGCRNGSRGTKELLLIDMAINQQVRRSRRDLSTCWIDYKKAYDSVPHTWLMRVLELYKVNETLRTFLMSCMGQWRTVLRYPGCRQILRNSEPIRIERGIFQGDSLSPLWFCLALNPLSTLLEDSGLGYRLRRGGQVISHLLYMDDLKLFAPNNLQLLELLKVTETFSSAIRMEFGVDKCAVMHVKRGEIVESVGTQLSDSIQLRSLSSIETYNYLGMSEALGVNAADMKQSLKERFFNRLNKVLNSLLSGGNKVRAFNGWVMPDLMYSFGILKWTQTELDALDRRVRTLLTANRMHHPRSSVMRLYIPRKCGGRGFLNAKTLHNREVCSLREYFLEADVGMHRDVVTVDKGLTPLSLANENWRKPIVLDTNDRREVWQRKELHGRFYRALHGPDVDLLASVSWLRFGDLFGETEGFVFAIMDEVMMTNNYRKYIVKDGTVDICRACHRPGESIRHIISGCSRLANGDYLHRHNLVARIIHQQLALKYSLVKSEVPYYRYVPDPVLENGNITLYWDRSIITDRTIVANKPDIVVIDRLERRTMIIDIAVPHDENLVKAEKDKQIKYLDLAREVVDMWDVDTAIIVPIVVTANGIIAKSLDQHLKRLSLGSWIKGSRKRYCWTRRVLSGGSSLRSPDHR

SEQ ID NO: 26922 - protein, 1049 aa, Furcula furcula
MLDDAVLDRLRSEVQGSRVVPCIPSSQAVAPAVNTAPAPRLAATSGDDRDDMSTNISTNVSTQLRSTLEDVVREYRTMPQGLRPRLPRLPMHKRNRALVCALDSLLSSYFDSSEDLADAHSLLYCAAMTACRVARVKFPNSDAATRPRPAVPAWQCRIERRIGEARVLIGKLTCFREGNTRPRVMRFVRRAFSGTGIDPREYFSCVTERIDFLKQKVCAWANRIRRYRARVDRYSQNNMFQRDQRWVYRSWERPSQIGGEVQRPDDDAMIRFWRNIWSVPVTHSEGDWIRDVEQVCEPIPEMGAITIRPQDVADAVRPLPNWKAPGPDGLHNFWLKWLRSSHACLASLFQSAVESGSLPEFLTTGITHLLHKTNSTADPKNFTCLPTVYKTLTSILRAKIYRHVEGNSIMSASQNGCRSGARGTKELLLIDMAICQQARRNRRDLSTCWIDYKKAYDSVPHTWLVRVLELYKVNTTLRTFLASCMRQWRTVLLYPGSRQTLGDGEPIRIERGIFQGDSLSPLWFCLALNPLSTLLKSSGLGYRLRRGGQVISHLLYMDDLKLFAPTEVQLMGLLKVTETFSSSIRMEFGVDKCAVMHVKRGRLVESRSIQLSDSTDLRTLSATETYKYLGMSQALGINETDMKQSLRERFLGRLRKVLKSLLSGGNRVRAYNGWVMPVLMYSFGILKWTQTELDTLDRTVRTLLTAYRMHHPRSSVMRLYIPRKCGGRGFLNAKTLHNREIYNLREYFLHCGGEMHTDVVAVDSGLTPLSLAKGNWRRPVVLTTGDRGAVWQSKELHGRFYRALHGPDVDFSASVAWLRFGDLFGETEGSVCAIMDEVVMTNNYRKYILRDGTIDICRACHRPGESLRHIISGCSRLANGEYLHRHNQVARIIHQQLALKYRLVTSEVPYYRYVPEPVLEDGHITLYWDRSIITDRSIVANRPDIVLIDRTERRAMIVDVTVPHDENLVKAEKDKECKYLDLAHEVVDLWDIDKAIIVPIVVSAHGLMAKSLDKHLKRLTLDGWIKGQMQKAVLLETARIVRKFLSLEP

SEQ ID NO: 26923 - protein, 1051 aa, Furcula furcula
MLDDTVLDRLRSVVQGSRGAPCIPSQAVAPVVDTAPAPRLAANSDDDRDDTTTNVSTQYINLLRSTLEDVVREYRTMPQRLRPRLPRLPMHKRNRALVCALDSLLSSYFDSSEDLADAHSLLYCAAMTACRVARVKLPNTDAATRPRPAVPAWQCRIERRIGEARVLIGKLTCFREGNTRPRVMRFVRRAFSGTGIGPREYVSRITERIDFLKQKVCAWANRIRRYRARVDRYSQNNMFQRDQRWVYRSWERPSQTGGEAQRPDDDAMIRFWRNIWSVPVTHSEGDWIRDVEQVCEPIPEMGAITIRPQDVADAVRPLPNWKAPGPDGLHNFWLKWLRSSHACLASLFQSAVESGSLPDFLTTGITHLLHKTNSTTDPKNYRPITCLPTVYKTLTSILRAKIYRHVEGNSIMSASQNGCKSGARGTKELLLIDMAICQQARRNRKDLSTCWIDYKKAYDSVPHTWLMRVLELYKVNTTLRTFLASCMRQWRTVLLYPGSRQTLGDGEPIRIERGIFQGDSLSPLWFCLALNPLSTLLKSSGLGCRLRRGGQVISHLLYMDDLKLFAPTELQLMGLLKVTETFSNSIRMEFGVDKCAVMHVKRGRLVESRSVQLSDSTDLRTLSAIETYKYLGMSQALGINETDMKQSLRERFLGRLRKVLKSLLSGGNRVRAYNGWVMPVLMYSFGILKWTQTELDTLDRTVRTLLTTYRMHHPRSSVMRLYIPRKCGGRGFLNAKTLHNREICNLREYFLHCGGEMQTDVVAVDNGLTPLSLAKGNWRKPVVLTTGDREAVWQSKELHGRFYRALHGPDVDFSASVAWLRFGDLFGETEGFVCAIMDEVVMTNNYRKYILRDGTIDICRACHRPGESLRHIISGCSRLANGEYLHRHNQVARIIHQQLALKYRLVTSEVPYYRYVPEPVLEDGHITLYWDRSIITDRTIVANKPDIVLIDRTERRAMIVDVTVPHDENLVKAEKDKECKYLDLAHEVVDMWDIDRAIIVPIVVSVHGLMAKSLDKHLKRLTLDGWIKGQMQKAVLLETARIVRKFLSLEP

SEQ ID NO: 26924 - protein, 1196 aa, Mythimna impura
MLTRSRALKLNTHPTSSGSSLSSASQPPGPAPTVSPEIPVAAVASSSSDEYFSPPTTPPPARRRGRGRPPASLGPRGPPASDRVPAAGGSVQRMRWTSSINENVMRSYFGATEGGINQTAYRGRMLSLFQVLEPTVNVSVQRLSDQVRVIQRNRMLDDAVLDRLRLESQSSRVSPATTPAAVQRLPTASPRPVQVGDADDDAAISVSTQCNDRLRGALEDAFREYRSTPPGLRPRLPRLAMHKRNRALVCALDSQLSNCFDSSKDLTDTHSILYCAAVAACRVAHVKFPNCDRATRPAVPAWQCRIEHRIGEARALIGKLICFREGNTRPRVMRFVRRAFSGTDISPRDYLSCVTERIDFLKQKIYAWANRIRRYKRRVERYTRNRTFQSNERWVYRDWERPDQGVTDTRLPDDDAMCSFWRSIWSAPVSHTEGDWIREVERACDLLPEMGTITISPQDVARAVRPLPNWKSPGPDGLHNFWVKWFQRSHAHLASQFQSALESGSLPQFLTTGITHLLHKSGSTVEPKNYRPITCLPTVYKVLTSILRAKINSHIETNSIMSASQNGCRNGSRGTKELLLIDIAISQQVRRSRKNLSACWIDYKKAYDSVPHTWLKRVLELYKVDATLRTFLMSCMEQWRTVLHYPGCRQIQENNEPIRIERGIFQGDSLSPLWFCLALNPLSTLLEGSGLGYRLKRGGQVISHLLYMDDLKLFAPNNLQLVELLKVTETFSSAIRMEFGVDKCAVIHVKRGEIMESVGIQLSDSIHLRSLCSTETYKYLGMSESLGINTDDVKQLLKERFFGRLNKVLNSLLSGGNKVRAFNGWVMPVLMYSFGILKWTQTELDALDRRVRTLLTANRMHHPRSSVMRLYIPRKCGGRGFLNAKTLLCSLREYFLKTDVGMHRDVVAVDKGLTPLSLANENWRKPIVLDTNDRREVWQSKELHGRFYRALHGPDVDLLASVSWLRFGDLFGETEGFVFAIMDEVMMTNNYRKYIVKDGTVDICRACHPPGESIRHIISGCSHLANGDYLHRHNLVARIIHQQLALKYNLVESEVPYYRYVPDPVLDNGNITLYWDRSIITDRTIIANKPDIVVIDRLERRTMIVDIAVPHDENLVKAEKDKQTKYLDLAREVVDMWEVDRAIIVPIVVTANGLIAKSLEQHLRRLSLGSWIKGLIQKAVLLDTARIVRRFLSQEP

SEQ ID NO: 26925 - protein, 920 aa, Noctua janthe
MMLHLIGCARKCRLAQPATLSHPRTLHMCLRANHHAEEEDDRTISADNLCNVELRSALEGAIREYRFMSPDLRPRLPRLPMNKKNRALVCALDALLPNFIESSTNLCDTHSILYCTAVAACRVANVKFPNTDSPTRPKSAVPAWQCRIERRINEARALIGKLICFREGNTRPRVMRFVRRAFSGTDISPREYMSRVTERIDFLKQKVYAWANRIRRYRRRVDRYTQNRMFQSDERWVYRTWERPVTIQGVTDAHLPDNDAMNAFWRSIWSVPVGHTEGDWMRVVERACDSIPEMEAISISPLDVACAVRPLPNWKSPGPDGLHNFWIKWLQRSHACLASQFQSSLETGSLPPFFTTGVTHLLYKSGNTVEPKNYRPITCLPTVYKVLTSILRAKIVRHIDSNSIMSVSQNGCKNGSRGTKELLLIDMAISQQVRRSRRDLSTCWIDYKKAYDSVPHTWLMRVLELYKIDATLRTFLMSCMGQWRTVLLYPGCRQVLGNDEPIRIERGIFQGDSLSPLWFCLALNPLSTLLEDSGLGYRLRRGGQVISHLLYMDDLKIFAPSNLQLMELLKVTETFSSAIRMEFGLDKCAVMHVKRGEIMESVGTQLSHSIFLRSLSSTETYKYLGMSEALGINAADMKQSLKERFFGRLNKVLNSLLSGGNKVRAFNGWVMPVLMYSYGILKWTQTELDALDRKVRTLLTANRMHHPRSSVMRLYIPRKCGGRGFLNAKTLHNREVCSLREYFLETDVGMHRDVVSVDKSFTPLSLANQNWRKPVVLDTNNRREVWQSKELHGRFFRALHGPDVDFLASVSWLRFGDLFGETEGFVCAIMDEVIMTNNYRKYIIKDGTVDICRACHRPGESIRHIVSGCSRLANGEYLHRHNLVAKIIHQQLALQYNLVSSEVPYYKYVPDPVLENGHAT

SEQ ID NO: 26926 - protein, 1044 aa, Noctua janthe
MMLHLIGCARKCRLAQPATLSHPRTLHMCLRANHHAEEEDDRTISADNLCNVELRSALEGAIREYRFMSPDLRPRLPRLPMNKKNRALVCALDALLPNFIESSTNLCDTHSILYCTAVAACRVANVKFPNTDSPTRPKSAVPAWQCRIERRINEARALIGKLICFREGNTRPRVMRFVRRAFSGTDISPREYMSRVTERIDFLKQKVYAWANRIRRYRRRVDRYTQNRMFQSDERWVYRTWERPVTIHGVTDAHLPDNDAMNAFWRSIWSVPVGHTEGDWMRVVERACDSIPEMEVISISPLDVACAVRPLPNWKSPGPDGLHNFWIKWLQRSHACLASQFQSSLETGSLPPFFTTGVTHLLYKSGNTVEPKNYRPITCLPTVYKVLTSILRAKIVRHIDSNSIMSVSQNGCKNGSRGTKELLLIDMAISQQVRRSRRDLSTCWIDYKKAYDSVPHTWLMRVLELYKIDATLRTFLMSCMGQWRTVLLYPGCRQVLGNDEPIRIERGIFQGDSLSPLWFCLALNPLSTLLEDSGLGYRLRRGGQVISHLLYMDDLKIFAPSNLQLMELLKVTETFSSAIRMEFGLDKCAVMHVKRGEIMESVGTQLSHSIFLRSLSSTETYKYLGMSEALGINAADMKQSLKERFFGRLNKVLNSLLSGGNKVRAFNGWVMPVLMYSYGILKWTQTELDALDRKVRTLLTANRMHHPRSSVMRLYIPRKCGGRGFLNAKTLHNREVCSLREYFLETDVGMHRDVVSVDKSFTPLSLANQNWRKPVVLDTNNRREVWQSKELHGRFFRALHGPDVDFLASVSWLRFGDLFGETEGFVCAIMDEVIMTNNYRKYIIKDGTVDICRACHRPGESIRHIVSGCSRLANGEYLHRHNLVAKIIHQQLALQYNLVSSEVPYYKYVPDPVLENGHATLYWDRSIITDRTILANKPDIVMIDRRERRAMIVDITVPHDENLVKAENDKKIKYLDLAHEVVDMWDVDSAIIVPIVVTVNGLIAESLDQHLRRLSLRGWVKSLIQKAVLLDTARIVRRFLSLEP

SEQ ID NO: 26927 - protein, 1215 aa, Amphipyra berbera
MLTRSRSKLQDPKTRPRPSASSLSSALQPPDSSIVSDVTPAAAVASSSSDEYFSPPSSPPPPRRRGRGRPPACMGPRGPPASDRVPAPGGSVQRMRWTQSMNENCMRAYFGATEGGTNLTAYRGRMLSLFQVLEPAVNVSAQRLSDQVRVIQRDHRLTDAALDRLRSEVQSNRIISPQSQTAAQPQAPTVVLPPPIHADDESDDRVTNVSTQCNERLRSALELAIQEYRFAPPNLRPRIPRLPMNKKNRALMCALDSLLSSYFDNSESLEDTHSILYCAAVAACRVAHAKFDNNDRATRPKPAVPAWQCRIERRINEARALIGKLICFREGNTRPRVMRFVRRAFSGTDINPRDYLSRVTERIDFLKQKVYAWANRIRRYKRRVERYTQNRMFHSDERWVYRTWERPDHDVSDTHLPDNDVMNTFWRNIWSMPVTHIEGDWMQEVQRACEPIEEMGDITIVPQDVTSAVRPMANWKSPGPDGLHNFWLKWLRSSHARLASQFQSSLESGSFPEFLTTGVTHLLHKSGSTAEPKNYRPITCLPTVYKLLTSILRAKINSHIINNSIMSVSQNGCKNGSRGTKELLLIDMAISQQVRRSRKDLSTCWIDYKKAYDSVPHTWLMRVLELYKVNTTLCAFLTSCMGQWRTVLHYPGCRQIQGRGEPIRIERGIFQGDSLSPLWFCLALNPLSTLLEGSGLGYRLRRGGQVISHLLYMDDLKLFAPNNLQLVKLLKVTETFSNSIRMEFGVDKCAVMHVKRGGIMESVGTQLSDSIHLRSLSSTETYKYLGMSEALGINETDMKQSLRERFYGRLKKVLKSLLSGGNKVRTGMTQPLKARAFNGWVMPVLMYSFGILKWTQTELDALDRRVRTLLTAYRMHHPRSSVMRLYIPRKCGGRGFLNAKTLHNREVCSLREYFLQADVGMHRDVVAVDKGFTPLSLAKENWRKPVVLDTNGRREVWQSKELHGRFYRALHGPDVDFLASVAWLRFGDLFGETEGFVCAIMDEVMMTNNYRKYIVKDGTVDICRACHCPGESIRHIISGCSRLANGEYLHRHNLVARIIHQQLALKYNLVDAEVPYYKYVPDPVLENGHITLYWDRSIITDRTIVANKPDIVVIDRSERLAMIVDITVPHDENLVKAEKDKEIKYQDLAHEVVDMWEVDSAVIVPIVVTANGLIAKSLDQHLTRLALGSWIKGLIQKAVLLDTARIVRKFLSLRP

SEQ ID NO: 26928 - protein, 1168 aa, Autographa pulchrina
MLTRSRSRRPAPPPSPDSSPSSASQLPDHVPAPAPAVASSSSDEYYSPPTSPTPVRRQGRRRPPSSLAPAGQPASNRAPAPGGDVRRMKWTQGINENVMRAYYGATEGGTNLTAYRARMLSLFQGLEPDVNVSAQRLSDQVRVIQRNHRLDDATLDRLRSEVQRSPAASTPSPAVVPVIGSPPTNPADGEEEDGAITVSTQCSEHIRSTLEDTIREFRSTPPGLRPRLPRLPMHNRNKAIMGVLDSLLLVYFGSSEDLSDTHSILYCAALAACRVANVKINNINLDTRPKPAVPAWQCRIERRVAEARALIGKLIAFKDGNSRPRVMRFVRRAFTGTNISPSEYTARVTERIDFFKQKVCAWASRIRRYKCRVDRFHQNRMFQRDQRWVFRTWERPVLGMDDRRLPDEDATNSFWRNIWSVPVSHSEGVWMREVEESCEPIQEMRAITIGPQDVANAIRPMSNWKAPGPDGLQNFWLKWFRSSHGCLASQFQYAIESDALPQFFTTGSTHLLHKTGSTTDPKNYRPITCLPTIYKLLISILRVKINEHIDSHSIMSASQNGCRNGSRGTKELLLIDMTICQQVRRSKKNLSTCWIDYKKAYDSVPHSWLMRVLELYKINTTLRAFLSSCMRRWTTVLRYPGCRDIQQSGEPIRIERGIFQGDSLSPLWFCLALNPLSTLLENSRLGYSLRRGSQVISHLLYMDDLKLFASNELQLMGLLKITESFSNSIRMEFGVDKCAVMHVKQGGIVESQGIQLSDSINLRSLSAADTYKYLGMSEALGIDVADMKQSLLTRFFGRLNKVLKSLLSGGNRVRAFNGWVMPVLMYSFGILKWTQTELDALDRRVRTLLTANRMHHPRSSVMRLYIPRKCGGRGFLNAKTLHNREVCNLREYFLQVDVGMHRDVVVVDKGFTPLSLGKENWHKPVVLSVKDRRDVWQSKELHGRFYRSLHGPDVDFLASVAWLRFGDLFGETEGFVCAIMDEVIMTNNYRKYIIKDGTVDICRACHCPGESIRHIISGCSRLANGEYLHRHNQVARIIHQQLALRYELRSIITDRTIVANKPDIVVIDRSERRAMIVDVTIPHDENLVKAEKEKQIKYLDLAHEVVDMWEVDSAIIVPIVITANGIIAKSLDQHLKRLSLGIWVKGLIQKAVLLDTARIVRRFLSLEP

SEQ ID NO: 26929 - protein, 1078 aa, Mythimna impura
MLTRSRAQKLHTHPTSSGSSLSSASQPPGPAPTVSPEIPVAAVASSSSDEYFSPPTTPPPARRRGRGRPPASLGPRGLPASDRVPAAGGSVQRMRWTSSINEIVMRSYFGATEGGINLTAYRGRMHSLFQVLEPAVNVSVQRLSDQVRVIQRNRMLDDAVLDRLRLESQSSRVSPATTPAAVQRLPTASPRPVQVGDADDDAAISVSTQCNDRLRGALEDAFREYRSTPPGLRPRLPRLPMHKRNMALVCALDSQLSNCFDSSKDLTDTHSILYCAAVAACRVAHVKFPNCDRATRPAVPAWQCRIEHRIGEARALIGKLICFREGNTRPRVMRFVRRAFSGTDISPRDYLPCVTERIDFLKQKIYAWANRIRRYKRRVERYTRNRTFQSNERWVYRDWERSDQGVTDTRLPDDDAMCTFWRSIWSAPVSHTEGDWIREVERACDLLPEMGAITISPQDVARAVRPLPNWKSPGPDGLHNFWVKWFQRSHARLASQFQSALESGSLPQFLTTGITHLLHKSGSTAEPKNYRPITCLPTVYKVLTSILRAKINSHIETNSIMSASQNGCRNGSRGTKELLLIDIAISQQVRRSRKNLSACWIDYKKAYDSVPHTWLMRVLELYKVDATLRTFLMSCMGQWRTVLHYPGCRQIQENSEPIRIERGIFQGDSLSPLWFCLALNPLSTLLEGSGLGYRLKRGGQVISHLLYMDDLKLFAPNNLQLVELLKVTETFSSAIRMEFGVDKCAVIHVKRGEIMESVGIQLSDSIHLRSLCSTETYKYLGMSESLGINTDDVKQSLKERFFGRLNKVLNSLLSGGNKVRAFNGWVMPVLMYSFGILKWTQTELDALDRRVRTLLTANRMHHPRSSVMRLYIPRKCGGRGFLNAKTLHNREVCSLREYFLKTDVGMHRDVVAVDKGLTPLSLANENWRKPIVLDTNDRREVWQSKELHGRFYRALHGPDVDLLASVSWLRFGDLFGETEGFVFVIMDEVMMTNNYRKYIVKDGTVDICRACHRPGESIRHIISGCSHLANGDYLHRHNLVARIIHQQLALKYNLVESEVPYYRYVPDPVLDNGNITLY

SEQ ID NO: 26930 - protein, 1199 aa, Mythimna impura
MLTRSRAQKLHTHPTSSGSSLSSASQPPGPAPTVSPEIPVAAVASSSSDEYFSPPTTPPPARRRGRGRPPASLGPRGPPASDRVPAAGGSVQRMRWISSINENVMRSYFGATEGGINLTAYRGRMLSLFQVLEPAVNVSVQRLSDQVRVIQRNRMLDDAVLDRLRLESQSSRVSPATTPAAVQRLPTASPRPVQVGDADDDAAISVSTQCNDRLRGALEDAFREYRSTPPGLRPRLPRLPMHKRNRALVCALDSQLSNCFDSSKDLTDTHSILYCAAVAACRVAHVKFPNCDRATRPVVPAWQCRIEHRIGEARALIGKLICFRKGNTRPRVMRFVRRAFSGTDISPRDYLPCVTERIDFLKQKIYAWANRIRRYKRRVERNTRNRTFQSNERWVYRDWERSDQGVTDTRLPDDDAMCSFWRSIWSAPVSHTEGDWIREVERACDLLPEMGAITISPQDVARAVRPLPNWKSPGPDGLHNFWVKWFQRSHARLASQFQSALESGSLPQFLTTGITHLLHKSGSTAEPKNYRPITCLPTAYKVLTSILRAKINSHIETNSIMSASQNGCRNGSRGTKELLLIDIAISQQVRRSRKNLSTCWIDYKKAYDSVPHTWLMRVLELYKVDATLRTFLMSCMGQWRTVLHYSGCRQIQENNEPIRIERGIFQGDSLSSLWFCLALNPLSTLLEGSGLGYRLKRGGQVISHLLYMDDLKLFAPNNLQLVELLKVTETFSSAIRMEFGVDKCAVIHVKRGEIMESVGIQLSDSIHLRSLCSTETYKYLGMSESLGINTDDVKQSLKERFFGRLNKVLNSLLSGGNKVRAFNGWVMPVLMYSFGILKWTQTELDALDRRVRTLLTANRMHHPRSSVMRLYIPRKCGGRGFLNAKTLHNREVCSLREYFLKTDVGMHRDVVAVDKGLTPLSLANENWRKPIVLDTNDRREVWQSKELHGRFYRALHGPDVDLLASVSWLRFGDLFGETEGFVFAIMDEVMMTNYRKYIVKDGTVDICRACHRPGESIRHIISGCSHLANGDYLHRHNLVARIIHQQLALKYNLVESEVPYYRYVPDPVLDNGNITLYWDRSIITDRTIVANKPDIVVIDRLERRTMIVDIAVPHDENLVKAEKDKQTKYLDLAREVVDMWEVDRAIIVPIVVTANGLIAKSLEQHLRRLSLGSWIKGLIQKAVLLDTARIVRRFLSQEP

SEQ ID NO: 26931 - protein, 1080 aa, Amphipyra berbera
MLTRSRTRTTEQRSARPPPPDSPLSSASQPPELGLPVTPAAAASSSSSDEYFSPPTSPRPVRRQGRGRPPNSLGPRGPPAPSRVLAAGGYVQRMKWTQSINENVMRAYYGSTEGGTNLTAYRVGMLTLFQELEPAINVSAQRLSDQVRVIQRNHKLDDAALDRLRLEVQNSRAIPVPSQTAVHQLINVAPPRSDRVDGDEDDGAVTVSSQYNDRLRSALEDAIRECRANPESRPRLPRLPMHNKNRALVCALDSLLASYFESSEDLGDTHSILYCAAVAACRVANVKFNNSERATRPKLAVPAWQCRIERRIDETRALIGKLICFREGNTRPRVMRFVRRAFSGTGISPREYTSRATERIDFLKQKVCAWASRIRRYKRRVERYTQNRMFQCDQRWVYRAWERPDQSVSGGRLPDDDAMSSFWRSIWSVPVIHTEGDWMRDIERTCESIEEMGEIVISPQDVAGAVRPLPNWKSPGPDGLHNFWIKWLRSSHARLASQFQSSLESGSLPQFLTTGVTHLLHKSGSTAEPKNYRPITCLPTVYKLLTSILRSKINTHIGNNSVLSSSQNGCRNGSRGTKELLLIDTAISQQVRRSQKSLSTCWIDYKKAYDSVPHTWLMRVLELYKINTTLRTFLRSCMGQWRTVLRYPGCQPIRRSGEPIRIERGIFQGDSLSPLWFCLALNPLSTLLEGSGLGYPLRRGGQVVSHLLYMDDLKLFAPTKLQLVDLLKVTETFSNSIRMEFGVDKCAVMHVRRGRIMESEGLQLSDSIHLSPLSANDTYKYLGMSEGLGISEADMKQSLRERFFGRLKKVLKSLLSGGNKVRAFNGWVMPVLMYSFGILKWTQTELDALDRRVRTLLTANRMHHPRSSVMRLYIPRKCGGRGLLNAKTLHNREVCSLREFFLHADTGMHRDVVAVDKGLTPLSLARENWRKPVVLSTNDRREIWQSKELHGRFYRALHGPDVDFLASVSWLRFGDLFGETEGFVCAIMDEVIMTNNYRKYIVKDGTVDICRACHCPGESLRHIISGCSRLANGEYLHRHNQVARIIHQQLALKYNLVESEVPYYRYVPDPVLENGRITLY

SEQ ID NO: 26932 - protein, 1202 aa, Amphipyra berbera
MLTRSRTRTTEQRSARPPPPDSPLSSASQPPELGLPVTPAAAASSSSSDEYFSPPTSPRPVRRQGRGRPPNSLGPRGPPAPSRVLAAGGYVQRMKWTQSINENVMRAYYGSTEGGTNLTAYRVRMLTLFQELEPAINVSAQRLSDQVRVIQRNHRLDDAALDRLRLEVQNSRAIPVPSQTAVHQLINVAPPRSDRVDGDEDDGAVTVSSQYNDRLRSALEDAIRECRANPESRPRLPRLPMHNKNRALVCALDSLLASYFESSEDLGDTHSILYCAAVAACRVANVKFNNSERATRPKLAVPAWQCRIERRIDETRALIGKLICFREGNTRPRVMRFVRRAFSGTGISPREYTSRATERIDFLKQKVCAWASRIRRYKRRVERYTQNRMFQCDQRWVYRAWERPDQSVSGGRLPDDDAMSSFWRSIWSVPVIHTEGDWMRDIERTCESIEEMGEIVISPQDVAGAVRPLPNWKSPGPDGLHNFWIKWLRSSHARLASQFQSSLESGSLPQFLTTGVTHLLHKSGSTAEPKNYRPITCLPTVYKLLTSILRSKINTHIGNNSVLSSSQNGCRNGSRGTKELLLIDTAISQQVRRSQKSLSTCWIDYKKAYDSVPHTWLMRVLELYKINTILRTFLRSCMGQWRTVLRYPACQPIRRSGEPIRIERGIFQGDSLSPLWFCLALNPLSTLLEGSGLGYPLRRGGQVVSHLLYMDDLKLFAPTKLQLVDLLKVTETFSNSIRMEFGVDKCAVMHVRRGRIMESEGLQLSDSIHLSPLSANDTYKYLGMSEGLGISEADMKQSLRERFFGRLKKVLKSLLSGGNRVRAFNGWVMPVLMYSFGILKWTQTELDALDRRVRTLLTANRMHHPRSSVMRLYIPRKCGGRGLLNAKTLHNREVCSLREFFLHADAGMHRDVVAVDKGLTPLSLARENWRKPVVLSTNDRREIWQSKELHGRFYRALHGPDVDFLASVSWLRFGDLFGETEGFVCAIMDEVIMTNNYRKYIVKDGTVDICRACHCPGESLRHIISGCSRLANGEYLHRHNQVARIIHQQLALKYNLVESEVPYYRYVPDPVLENGRITLYWDRSIITDRTIVANKPDIVVIDRSERRTMIVDVTIPHDGNLVKAEKDKQIKYLDLAHEVVNMWDVESATIVPIVVTANGLMAKSLDKHLMRLSLGGWIKGLIQKAVLLDTARIVRRFLSLEP

SEQ ID NO: 26933 - protein, 1017 aa, Mythimna impura
MRWTQSINENVMRSYFGATEGGSNLTAYRGRMLSLFQVLEPTVNVSAQRLSDQVRVIQRNRMLDDAVLDRLRLESQRSRASSATLPAAVQLQPSALPRPDHVGDADDDAAISVSTQCNERLRSALEDAFREYRSTPPGLRPRLPRLPMHKRNRALVCALDSQLSNCFDSSKDLADTHSILYCAAAAACRVAHVKFPNCDRATRPAVPAWQRRIERRIGEARALIGKLICFREGNTRPRVMRFVRRAFLGTDISPQNYLPCVTERIDFLKQKVYAWASRIRRYKRRVERYTQNRTFQSNERWVYRTWERPDQDVTDTRLPDDDAMCSFWRRIWSVPVSHIEGDWIREVERTCDLLPEMGAITISPQDVARAVRPLPNWKSPGPDGLHNFWIKWFQGSHARLASQFQSALESGSLPEFLTTGITHLLHKSGSTADPKNYRPITCLPTVYKVLTSILRAKINTRIETNSIMSASQNGCRNGSRGTKELLLIDMAISQQVRRSRKDLSTCWIDYKKAYDSVPHTWLMRVLELYKVDTTLRTFLMSCMRQWRTVLHYPGCRQIRENSEPIRIERGIFQGDSLSPLWFCLALNPLSTLLEGSGLGYRLKRGGQVISHLLYMDDLKLFAPNNLHLMELLKVTETFSNAIRMEFGVDKCAVMHVKRGEIMESVGTQLSDSIYLRSLCSTETYKYLGMSEALGINAADVKQSLKERFFGRLNRVLKSLLSGGNKVRAFNGWVMPVLMYSFGILKWTQTELDALDRRVRTLLTANRMHHPRSSVMRLYIPRKCGGRGFLNAKTLHNREVCSLREYFLETDVGMHRDVVAVDKGLTPLSLANGNWRKPIILDTNDRREVWQSKELHGRFYRALHGPDVDLLASVSWLRFGDLFGETEGFVCAIMDEVVMTNNYRKYIVKDGTADICRACHRPGESIRHIISGCSHLANGDYLHRHNLVAKIIHQQLALKYNLVESEVPYYKYVPDPVLDNGSITLYWDRSIITDRTIVANKPDIVVIDRLERRRYSDC

SEQ ID NO: 26934 - protein, 842 aa, Amphipyra berbera
MHRKNRALMCALDSLLSSYFDNSENLEDTHSILYCAAVAACRVAHAKFDNNDRATRPKPAVPAWQCRIERRINEARALIGKLICFREGNTRPRVMRFVRRAFSGTDINPRDYLSRVTERIDFLKQKVYAWANRIRRYKRRVERYTQNRMFHSDERWVYRTWERPDHDVSDTHLPDNDVMNTFWRNIWSMPVTHTEGDWMQEVQRACEPIEEMGDITIVPQDVTSAVRPMANWKSPGPDGLHNFWLKWLRSSHARLASQFQSSLESGSLPEFLTTGVTHLLHKSGSTAEPKNYRPITCLPTVYKLLTSILRAKINSHIINNSIMSVSQNGCKNGSRGTKELLLIDMAISQQVHRSRKDLSTCWIDYKKAYDSVPHTWLMRVLELYKVNTTLCAFLTSCMGQWRTVLHYPGCRQIQGRGEPVRIERGIFQGDSLSPLWFCLALNPLSTLLEGSGLGYRLRRGGQVISHLLYMDDLKLFAPNNLQLMKLLKVTETFSNSIRMEFGVDKCAVMHVKRGGIMESVGTQLSDSIHLRPLSSTETYKYLGMSEALGINETDMKQSLRERFYGRLKKVLKSLLSGGNKVRAFNGWVMPVLMYSFGILKWTQTELDALDRRVRTLLTAYRMHHPRSSVMRLYIPRKCGGRGFLNAKTLHNREVCSLREYFLQADVGMHRDVVAVDKGYTPLSLAKENWRKSVVLDTNGRREVWQSKELHGRFYRALHGPDVDFLASVAWLRFGDLFGETEGFVCAIMDEVMMTNNYRKYIVKDGTVDICRACHCPGESIRHIISGCSRLANGEYLHRHNLVARIIHQQLALKYNLVDAEVPYYKYVPDPVLENGHITLYWD

SEQ ID NO: 26935 - protein, 1200 aa, Mythimna ferrago
MLTRSRAQQLNAQLTTSGPSLSSASQPPGPAPAVSPEIPVAAVASSSSDEYFSPPTTPPPARRRGRGRPPACLGPRGPPASDRVPAAGGSVQRMRWTQSINENVMRSYFGATEGGTNLTAYRGRMLSLFQVLEPAVNVSAQRLSDQVRVIQRNRMLDDAVLDRLRLESRNGRVSPVSPPAAVQRQPSVSPRPDHVGEDDDDGAISVSTQCNVRLRSALEDAFREYRSIPPELRPRLPRLPMHRKNRALVCALDSQLSNCFDSSEDLTDTHSILYCAAAAACRVAHVKIPNSDRATRPAKPAWQCRIERRIGEARALIGKLICFREGNTRPRVMRFVRRAFSGTDISPRDYLPRITERIDFLRQKVYAWANRIRRYKRRVERYTQNRAFQSNERWVYRAWERPDQSVIDTRLPNDDAMYSFWRSIWSVPVNHTEGDWTRKVERECELLPEMGAVTISPQDVARAVRPLPNWKSPGPDGLHNFWLKWFKSSHARLASQFQSALESGSLPQFLTTGITHLLHKSGSTAEPKNYRPITCLPTVYKVLTSILRAKINSHIETNSIMSASQNGCRNGSRGTKELLLIDVAISQQVRRSRRDLSTCWIDYKKAYDSVPHTWLMRVLELYKIDVTLRTFLTSCMGQWRTVLHYPGCRRVSENSEPLRIERGIFQGDSLSPLWFCLALNPLSTLLEGSGVGYRLRREGQVISHLLYMDDLKLFASNNLQLMELLKVTETFSSAIRMEFGLDKCAVMHVKRGEIMESVRTQLSDSIHLRSLCSTETYKYLGMSEALGINAADVKQSLRERFFGRLNKVLKSLLSGGNKVRAFNGWVMPVLMYSFGILKWTQTELDALDRRVRTLLTANRMHHPRSSVMRLYIPRKCGGRGFLNAKTLHNREVCNLRKYFLETDVGMHRDVVAVDKGLTPLSLANENWRNPIVMEINERKEVWKGKELHGRFYRALHGPDVDLLASVSWLRFGDLFGETEGFVFAIMDEVMMTNNYRKYIVKDGTVDICRACHRPGESIRHIISGCSHLANGDYLHRHNLVARIIHQQLALKYNLVESEVPYYRYVPDPVLENGSVTLYWDRSIITDRTIVANKPDIVVIDRLERRTMIVDIAVPHDENLVKAEKDKQTKYLDLAREVVDMWEVERAIIVPIVVTANGLIAKSLDQHLRRLSLGSWIKGLIQKAVLLDTARIVRRFLSQEP

SEQ ID NO: 26936 - protein, 981 aa, Amphipyra tragopoginis
MREYRFIRPDLRPRIPRLPMHRKNRALVCALDSLLSNYFDGSEDLSDTHSILYCAAVAACRVAHVKFTDNERATRPKNAVPAWQCRIERRIAEARALISKLVCFREGNTRPRVMRFVRRAFSGTDVSPREYMSRVTERIDFLKQKVYAWANRIRRYRRRVDRYTQNRLFQSDERWVYRTWERPDQRVSDTRLPDDDVMNAFWRNIWSVPVAHTEGDWMQEVQQACEPIQEMGDIIISPQDVASAVRPMSNWKSPGPDGLHNFWLKWLRSSHARLASQFQSSLESGSLPQFLTTGVTHLLHKSGSTAEPKNYRPITCLPTVYKVLTSILRAKINNHIDNNSIMSASQNGCRYGSRGTKELLLIDMAISQQVRRSRKDLSTCWIDYKKAYDSVPHAWLMRVLELYKVNTTLCAFLTSCMGQWRTVLHYPGCRQIQGMGEPIRIERGIFQGDSLSPLWFCLALNPLSTLLEGSGLGYRLRRDGQVISHLLYMDDLKLFAPNNLRLLELLKVTETFSNSIRMEFGVDKCAVMHVKRGRIMESVGTQLSDSIHLRSLSSTETYKYLGMSEALGINETDMKQSLRERFYGRLKKVLNSLLSGGNKVRAFNGWVMPVLMYSFGILKWTQTELDALDRRVRSLLTANRMHHPRSSVMRLYIPRKCGGRGFLNAKTLHNREVCSLREYFSQADVGMHRDVVAVDKGLTPLSLAKENWRKPVVLDTSGRREVWQSKELHGRFYRALHGPDVDFLASVAWLRFGDLFGETEGFVCAIMDEVMMTNNYRKYIVKDGTVDICRACHCPGESIRHIVSGCSRLANGEYLHRHNLVARIIHQQLALKYNLVDAEVPYYKYVPDPVLENGHVTLYWDRSIITDRTIVANKPDIVVIDRSKRLTMIVDITVPHDENLVKAEKDKEIKYQDLAHEVVAMWDVDSAIIVPIVVTANGLIAKSLDQHLKRLSLGSWIKGLIQKAVLLDTARIVRKFLSLRP

SEQ ID NO: 26937 - protein, 1269 aa, Mythimna impura
MPGLKKRKVKQRLHSLSLKVHLSNIRGVHSNLAAVHHHLDTEKPSLFFLSETQIRSPSDVSYLSYQGLHWSTILNHTLVCVYTPGTTSAIGVSATLKIPGSQRFGLWWTQAWINLSMLVSTVRTVVIKKRPGSHSTLVRRRMRLSRGTLPHKYNNNNSGSVQRMRWTQSINENVMRSYFGATEGGSNLTAYRGRMLSLFQVLEPTVNVSAQRLSDQVRVIQRNRMLDDAVLDRLRLESQRSRASSATPPAAVQLQPSALPRPDHVGDADDDAAISVSTQCNERLRSALEDAFREYRSTPPGLRPRLPRLPMHKRNRALVCALDSQLSNCFDSSKDLADTHSILYCAAAAACRVAHVKFPNCDRATRPAVPAWQRRIERRIGEARALIGKLICFREGNTRPRVMRFVRRAFLGTDISPQNYLPCVTERIDFLKQKVYAWANRIRRYKRRVERYTQNRTFQSNERWVYRTWERPDQDVTDTRLPDDDAMCSFWRRIWSVPVSHIEGDWIREVERTCDLLPEMGAITISPQDVARAVRPLPNWKSPGPDGLHNFWIKWFQGSHARLASQFQSALESGSLPEFLTTGITHLLHKSGSTADPKNYRPITCLPTVYKVLTSILRAKINTHIETNSIMSASQNGCRNGSRGTKELLLIDMAISQQVRRSRKDLSTCWIDYKKAYDSVPHTWLMRVLELYKVDTTLRTFLMSCMRQWRTVLHYPGCRQIRENSEPIRIERGIFQGDSLSPLWFCLALNSLSTLLEGSGLGYRLKRGGQVISHLLYMDDLKLFAPNNLHLMELLKVTETFSNAIRMEFGVDKCAVMHVKRGEIMESVGTQLSDSIYLRSLCSTETYKYLGMSEALGINAADVKQSLKERFFGRLNRVLKSLLSGGNKVRAFNGWVMPVLMYSFGILKWTQTELDALDRRVRTLLTANRMHHPRSSVMRLYIPRKCGGRGFLNAKTLHNREVCSLREYFLETDVVHRDVVAVDKGLTPLSLANGNWRKPIILDTNDRREVWQSKELHGRFYRALHGPDVDLLASVSWLRFGDLFGETEGFVCAIMDEVVMTNNYRKYIVKDGTADICRACHRPGESIRHIISGCSHLANGDYLHRHNLVAKIIHQQLALKYNLVESEVPYYKYAPDPVLDNGSITLYWDRSIITDRTIVANKPDIVVIDRLERRTVIVDIAVPHDDNLVKAEKDKQTKYLDLAREVVDMWEVDTAVIVPIVVTANGLISKSLDQHLRRLSLGSWIKGLIQKAVLLDTARIVRRFLSQEP

SEQ ID NO: 26938 - protein, 1040 aa, Mythimna impura
MLDDAVLDRLRLESQSSRVSPATTPAAVQRLPTASPRPVQVGDADDDAAISVSTQCNDRLRGALEDAFREYRSTPPGLRPRLPRLPMHKRNRALVCALDSQLSNCFDSSKDLTDTHSILYCAAVAACRVAHVKFPNCDRATRPAVPAWQCRIEHRIGEARALIGKLICFREGNTRPRVMRFVRRAFSGTDISPRDYLPCVTERIDFLKQKIYAWANRIRRYKRRVERYTRNRTFQSNERWVYRDWERSDQGVTDTRLPDDDAMCSFWRSIWSAPVSHTEGDWIREVERACDLLPEMGAITISPQDVARAVRPLPNWKSPGPDGLHNFWVKWFQRSHARLASQFQSALESGSLPQFLTTGITHLLHKSGSTAEPKNYRPITCLPTVYKVLTSILRAKINSHIETNSIMSTSQNGCSCELLLIDIAISQQVRRSRKNLSACWIDYKKAYDSVPHTWLMRVLELYKVDATLRTFLMSCMGQWRTVLHYPGCRQIQENNEPIRIERGIFQGDSLSPLWFCLALNPLSTLLEGSGLGYRLKRGGQVISHLLYMDDLKLFAPNNLQLVKLLKVTETFSSAIRMEFGVDKCAVIHVKRGEIMESVGIQLSDSIHLRSLCSTETYKYLGMSESLGINTDDVKQSLKERFFGRLNKVLNSLLSGGNKVRAFNGWVMPVLMYSFGILKWTQTELDALDRRVRTLLTANRMHHPRSSVMRLYIPRKCGGRGFLNAKTLHNREVCSLREYFLKTDVGMHRDVVAVDKGLTPLSLANENWRKPIVLDTNDRREVWQSKELHGRFYRALHGPDVDLLASVSWLRFGDLFGETEGFVCAIMDEVVMTNNYRKYIVKDGTADICRACHRPGESIRHIISGCSHLANGDYLHRHNLVAKIIHQQLALKYNLVESEVPYYKYVPDPILDNGSITLYWDRSIITDRTIVANKPDIVVIDRLERRTVIVDIAVPHDDNLVKAEKDKQTKYLDLAREVVDMWEVDTAVIVPIVVTANGLISKSLDQHLRRLSLGSWIKGLIQKAVLLDTARIVRRFLSQEP

SEQ ID NO: 26939 - protein, 1078 aa, Omphaloscelis lunosa
MLSLFQVLEPTINVSAQRLSDQVRVIQHNHRLDNATLDRLRLEMQNSFASNPPPSQNVVQAPAAVPLQANQHAEEEDGRAISADNLCNVELRSALEDAIREYRFTSPDLRPRLPRLPMNKRNRALVCALDALLPNFIESSANLCDTHSILYCTAVAACRIARVKFPNTDRSVRPKPVAPAWQCRIECRINEARVLIGKLICFREGNTRPRVMRFVRRAFSGTSISPREYVSHVTERIDFLKQKVYAWANRIRRYRRRVDRYTQNRMFQNDERWVYRTWERPTPNQGVTDTRLPDSDAMKAFWQSIWSVPVSHTEGDWMRVVEQACDPIPHMEAISITPLDVARAVRPLPNWKSPGPDGLHNFWLKWLQRSHTCLATQFQSSLDTGSLPLFFTTGVTHQLHKSGSTAEPKNYRPKTCLPTIYKVLTSILRAKISHHINNNLIMSVSQNGCKNGSRGTKELLLIDMTISQQVRKSRKDLSTCWIDYKKAYDSVPHTWLMRVLELYKIDATLRTFLMSCMRQWRTVLLYPGCRQIRGIDEPIRIERGIFQGDSLSPLWFCLALNPLSTLLEDSGLGYRLRRGGQVISHLLYMDDLKLFAPNNLRLMELLKITETFSSAIRMKFGVDKCAVMHVKRGEIMESVGTQLADSIHLRSLSSTETYKYLGMSEALGINVTDMKQSLKERFFGRLNKVLNSLLSGGNKVRAFNGWVMPVLMYSFGILKWTQTELDAVDRKVRTLLTANRMHHPRSSVMRLYIPRKCGGRGFLNAKTLHNREIYSLREYFLQTNVGMHRDVVAVDKGLTPLSLAKENWRGANLQYLILTIVRKYGRAKNYKETHGPDVDFLTSVSWLRFGDLFGETEGFVCAIMDEVILTNNYRKYIVKDGTVDICRACHQPGESIRHIVSGCSRLANGEYLHRHNLVARIIHQQLALQYNLIESEVPYYRYVPDPVLENGHTTLYWDRSIITDRTIVANKPDIVVIDRRERRAMIVDIAVPHDENLVKAEKDKKIKYLDLAHEIVDMWDVDSAIIVPIIVTVNGLIAKSLDQHLRRLSLRGWIKGLIQKAVLLDTARIVRRFLSLEP

SEQ ID NO: 26940 - protein, 1229 aa, Hyles vespertilio
MITRARTRIARLRSSSSSSSASWASASDVFELTPDNDASSQHGELQSSPPPPRPARRRGRPPPVVGLGPVGPSVPPTVPATGGVVRRMRWTQELNENVMRAYFGATKGGTRLTAYRAKMLSLFQALEPTVDVSSQRLSDQVRFIQRRKLLDDQVLERLRSDLCVVQDVNIPSVTIDQAADTPPTPAADIDLTDNMNSNVSPQDEQRLRGALERAISEFVSLSASCRPRLPRLPTHRRNLMLVGALDSMLPTYLESSRDLVDTHSILFCAAVAACRVANVKFPSDFKATRGVVTVPAWQRRIEDRINRARILIGKLISFREGNSRPKIMRFVTQAFSGTNTSPRNYRLCVTERIDFYKQKVYAWANRIRRYRKRWDRFQQNRMFQSDQKRVYRCWENSQQGVGDGRLPSAHEMREYWANIWSSPVSHTEAPWFGVVDRACEAIPAMETILISPEDVLAAIRPTQNWKSPGPDGLHNFWLKWFPSSHARLATQFQDALERGSLPTFMTTGVTHLLFKSGVTMEPKNYRPITCLPTIYKVLTSIIRSKITDHISSNQILFSGQTGCMNGSRGTKELLLIDMTICQQARYNRRNLSAAWIDYKKAYDSVPHTWLMRVLNLYKINTNLCNFLGSCMGQWTTVLRYPGGTVPPDCDEPIRIKRGIFQGDSLSPLWFCMALNPLSTLLLDSGLGYRLRRGSEPISHLLYMDDLKLFASKQTELIELLKITERFSNSINMEFGVDKCAVIHVKRGEVAVSDDIQVSETVRLRSLSVTETYKYLGMPEALGIMGADVKRLLKERFFSRLTKVLNSFLSGGNKIRAFNGWVMPVLMYSFGILKWTQTELDALDRKVRTLLTAHRMHHPRSSVMRLYIPRRCGGRGILNAKDLHNREVCNLRDYFLHSDVDMHRVVVMVDKGFTPLSLAIENWRKPLVVGIRDREDIWKSKELHGRFYRALHGPDVDRLASVSWLRFGNLFGETEGFVFAIMDEVIKTNNYRKYILKDGTVDICRACHRPGESIRHVISGCSYLANGEYLHRHNLVAKIIHQQIALRYGLVTSEVPYYQYVPQPVLENGHATLYWDRSIITDRTILFNKPDIVIIDRLARRAILVDVTIPHDDNLVKAEKDKMSKYLDLAHEVTDMWDVDSTIIVPIVVSAHGLIPKSLDQHLQRLSIGCWVRSQIQKAVLLVSVSAHIRPTAGHGPTLQSRILLRVVRPYSPPRWPSAGWQYCLTRHVL

SEQ ID NO: 26941 - protein, 954 aa, Hyles vespertilio
MGALDSMLTTYLESSRDLVDTHSILYCAAVAACRVANIKFPNEYKATRGVVIVPAWQRRIEDRINRARTLIGKLISFKEGNSRPKIMRFVTQAFSGTNTSPRNYRLCVTERIDFFKQKVYAWANRIRRYRRRWDRFQQNRKFQTDQKSVYRCWENPPQGVVDGRLPSAHEMREYWMNIWSSPVSHTEASWFSVVDRACEAIPAMETILISPEDVLTAIRQTQNWKSPGPDGLHNFWLKWFPSSHARLAAQFQNALERGSLPTFMTTGVTHLLFKSGCTTEPKNYRPITCLPTIYKVLTSIIRSKITDHINSNQILFSGQIGCMNGSRGTKELLLINMTICQQARHNRRNLSAAWIDYKKAYDSVPHTWLMRVLNLYKINTNLCNFLGSCMGQWTTVLRYPGGTVPPDCDEPIRIKRGIFQGDSLSPLWFCMALNPLSTLLLDSGLGYRLRRGSEPISHLLYMDDLKLFASKQTELIELLKITERFSNSINMDFGVDKCAVIHVKRGEVAVSDDILVSETVRLRSLSVTETYKYLGMPEALGIMGADVKRSLKERFFSRLTKVLNSFLSGGNKIRAFNGWVMPVLIYSFGILKWTQTELDALDRKVRTLLTAHRMHHPRSSVMRLYIPRRCGGRGILNAKDLHNREVCNLRDYFLHSDVDMHRVVVMVDKGFTPLSLAIENWRKPLVVGIKDREDIWKSKELHGRFYRALHGPDVDRLASVSWLRFGNLFGETEGFVFAIMDEVIKTNNYRKYILKDGTVDICRACHRPGESIRHVISGCSYLANGEYLHRHNLVAKIIHQQIALRYGLVTPEVPYYQYVPQPVLENGHATLYWDRSIITDRTILANKPDIVIIDRLARRAILVDVTIPHDDNLVKAEKDKMSKYLDLAHEVTDMWDVDSTIIVPIVVSAHGLIPKSLDQHLQRLSIGCWVRSQIQKAVLLDTARIVRRFLTLGS

SEQ ID NO: 26942 - protein, 868 aa, Hyles vespertilio
MRFVTQAFSGTNTSPRNYRLCVTERIDFFKQKVYAWANRIRRYRRRWDRFQQNRKFQTDQKRVYRCWENPPQGVVDGRLPSAHEMREYWTNIWSSPVSHTEASWFSVVDRACEAIPAMETILINPEDVLTAIRQTQNWKSPGPDGLHNFWLKWFPSSHARLAVQFQDALERGSLPAFMTTGVTHLLFKSGCTTEPKNYRPITCLPTIYKVLTSIIRSKITDHINSNQILFSGQTGCMNGSRGTKELLLINMTICQQARHNRRNLSAAWIDYKKAYDSVPHTWLMRVLNLYKINTNLCNFLGSCMGQWTTVLRYPGGTVPPDCDEPIRIKRGIFQGDSLSPLWFCMALNPLSTLLLDSGLGYRLRRGSEPISHLLYMDDLKLFASKQTELIELLKITERFSNSINMDFGVDKCAVIHVKRGEVAVSDDILVSETVRLRSLSVTETYKYLGMPEALGIMGADVKRSLKERFFSRLTKVLNSFLSGGNKIRAFNGWVMPVLIYSFGILKWTQTELDALDRKVRTLLTAHRMHHPRSSVMRLYIPRRCGGRGILNAKDLHNREVCNLRDYFLHSDVDMHRVVVMVDKGFTPLSLAIENWRKPLVVGIKDREDIWKSKELHGRFYRALHGPDVDRLASVSWLRFGNLFGETEGFVFAIMDEVIKTNNYRKYILKDGTVDICRACHRPGESIRHVISGCSYLANGEYLHRHNLVTKIIHQQIALRYGLVTPEVPYYQYVPQPVLENGHATLYWDRSIITDRTILANKPDIVIIDRLARRAILVDVTIPHDDNLVKAEKDKMSKYLDLAHEVTDMWDVDSTIIVPIVVSAHGLIPKSLDQHLQRLSIGCWVRSQIQKAVLLDTARIVRRFLTLGS

SEQ ID NO: 26943 - protein, 955 aa, Hyles vespertilio
MGALDSIVSTYMEPSRDLVDTHSILYCAAVAACRVANVKFPINNVTTTRDVATVPAWQRRIEDRINRARTLIGKLIAFRNGNNRQRVMRFVAQAFSGTNISPRDYGLWVTERIDYYKQKVYAWANRIRRYRKRWDRFQQNRTFQSDQKRVYRCWERSPQCVVDGRLPSVHDMRTYWTNIWSSSISHTEADWFGVVERACESIPIMEAISISPEDVLVAIRPTQNWKSPGPDGLHNFWLKWLPCSHARLAAQFQDALDGGSLPTFMTTGVTHLLYKSGSATDPKNYRPITCLPTTYKLFTSILRAKIANHFTSNNILFPGQTGCKSGSRGTKELLLIDMTICQQARQNRRNLSAAWIDYKKAFDSVPHTWLMRVLSLYKIDTNLCTFLGSCMGQWTTVLRYPGGMVSPDCDEPIRIKRGIFQGDSLSPLWFCMALNPLSTLLVDSGLGYRLRRGTEPISHLLYMDDLKLFASKQTELIELLKITEKFSNSINMEFCVDKCAIIHVKRGEVAVSDGVQISDAVRLRALSETETYKYLGIPEALGILSADVKQSVKERFFGRLAKVLNSLLSGGNKIRAFNGWVMPVLMYSFGILRWTQTELDALDRKVRTLLTAHRMHHPRSSVMRLYIPRRCGGRGILNAKDLHNREVCNLRDYFLHSDVDMHRVVVKIDKGLTPLSLANENWRKPLVMSTKDREEVWKSKELHGRFYRALHGPDVDRPASVSWLRFGNLFGETEGFVFAIMDEVIKTNNYRKYILKDGTVDICRACHRPGESIRHVISGCSYLANGEYLHRHNLVAKIIHQQIALRYGLVTLEMPYYQYVPQPVLENGHATLYWDRSIITDRTIVANKPDIVIIDRLARRAILVDVTIPHDVNLVKAEKDKLSKYLDLAHEVTDMWDVDSTVIVPIVVSAHGLMPKSFDQHLQRLSIGRWVKSQIQKAVLLDTARIVRRFLTLDP

SEQ ID NO: 26944 - protein, 1197 aa, Hyles vespertilio
MFHNKARKKRNAHLTSPSSSSSASWASASDVFEVTPDNDASSQHGELQSSPPPPRPAQRRGRPPPAVGLGPVGPSVPPTVPATGGVVRRMRWTREINENVMRAYFGATNGGINLTAYRVKMLSLFQALEPTVDVSSQRLSDQVRFIQRRKLLDDDTLERLRTDLCFVQDDHVSPVSGDQAAGPTPTPVADFELTDNLVDNVSPQDKQQLRGALECAILEFASLSASCRPRLPRLPTHRRNLALMGALDSMLPTYLESSRDLVDTHSILYCAAVAACRVANVQFPKEYRATRGVVTVPAWQRRIEDRINRARTLIGKLISFKEGNSRPKIMRFVTQAFSGTNTSPRNYRLCVTERIDFFKQKVYAWANRIRRYRRRWDRFQQNRKFQTDQKRVYRCWENPPQGVVDGRLPSAHEMREYWTNIWSSPVSHTEASWFSVVDRACEAIPAMETILINPEDVLTAIRQTQNWKSPGPDGLHNFWLKWFPSSHARLAVQFQDALERGSLPAFMTTGVTHLLFKSGCTTEPKNYRPITCLPTIYKVLTSIIRSKITDHINSNQILFSGQTGCMNGSRGTKELLLINMTICQQARHNRRNLSAAWIDYKKAYDSVPHTWLMRVLNLYKINTNLCNFLGSCMGQWTTVLRYPGGTVPPDCDEPIRIKRGIFQGDSLSPLWFCMALNPLSTLLLDSGLGYRLRRGSEPISHLLYMDDLKLFASKQTELIELLKITDIFSKSINMDFGVDKCAVIHVKRGEVAVSDDILVSETVRLRSLSVTETYKYLGMPEALGIMGADVKRSLKERFFSRLTKVLNSFLSGGNKIRAFNGWVMPVLMYSFGILKWTQTELDALDRKVRTLLTAHRMHHPRSSVMRLYIPRRCGGRGILNAKDLHNREVCNLRDYFLHSDVDMHRVVVMVDKGFTPLYLAIENWRKPLVVGIKDREDIWKSKELHGRFYRALHGPDVDRLASVSWLRFGNLFGETEGFVFAIMDEVIKTNNYRKYILKDGTVDICRACHRPGESIRHVISGCSYLANGEYLHRHNLVAKIIHQQIALRYGLVTPEVPYYQYVPQPVLENGHATLYWDRSIITDRTIPANKPDIVIIDRLARRAILVDVTIPHDDNLVKAEKDKMSKYLDLAHEVADMWDVDSKIIVPIVVSAHGLIPKSLDQHLQRLSIGCWVRSQIQKAVLLDTARIVRRFLTLGS

SEQ ID NO: 26945 - protein, 1194 aa, Hyles vespertilio
MINNKARKKRNAHLTSPSSSSSASWASASDVFEVTSDNDASSQHGELQSSPPPPRPARRRGRPPPAVGLGPSVPPTVPATGGVVRRMRWTREINENVMRAYFGATKGGINLTAYRAKMLSLFQALEPTVDVSSQRLSDQVRFIQRRKLLDDDTLERLRTDLCFVQDDHVSPVSGDQAAGPTPTPVADFELTNNLDDNVSPQAKQQLRGALECAILEFSSLSASCRPRLPRLPTHRRNLALMGALDSMLTTYLESSRDLVDTHSILYCAAVAACRVANIKFPNEYKATRGVVIVPAWQRRIEDRINRARTLIGKLISFKEGNSRPKIMRFVTQAFSGTNTSPRNYRLCVTERIDFFKQKVYAWANRIRRYRRRWDRFQQNCKFQTDQKSVYRCWENPPQGVVDGRLPSAHEMREYWTNIWSSPVSHTEASWFSVVDRACEPIPAMETILISPEDVLTAIRQTQNWKSPGPDGLHNFWLKWFPSSHARLAAQFQNALERGSLPTFMTTGVTHLLFKSGCTTEPKNYRPITCLPTIYKVLTSIIRSKITDHINSNQILFSGQTGCMNGSRGTKELLLINMTICQQARHNRRNLSAAWIDYKKAYDSVPHTWLMRVLNLYKINTNLCNFLGSCMGQWTTVLRYPGGTVPPDCDEPIRIKRGIFQGDSLSPLWFCMALNPLSTLLLDSGLGYRLRRGSEPISHLLYMDDLKLFASKQTELIELLKITERFSNSINMDFGVDKCAVIHVKRGEVAVSDDILVSETVRLRSLSVTETYKYLGMPEALGIMGADVKRSLKERFFSRLTKVLNSFLSGGNKIRAFNGWVMPVLIYSFGILKWTQTELDALDRKVRTLLTAHRMHHPRSSVMRLYIPRRCGGRGILNAKDLHNREVCNLRDYFLHSDVDMHRVVVMVDKGFTPLSLAIENWRKPLVVGIKDREDIWKSKELHGRFYRALHGPDVDRLASVSWLRFGNLFGETEGFVFTIMDEVIKTNNYRKYILKDGTVDICRACHRPGESIRHVISGCSYLANGEYLHRHNLVAKIIHQQIALRYGLVTPEVPYYQYVPQPVLENGHATLYWDRSIITDRTILANKPDIVIIDRLARRAILVDVTIPHDDNLVKAEKDKMSKYLDLAHEVTDMWDVDSTIIVPIVVSAHGLIPKSLDQHLQRLSIGCWVRSQIQKAVLLDTARIVRRFLTLGS

SEQ ID NO: 26946 - protein, 1197 aa, Hyles vespertilio
MFHNKARKKRNAHLTSPSSSSSASWASASDVFEVTPDNDASSQHGELQSSPPPPRPAQRRGRPPPAVGLGPVGPSVPPTVPATGGVVRRMRWTREINENVMRAYFGATNGGINLTAYRVKMLSLFQALEPTVDVSSQRLSDQVRFIQRRKLLDDDTLERLRTDLCFVQEEHVSPVSGDQAAGPTPTPVADFELTDNLDDNVSPQDKQQLRGALECAILEFASLSASCRPRLPRLPTHRRNLALMGALDSMLPTYLESSRDLVDTHSILYCAAVAACRVANVQFPKEYRATRGVVTVPAWQRRIEDRINRARTLIGKLISFKEGNSRPKIMRFVTQAFSGTNTSPRNYRLCVTERIDFFKQKVYAWANRIRRYRRRWDRFQQNRKFQTDQKRVYRCWENPPQGVVDGRLPSAHEMREYWTNIWSSPVSHTEASWFSVVDRACEAIPAMETILINPEDVLTAIRQTQNWKSPGPDGLHNFWLKWFPSSHARLAVQFQDALERGSLPAFMTTGVTHLLFKSGCTTEPKNYRPITCLPTIYKVLTSIIRSKITDHINSNQILFSGQTGCMNGSRGTKELLLINMTICQQARHNRRNLSAAWIDYKKAYDSVPHTWLMRVLNLYKINTNLCNFLGSCMGQWTTVLRYPGGTVPPDCDEPIRIKRGIFQGDSLSPLWFCMALNPLSTLLLDSGLGYRLRRGSEPISHLLYMDDLKLFASKQTELIELLKITDIFSKSINMDFGVDKCAVIHVKRGEVAVSDDILVSETVRLRSLSVTETYKYLGMPEALGIMGADVKRSLKERFFSRLTKVLNSFLSGGNKIRAFNGWVMPVLMYSFGILKWTQTELDALDRKVRTLLTAHRMHHPRSSVMRLYIPRRCGGRGILNAKDLHNREVCNLRDYFLHSDVDMHRVVVMVDKGFTPLYLAIENWRKPLVVGIKDREDIWKSKELHGRFYRALHGPDVDRLASVSWLRFGNLFGETEGFVFAIMDEVIKTNNYRKYILKDGTVDICRACHRPGESIRHVISSCSYLANGEYLHRHNLVAKIIHQQIALRYGLVTSEVPYYQYVPQPVLENGHATLYWDRSIITDRTIPANKPDIVIIDRLARRAILVDVTIPHDDNLVKAEKDKMSKYLDLAHEVADMWDVDSTIIVPIVVSAHGLIPKSLDQHLQRLSIGCWVRSQIQKAVLLDTARIVRRFLTLGS

SEQ ID NO: 26947 - protein, 1111 aa, Dendrolimus kikuchii
MRWTQELNECVMRAYFEATEGGTNLTSYRGRLLSLFQTLQPASTVTAQRLSDQVRAIQRLHLLDESTLDRLRNTVRINRESTDTPQPTSPAPPADSQWPVNSTMDDVSEGLAVGNVSIQTNEQLRRTLEHSIQEFRDQPILNRPRLPKLPLHRNNLVLMGTLDCLLAPYFRSSADLVDTHSILYCGAVAVCRVAGVKFPNTQPTRPASGKPAWQIRIERRIDRARVLIAKLICFRAGNCRPRVMRFMAQAFAGTNVSPSEYMARATERIDFWKQKVYAWANRIRRYKERADRYFLNRTFQSEEKRVYRGWEKCSDSVTDRQMPNIDAMASFWRNIWSMPVSHTEGDWIELVKQSCEQVPDMEPIIIEPLDVGNAIRSAHNWKSPGLDGLHNFWIKWFKSSHGCLANQFQEAVDRGSLPTFMTTGVTHLLFKSGCTTEPKNYRPITCLPTIYKLLTSILGKKLSNYFYDNNILAITQNGCKAGSRGTKELLLIDTTVSQQARRNKRNLSVAWIDYKKAYDSVPHTWLMRVLELYKVDATLRTFLQACMRQWVTHLRLPGGGGASLPEGAINIERGIFQGDSLSPLWFCLALNPLSTLLESSKLGYRFRRGGEIMSHLLYMDDLKLFASNEPDLIELLKTTERFSKSINMEFGIEKCAVMHVRRGKVVNSPNLQLSENISLKSLSETETYKYLGMSESLGIADADVKQTVKDRFFCRLRKVLTSLLSGGNKVRAFNSWVMPVLAYSFGILRWTQTELDALDRRVRCLLTKYRMHHPRSSVMRLYISRRCGGRGFLNAKDLHNREVNNLRAYFLKMDVGLHKDVVAVDKGLTMLSLAKENWCNLAVLSASDRINVWKSKELHGRFYRALTGPDVDLSASVNWLRFGNLFGETEGFVFAIMDEVIKTNNYRKYILKDGTLDICRACHRPGESLRHIVSGCSHLSNGEYLHRHNLVARIIHQQLALRYGLVETEVPYYQYSPEPVLENSRATLYWDRSVITDRTIVANKPDIVIIDRSARRAILVDISIPHDDNLVKKEKEKLSKYLDLAHEVTAMWRLESTSIVPIVVTVNGLIAKSLDCHLERLSLGGWVKGQIQKAALLDTARIVRRFLSLEP

SEQ ID NO: 26948 - protein, 1195 aa, Laothoe populi
MINTTRNRVRCARLPSPSSSSSSASWASASEAPEPLPVTDASSQRDGLQSSPPTLTPARRRGRQHPPPVGLGPVGPCAPPMAPAAGGVVRRMRWTHSINENVMRAYFGATEGGTKLTAYRPKMLALFQDLEPTIDVSAQRLSDQVRYIQRRKLLDDAALDRLRANLCVVQDVVQRTVDTPSVPTEDVNIELVDDLDNNVSSHDIQCLRGALESAILEFKLVPACLRPRLPRLPTHKRNLALMGALDSMLPEYMESSRDLVDTHAILYCAAIAACRVANVRFPYDYRAARDATHVPAWQRSIEERIDRTRTLISKLICFKAGNNRPKVMRFVTQAFLGSSIRPQDYRFYVTERIDLLKQKVYAWANRIRRYKKRWNRFQQNRAFQSDQKRVYRCWEHSQQGVGDGRLPDVRDMRTYWANIWSSPVSHTEGAWIGVVERACEAISPMETISISPDDVLRAVRPTQNWKSPGPDGLHNFWLKWFVTSHSRLAAQFQSALESGSLPTFMTTGVTHLLFKSGSTTDPKNYRPITCLPTIYKLFTSIIRFKITYHIDNNNILFSAQTGCKIGSRSTKELLLIDMAICQQVHHNRRNLSAAWIDYKKAYDSVPHTWLMRVLDLYKIHSNLRTLLGACMRQWTTVLKYPGGAGPLDCDEPIKIDRGIFQGDSLSPLWFCLALNPLSTLLLDSGLGYRLRRGSVPISHLLYMDDLKLFAPKKSDLIELLKITKSFSNSISMEFGVDKCAVIHVGRGAVRVSDDVYLSETERLRSLSESETYKYLGMSEALGIMGADMKQSLKERFFCRLTKVLNSFLSGGNKIRAFNGWVMPVLMYSFGILKWTQTELDALDRRVRTLMTAHRMHHPRSSVMRLYIPRRCGGRGLLNAKDLHNREVSNLRDYFLHSDVDVHREVVKVDKGLTPLSLANENWRVPVVMSTGDRRGVWKSKELHGRFYRALNGPDVDQLASVSWLRFGDLFGETEGFVFAIMDEVVKTNNYRKYILKDGTVDICRACHRPGESIRHVISGCSYLANGEYLHRHNLVAKIIHQQLALRYHLVISEVPYYQYVPQPVLENGHTTLYWDRSVITDRTIVANKPDIVVIDRLARRAILVDVTIPHDDNLVKAEKDKMSKYLDLAHEVVDMWNVDSAIIVPIVVTANGLIPKSLDQHLQRLSIGRWVKSQIQKAVLLDTARIVRRFLTLGS

SEQ ID NO: 26949 - protein, 930 aa, Laothoe populi
MYCAAFAACRVANVRFPNDYRAARDATHVPAWQRRIEERIDRTRTLISKLICFKAGNNRPKVMRFVTQAFLGSSIRPQDYRFCVTERIDLLKQKVYAWANRIRRYKKRWNRFQQNRAFQSDQKRVYRCWEHSQQGVGDGRLPDVRDMRTYWANIWSSPVSHTEGAWIGVVERACEAISPMETISISPDDVLRAVRPTQNWKSPGPDGLHNFWLKWFVTSHSRLAAQFQSALESGSLPTFMTTGVTHLLFKSGSTTDPKNYRPITCLPTIYKLFTSIIRFKIAYHIDNNNILFSAQTGCKIGSRGTKELLLKDMAICQQVRHNRRNLSAAWIDYKKAYDSVPHTWLMRVLDLYKIHSNLRTLLGACMRQWTTVLKYPGGAGPLDCDEPIKIDRGIFQGDSLSPLWFCLALNPLSTLLLDSGLGYRLRRRSVPISHLLYMDDLKLFAPKKSDLIELLKITKSFSNSISMEFGVDKCAVIHVGRGAVRVSDDVYLSETERLRSLSESETYKYLGMSEALGIMGADMKQSLKERFFCRLTKVLNSFLSGGNKIHAFNGWVMPVLMYSFGILKWTQTELDALDRRVRTLMTAHRMHHPRSSVMRLYIPRRCGGRGLLNAKDLHNREVRNLRDYFLHSDVDVHREVVKVDKGFTPLSLANENWRVPVVMSTGDRRGVWKSKELHGRFYRALNGPDVDQLASVSWLRFGDLFGETEGFVFAIMDEVVKTNNYRKYILKDGTVDICRACHRPGESIRHVISGCSYLANGEYLHRHNLVAKIIHQQLALRYHLVISEVPYYQYVPQPVLENGHTTLYWDRSIITDRTIVANKPDIVVIDRLARRAILVDVTIPHDDNLVKAEKDKMSKYLDLAHEVVDMWNVDSAIIVPIVVTANGLIPKSLDQHLQRLSIGRWVKSQIQKAVLLDTARIVRRFLTLGS

SEQ ID NO: 26950 - protein, 1111 aa, Dendrolimus punctatus
MRWTQELNECVMRAYYEATEGGTNLTSYRGRLLSLFQTLQPASAVTAQRLSDQVRAIQRLHLLDESTLDRIRNAVRINRESTDTPQPTSPATPADSQGAVNFTIDDVSDSIAVGNVSIQINEQLRRTLEHSIQEFRDQPILNRPRVPKLPLHRNNLLLMGALDCLLAPYFGSSADLVDTHSILYCGAVAVCRVAGVKFPNTQPTRPASGKPAWQIRIERRIDRARVLIAKLICFRASNCRPRVVRFVAQAFTGTNVSPSEYMARATERIDFWKQKVYAWANRIRRYKERADRYFLNRTFQSEEKRVYRGWEKSRDSVADRQMPNIDAMASFWRSIWSMPVSHTEGDWIELVKQSCDQVPDMEPITIEPLDVGNAIRSAHNWKSPGPDGLHNFWIKWFKSSHSCLANQFQEAVDRGSLPTFMTTGVTHLLFKSGCTTEPKNYRPITCLPTIYKLLTSILGKKLSNYFYNNNILAITQNGCKAGSRGTKELLLIDTTVSQQARRNRRNLSVAWIDYKKAYDSVPHTWLMRVLELYKVDATLRTFLQTCMRQWVTHLKLPGGRGPSLPEGAINIERGIFQGDSLSPLWFCLALNPLSTLLESLKLGYRFRRGGEIMSHLLYMDDLKLFASNEPDLIELLKTTERFSKSINMEFGIEKCAVMHVRRGKVVNSPNLQLSENMSLKSLSETETYKYLGMSESLGIADADVKQTVKDRFFCRLRKVLTSLLSGGNKVRAFNSWVMPVLAYSFGILRWTQTELDALDRRVRCLLTKHRMLHPRSSVMRLYISRRCGGRGFLNAKDLHNREVNNLRTYFLKMDVGLHKDVVAVDKGLTTLSLANENWCNLAVLSASERINVWKSKALHGRFYRALTGPDVDLSASVNWLRFGNLFGETEGFVFAIMDEVIKTNNYRKYILKDGTLDICRACHRPGESLRHIVSGCSHLSNGEYLHRHNLVARIIHQQLALRYGLVETEVPYYQYSPEPVLENSCATLYWDRSIITDRTIVANKPDIVIIDRSARRAILVDISIPHDDNLVKKEKEKLSKYLDLAHEVTAMWRLESTSIVPIVVTVNGLIAKSLDRHLERLSLGSWVKGLIQKAALLDTARIVRRFLSLEP

SEQ ID NO: 26951 - protein, 868 aa, Hyles vespertilio
MRFVTHAFSGTNTSPRNYRLCVTERIDFFKQKVYAWANRIRRYRRRWDRFQQNRKFQTDQKSVYRCWENPPQGVVDGRLPSAHEMREYWTNIWSSPVSHTEASWFSVVDRACEAIPAMETILISPEDVLTAIRQTQNWKSPGPDGLHNFWLKRFPSSHYRLAAQFQNALERGSLPTFMTTGVTHLLFKSGCTTEPKNYRPITCLPTIYKVLTSIIRSKITDHINSNQILFSGQTGCMNGSRGTKELLLINMTICQQARHNRRNLSAAWIDYKKAYDSVPHTWLMRVLNLYKINTNLCKFLGSCMGQWTTVLRYPGGTVPLDCDEPIRIKRGIFQGDSLSPLWFCMALNPLSTLLLDSGLGYRLRRGSEPISHLLYMDDLKLFASKQTELIELLKITERFSNSINMDFGVDKCAVIHVKRGEVAVSDDILVSETVRLRSLSVTETYKYLGMPEALGIMGADVKRSLKERFFSRLTKVLNSFLSGGNKIRAFNGWVMPVLIYSFGILKWTQTELDALDRKVRTLLTAHRMHHPRSSVMRLYIPRRCGGRGILNAKDLHNREVCNLRDYFLHSDVDMHRVVVMVDKGFTPLSLAIENWRKPLVVGIKDREDIWKSKELHGRFYRALHGPDVDRLASVSWLRFGNLFGETEGFVFAIMDEVIKTNNYRKYILKDGTVDICRACHRPGESIRHVISGCSYLANGEYLHRHNLVAKIIHQQIALRYGLVTPEVPYYQYVPQPVLENGHATLCWDRSIITDRTILANKPDIVIIDRLARRAILVDVTIPHDDNLVKAEKDKMSKYLDLAHEVTDMWDVDSTIIVPIVVSAHGLIPKSLDQHLQRLSIGCWVRSQIQKAVLLDTARIVRRFLTLGS

SEQ ID NO: 26952 - protein, 954 aa, Hyles vespertilio
MGALDSMLTTYLESSRDLVDTHSILYCAAVAACRVANIKFPNEYKATRGVVIVPAWQRRIEDRINRARTLIGKLISFKEGNSRPKIMRFVTQAFSGTNTSPRNYRLCVTERIDFFKQKVYAWANRIRRYRRRWDRFQQNRKFQTDQKSVYRCWENPPQGVVDGRLPSAHEMREYWTNIWSSPVSHTEASWFSVVDRACEAIPAMETILISPEDVLTAIRQTQNWKSPGPDGLHNFWLKWFPSSHARLAAQFQNALERGSLPTFMTTGVTHLLFKSGCTTEPKNYRPITCLPTIYKVLTSIIRSKITDHINSNQILFSGQTSCMNGSRGTKELLLINMTICQQARHNRRNLSAAWIDYKKAYDSVPHTWLMRVLNLYKINTNLCNFLGSCMGQWTTALRYPGGTVPPDCDEPIRIKRGIFQGDSLSPLWFCMALNPLSTLLLDSGLGYRLRRGSEPISHLLYMDDLKLFASKQTELIELLKITERFSNSINMDFGVDKCAVIHVKRGEVAVSDDILVSETVRLRSLSVTETYKYLGMPEALGIMGADVKRSLKERFFSRLTKVLNSFLSGGNKIRAFNGWVMPVLIYSFGILKWTQTELDALDRKVRTLLTAHRMHHPRSSVMRLYIPRRCGGRGILNAKDLHNREVCNLRDYFLHSDVDMHRVVVMVDKGFTPLSLAIENWRKPLVVGIKDREDIWKSKELHGRFYRALHGPDVDRLASVSWLRFGNLFGETEGFVFAIMDEVIKTNNYRKYILKDGTVDICRACHRPGESIRHVISGCSYLANGEYLHRHNLVAKIIHQQIALRYGLVTPEVPYYQYVPQPVLENGHATLYWDRSIITDRTILANKPDIVIIDRLARRAILVDVTIPHDDNLVKAEKDKMSKYLDLAHEVTDMWDVDSTIIVPIVVSAHGLIPKSLDQHLQRLSIGCWVRSQIQKAVLLDTARIVRRFLTLGS

SEQ ID NO: 26953 - protein, 784 aa, Hyles vespertilio
MREYWTNIWSSPVSHTEASWFSVVDRACEAIPAMETILINPEDVLTAIRQTQNWKSPGPDGLHNFWLKWFPSSHARLAVQFQDALERGSLPAFMTTGVTHLLFKSGCTTEPKNYRPITCLPTIYKVLTSIIRSKITDHINSNQILFSGQTGCMNGSRGTKELLLINMTICQQARHNRRNLSAAWIDYKKAYDSVPHTWLMRVLNLYKINTNLCNFLGSCMGQWTTVLRYPGGTVPPDCDEPIRIKRGIFQGDSLSPLWFCMALNPLSTLLLDSGLGYRLRRGSEPISHLLYMDDLKLFASKQTELIELLKITERFSNSINMDFGVDKCAVIHVKRGEVAVSDDILVSETVRLRSLSVTETYKYLGMPEALGIMGADVKRSLKERFFSRLTKVLNSFLSGGNKIRAFNGWVMPVLIYSFGILKWTQTELDALDRKVRTLLTAHRMHHPRSSVMRLYIPRRCGGRGILNAKDLHNREVCNLRDYFLHSDVDMHRVVVMVDKGFTPLSLAIENWRKPLVVGIKDREDIWKSKELHGRFYRALHGPDVDRLASVSWLRFGNLFGETEGFVFAIMDEVIKTNNYRKYILKDGTVDICRACHRPGESIRHVISGCSYLANGEYLHRHNLVTKIIHQQIALRYGLVTPEVPYYQYVPQPVLENGHATLYWDRSIITDRTILANKPDIVIIDRLARRAILVDVTIPHDDNLVKAEKDKMSKYLDLAHEVTDMWDVDSTIIVPIVVSAHGLIPKSLDQHLQRLSIGVWVRSQIQKAVLLDTARIVRRFLTLGS

SEQ ID NO: 26954 - protein, 945 aa, Hyles vespertilio
MGALDSMLPTYLESSRDLVDTHSILYCAAVATCRVANVQFPKEYRATRGVVTVPAWQRRIEDRINRARTLIGKLISFKEGNSRPKIMRFVPQAFSGTNTSPRNYRLCVTERMNFFKQKVYAWANRIRRYRRRWDRFQQNRKFQTDQKRVYRCWENPPQGVVDGRLPSAHEMREYWTNIWSSPVSHTEASWFSVVDRACEAIPAMETILISPEDVLTAIRQTQNRKSPGPDGLHNFWLKWFPSSHARLAVQFQDALERGSLPAFMTTGVTHLLFKSGCTTEPKNYRPITCLPTIYKVLTSIIRSKITDHINSNQILFSGQTGCMNGSRGTKELLLINMTICQQARQNRRNLSAAWIDYKKAYDSVPHTWLMRVLNLYKINTNLCNFLGSCMGQWTTVLRYPGGTVPPDCDEPIRIKRGIFQGDSLSPLWFCMALNPLSTLLLDSGLGYRLRRGSEPISHLLYMDDLKLFASKQTELIELLKITDRFSKSINMDFGVDKCAVIHVKRGEVAVSDDILVSEIVRLRSLSVTETYKYLGMPEALGIMGADVKRSLKERFFSRLTKVLNSFLSGRNKIRAFNGWVMPVLMYSFGILKWTQTELDALDRKVRTLLTAHRMHHPRSSVMRLYIPRRCGGRGILNAKDLHNREVCNLRDYFLHSDVDMHRVVVMVDKGFTPLSLAIENWRKPLVVGIKDREDIWKSKELHGRFYRALHGPDVDRLASVSWLRFGNLFGETEGFVFAIMDEVIKTNNYRKYILKDGTVDICRACHRLGESIRHVISGCSYLANGEYLHRHNLVAKIIHQQIALRYGLVTPEVPYYQYVPQPVLENGHATLYWDRSIITDRTIPANKPDIVIIDRLARRAILVDVTIPHDDNLVKAEKDKMSKYLDLAHEVTDMWDVDSTIIVPIVVSAHGLIPKSLDQHLQRLSIGCWVRSQIQKAVLLDTHVL

SEQ ID NO: 26955 - protein, 1111 aa, Dendrolimus kikuchii
MRWTQELNECVMRAYYEATEGETNLTSYRGRLLSLFQTLQPASTVTAQRLSDQVRAIQRLHLLDESTLDRLRNAVRINREATDTPQPTSPAPPADSQRPVNFTMDDVSDGLAVGDVSIQINEQLRRTLEHSIQEFRDQPILNRPRVPKLPMHRNNLLLMGTLDCLLAPYFRSSTDLADTHSILYCGAVAVCRMAGVKFPNTQPTRPASGKPAWQIRIERRIDRARVLIAKLICFRAGNCRPRVMRFVAQAFAGTNISPSEHMARATERIDFWKQKVYAWANRIRRYKERADRYFLNRTFQSEEKRVYRGWEKSSDSVADRQIPNTDAMASFWRSIWSVPVSHTEGDWIEVIKQSCEQVPDMEPITIEPLDVGNAIRSAHNWKSPGPDGLHNFWIKWFKSSHGCLANQFQEAVDRGSLPTFMTTGVTHLLFKSGCTTEPKNYRPITCLPTIYKLLTSILEKKLSNYFYNNNILAITQNGCKAGSRGTKELLLIDTTVSQQARRNRRNLSVAWIDYKKAYDSVPHTWLMRVLELYKVDATLRTFLQACMRQWVTYLRVPGGGGVPLPEGEINIERGIFQGDSLSPLWFCLALNPLSTLLESSKLGYRFRRGGEIVSHLLYMDDLKLFASNEPDLIELLKTTEHFSKSINMEFGIEKCAVMHVRRGKVVNSPNLQLSENMSLKSLSETETYKYLGMSESLGIADADVKQTVKDRFFCRLRKVLTSLLSGGNKVRAFNSWVMPVLAYSFGILRWTQTELDALDRRVRCLLTKHRMHHPRSSVMRLYISRRCGGRGFLNAKDLHNREVNNLRAYFLKMNVGLHKDVVAVDKGLTTLALAKENWCNLAVLSTSDRINVWKSKELHGRFYRALTGPDVDLSASVNWLRFGNLFGETEGFVFAIMDEVIKTNNYRKYILKDGTSDICRACHRPGESLRHIVSGCSHLSNGEYLHRHNLVARIIHQQLALRYGLVETEVPYYQYSPEPVLENSRATLYWDRSVITDRTIVANKPDIVIIDRSARRAILVDISIPHDDNLVKKEKEKLSKYLDLAHEVTAMWRLESTSIVPIVVTVNGLIAKSLDRHLERLSLGSWVKGQIQKAALLDTARIVRRFLSLEP

SEQ ID NO: 26956 - protein, 1111 aa, Dendrolimus kikuchii
MRWTQELNECVMRAYYEATEGETNLTSYRGRLLSLFQTLQPASTVTAQRLSDQVRAIQRLHLLDESTLDRLRNAVRINREATDTPQPTSPAPPADSQRPVNFTMDDVSDGLAVGDVSIQINEQLRRTLEHSIQEFRDQPILNRPRVPNLPMHRNNLLLMGTLDCLLAPYFRSSTDLADTHSILYCGAVAVCRVAGVKFPNTQPTRPASGKPAWQIRIERRIDRARVLIAKLICFRAGNCRPRVMRFVAQAFAGTNISPSEHMARATERIDFWKQKVYAWANRIRRYKERADRYFLNRTFQSEEKRVYRGWEKSSDSVADRQIPNTDAMASFWRSIWSVPVSHTEGDWIEVIKQSCEQVPDMEPITIEPLDVGNAIRSAHNWKSPGPDGLHNFWIKWFKSSHGCLANQFQEAVDRGSLPTFMTTGVTHLLFKSGCTTEPKNYRPITCLPTIYKLLTSILEKKLSNYFYNNNILAITQNGCKAGSRGTKELLLIDTTVSQQARRNRRNLSVAWIDYKKAYDSVPHTWLMRVLELYKVDATLRTFLQACMRQWVTYLRVPGGGGVPLPEGEINIERGIFQGDSLSPLWFCLALNPLSTLLESSKLGYRFRRGGEIVSHLLYMDDLKLFASNEPDLIELLKTTEHFSKSINMEFGIEKCAVMHVRRGKVVNSPNLQLSENMSLKSLSETETYKYLGMSESLGIADADVKQTVKDRFFCRLRKVLTSLLSGGNKVRAFNSWVMPVLAYSFGILRWTQTELDALDRRVRCLLTKHRMHHPRSSVMRLYISRRCGGRGFLNAKDLHNREVNNLRAYFLKMNVGLHKDVVAVDKGLTTLALAKENWCNLAVLSTSDRINVWKSKELHGRFYRALTGPDVDLSASVNWLRFGNLFGETEGFVFAIMDEVIKTNNYRKYILKDGTLDICRACHRPGESLRHIVSGCSHLSNGEYLHRHNLVARIIHQQLALRYGLVETEVPYYQYSPEPVLENSRATLYWDRSVITDRTIVANKPDIVIIDRSARRAILVDISIPHDDNLVKKEKEKLSKYLDLAHEVTAMWRLESTSIVPIVVTVNGLIAKSLDRHLERLSLGSWVKGQIQKAALLDTARIVRRFLSLEP

SEQ ID NO: 26957 - protein, 1138 aa, Deilephila porcellus
MIRKTTRQRNARKTSPSSSSSASWASASDVFEVMPNIDASSQRDELQSSPPPLRPARRRGRPPPAVGLGPVGQSVPSTVPATGGVVRRMRWTREINENVMRAYFGATKGGTHLTAYRVKMLSLFQAFEPTVVVSSQRLSDQVRFIQRRKLLDDEALERLRTDLCVVQGVNVTPVSRGPVADSTSTPVADIELADNLDDNVSPQDEQCLRGALERAISEFVSLSASCRPRLPRLPTHRRNLALVGALDSMLPTYLESSRDLVDTHSILYCAAVAACRVANITFPNEYRATRGVATVPAWQRRIEDRINRARTLIGKLVSFREGNNRPRVMRFVTQAFSGTNTSPRDYRLCVTERIDYFKQKVYAWANRIRRYRKRWDRFQQNRMFQSDQKRVYRCWESSPQSVMDGRLPSAREMREYWANIWASPVSHTEAAWFSVVNQACEALPTMETISISPEDVLAAIRPTQNWKSPGPDGLHNFWLKWFPSSHARLAIQFQDALERGSLPTFMTTGVTHLLFKSGCTTDPKNYRPITCLPTIYKILTSIIRSKITCHITTNKILFSGQTGCKSGSRGTKELLLIDMTICQQVRHNRRNLSAAWIDYKKAYDSVPHTWLMRVLNLYKIDTKLCTFLEVCMGQWTTVLKYPGATSPSDCDEPIAIRRGIFQGDSLSPLWFCMALNPLSTLLLDSGLGYRLRRGTEPISHLLYMDDLKLFASKQSELIELLKITEMFSKSINMEFGVNKCAVIHVKRGEVAVSDDIQVSETVRLRSLSEMETYKYLGMPEALGIMGVDVKQSLKERFFSRLTKVLNSFLSGGNKIRAFNGWVMPALMYSFGILRWTQTELDALDRKVRTLLTAHRMHHPRSSVMRLYIPRRCGGRGMLNAKDLHNREVCNLRDYFLNSDVDMHGVVVMVDKGFTPLSLANENWRKPLVMGIKDREEIWKGKELHGRFYRALHGPDVDRLASVSWLRFGNLFGETEGFVFAIMDEVIKTNNYRKYILKDGTVDICRACHRPGESIRHVISGCSYLANGEYLHRHNLVAKIIHQQIALRYGLVTPEVPYYQYVPQPVLENGHATLYWDRSVITDRTIVANKPDIVIIDRLARRAILVDVTIPHDDNLVKAEKKHLYYYHLILYIRRFYTY

SEQ ID NO: 26958 - protein, 954 aa, Hyles vespertilio
MGALDSMLPTYLESSRDLVDTHSILYCAAVAACRVANVQFPKEYRATRGVVTVPAWQRRIEDRINRARTLIGKLISFKEGNSRPKIMRFVTQAFSGTNTSPRNYRLCVTERIDFFKQKVYAWANRIRRYRRRWDRFQQNRKFQTDQKRVYRCWENPPQGVVDGRLPSAHEMREYWTNIWSSPVSHTEASWFSVVDRACEAIPAMETILINPEDVLTAIRQTQNWNSPGPDGLHNFWLKWFPSSHARLAVQFQDALERGSLPAFMTTGVTHLLFKSGCTTEPKNYRPITCLPTIYKVLTSIIRSKITDHINSNQILFSGQTGCMNGSRGTKELLLINMTICQQARHNRRNLSAAWIDYKKAYDSVPHTWLMRVLNLYKINTNLCNFLGSCMGQWTTVLRYPGGTVPPDCDEPIRIKRGIFQGDSLSPLWFCMALNPLSTLLLDSGLGYRLRRGSEPISHLLYMDDLKLFASKQTELIELLKITDIFSKSINMDFGVDKCAVIHVKRGEVAVSDDILVSETVRLRSLSVTETYKYLGMPEALGIMGADVKRSLKERFFSRLTKVLNSFLSGGNKIRAFNGWVMPVLMYSFGILKWTQTELDALDRKVRTLLTAHRMHHPRSSVMRLYIPRRCGGRGILNAKDLHNREVCNLRDYFLHSDVDMHRVVVMVDKGFTPLYLAIENWRKPLVVGIKDREDIWKSKELHGRFYRALHGPDVDRLASVSWLRFGNLFGETEGFVFAIMDEVIKTNNYRKYILKDGTVDICRACHRPGESIRHVISSCSYLANGEYLHRHNLVAKIIHQQIALRYGLVTPEVPYYQYVPQPVLENGHATLYWDRSITTDRTIPANKPDIVIIDRLARRAILVDVTIPHDDNLVKAEKDKMSKYLDLAHEVADMWDVDSTIIVPIVVSAHGLIPKSLDQHLQRLSIGCWVRSQIQKAVLLDTARIVRRFLTLGS

SEQ ID NO: 26959 - protein, 1197 aa, Hyles vespertilio
MINNKARKKRNAHLTSPSSSSSASWASASDVFEVTSDNDASSQHGELQSSPPPPRPARRRGRPPPAVGLGPVGPSVPPTVPATGGVVRRMRWTREINENVMRAYFGATKGGINLTAYRAKMLSLFQALEPTVDVSSQRLSDQVRFIQRRKLLDDDTLERLRTDLCFVQDDHVSPVSGDQAAGPTPTPVADFELTDNLDDNVSPQAKQQLRGALECAILEFSSLSASCKPRLPRLPTHRRNLALMGALDSMLTTYLESSRDLVDTHLILYCAAVAACRVANIKFPNEYKATRGVVIVPAWQRRIEDRINRARTLIGKLISFKEGNSRPKIMRFVTQAFSGTNTSPRNYRFCVTERIDFFKQKVYAWANRIRRYRRRWDRFQQNRKFQTDQKSVYRCWENPPQGVVDGRLPSAHEMREYWTNIWSSPVSHTEASWFSVVDRACEAIPAMETILISPEDVLTAIRQTQNWKSPGPDGLHNFWLKWFPSSHARLAAQFQNALERGSLPTFMTTGVTHLLFKSGCTTEPKNYRPITCLPTIYKVLTSIIRSKITDHINSNQILFSGQTGCMNGSRGTKELLLINMTICQQARHNRRNLSAAWIDYKKAYDSVPHTWLMRVLNLYKINTNLCNFLGSCMGQWTTVLRYPGGTVPPDCDEPIRIKRGIFQGDSLSPLWFCMALNPLSTLLLDSGLGYRLRRGSEPISHLLYMDDLKLFASKQTELIELLKITERFSNSINMDFGVDKCAIIHVKRGEVAVSDDILVSETVRLRSLSVTETYKYLGMPEALGIMGADVKRSLKERFFSRLTKVLNSFLSGGNKIRAFNGWVMPVLIYSFGILKWTQTELDALDRKVRTLLTAHRMHHPRSSVMRLYIPRRCGGRGILNAKDLHNREVCNLRDYFLHSDVDMHRVVVMVDKGFTPLSLAIENWRKPLVVGIKDREDIWKSKELHGRFYRALHGPDVDRLASVSWLRFGNLFGETEGFVFAIMDEVIKTNNYRKYILKDGTVDICRACHRPGESIRHVISGCSYLANGEYLHRHNLVAKIIHQQIALRYGLVTPEVPYYQYVPQPVLENGHATLYWDRSIITDRTILANKPDIVIIDRLARRAILVDVTIPHDDNLVKAEKDKMSKYLDLAHEVTDMWDVDSTIIVPIVVSARGLIPKSLDQHLQRLSIGCWVRSQIQKAVLLDTARIVRRFLTLGS

SEQ ID NO: 26960 - protein, 1197 aa, Hyles vespertilio
MIKRKARTTQNARIRSPSSSSSASWASASDVFEETPDNDALSQRDELQSSPPPPRPARRRGQPPPAVGLGPVGPSVPPTIPATGGVVRRMRWTREINENVMRAYLGATKGGTNLTAYRAKMLSLFQALEPTIDVSSQLLSDQVRFIQRRKLLGDDTLERLRTDLCVVQDDNVSPVSGDQAVGPTPTPVADFELTDNLDDNVSPQDKQHLRGGLVRAISDFVSVSASCRPRLLRLPTHRRNLALMGALDSMLPTYLESSRDLVDTHSILYCAAVAACRVANVQFPKEHRATRSVAAVPAWQLRIEDRINRARTLIGKLISFSEGNSRLRIMRFVTQAFSGTNISPQNYRLCVTERIDFCKQKVYAWANRIRRYRRRWDRFQQNRMFQSDQKRVYRCWEDSSQGVVDGRLPGAHEMREYWTNIWSSPVSHTEASWFSVVDRACESIPAMETILISSEDVQTAIRRTQNWKSPGPDGLHNFWLKWFPSSHARLAAQFQDALEAGSLPAFMTKGVTHLLFKSGCTTEPKNYRPITCLPTIYKILTSIIRSKITDHITSNQILFPGQTGCMNGSRGTKELLLINMTICQQARHNRRNLSAAWIDYKKAYDSVPHTWLMRVLNLYKINTNLCNFLGSCMGQWTTVLRYPGGTAPPDCDEPIRIKRGIFQGDSLSPLWFCMALNPLSTLLLDSGLGYRLRRGSEPISHLLYMDDLKLFASKQTELVELLKITERFSNSINMEFGVDKCAVIHVKRGEVAVSDDIQVSETVRLRHLSVTETYKYLGMPEALGIMGANVKQSLKERFFSRLTKVLNSFLSGGNKIRAFNGWVMPVLMYSFGILKWTQTELDALDRKVRTLLTAHRMHHPRSSVMRLYIPRRCGGRGILNAKDLHNREVCNLRDYFLHSDVDMHRVVVMVDKGFTPLSLAIENWRKPLVVGTKDREDIWKSKELHGRFYRALHGPDVDRLASVSWLRFGNLFGETEGFVFAIMDEVIKTNNYRKYILKDGTVDICRACHRPGESIRHVISGCSYLANGEYLHRHNLVAKIIHQQIALRYGLVTPEVPYYQYVPQPVLENGHATLYWDRSIITDRTILANKPDIVIIDRLARRAILVDITIPHDDNLVKAEKDKMSKYLDLAHEVTDMWDVDSTIIVPIVVSAHGLIPKSLDQHLQRLSIGVWVRSQIQKAVLLDTARIVRRFLTLGS

SEQ ID NO: 26961 - protein, 1197 aa, Hyles vespertilio
MFHNKARKKRNAHLTSPSSSSSASWASASDVFEVTPDNDASSQHGELQSSPPPPRPAQRRGRPPPAVGLGPVGPSVPPTVPATGGVVRRMRWTREINENVMRAYFGATNGGINLTAYRVKMLSLFQALEPTVDVSSQRLSDQVRFIQRRKLLDDDTLERLRTDLCFVQEDHVSPVSGDQAAGPTPTPVADFELTDNLDDNVSPQDKQQLRGALECAILEFASLSASCRPRLPRLPTHRRNLALMGALDSMLPTYLESSRDLVDTHSILYCAAVAACRVANVQFPKEYRATRGVVTVPAWQRRIEDRINRARTLIGKLISFKEGNSRPKIMRFVTQAFSGTNTSPRNYRLCVTERIDFFKQKVYAWANRIRRYRRRWDRFQQNRKFQTDQKRVYRCWENPPQGVVDGRLPSAHEMREYWTNIWSSPVSHTEASWFSVVDRACEAIPAMETILINPEDVLTAIRQTQNWKSPGPDGLHNFWLKWFPSSHARLAVQFQDALERGSLPAFMTTGVTHLLFKSGCTTEPKNYRPITCLPTTYKVLTSIIRSKITDHINSNQILFSGQTGCMNGSRGTKELLLINMTICQQARHNRRNLSAAWIDYKKAYDSVPHTWLMRVLNLYKINTNLCNFLGSCMGQWTTVLRYPGGTVPPDCDEPIRIKRGIFQGDSLSPLWFCMALNPLSTLLLDSGLGYRLRRGSEPISHLLYMDDLKLFASKQTELIELLKITERFSNSINMDFGVDKCAVIHVKRGEVAVSDDILVSETVRLRSLSVTETYKYLGMPEALGIMGADVKRSLKERFFSRLTKVLNSFLSGGNKIRAFNGWVMPVLIYSFGILKWTQTELDALDRKVRTLLTAHRMHHPRSSVMRLYIPRRCGGRGILNAKDLHNREVCNLRDYFLHSDVDMHRVVVMVDKGFTPLSLAIENWRKPLVVGIKDREDIWKSKELHGRFYRALHGPDVDRLASVSWLRFGNLFGETEGFVFAIMDEVIKTNNYRKYILKDGTVDICRACHRPGESIRHVISGCSYLANGEYLHRHNLVTKIIHQQIALRYGLVTPEVPYYQYVPQPVLENGHATLYWDRSIITDRTILANKPDIVIIDRLARRAILVDVTIPHDDNLVKAEKDKMSKYLDLAHEVTDMWDVDSTIIVPIVVSAHGLIPKSLDQHLQRLSIGVWVRSQIQKAVLLDTARIVRRFLTLGS

SEQ ID NO: 26962 - protein, 1127 aa, Hyles vespertilio
MINNKARKKRNAHLTSPSSSSSASWASASDVFEVTSDNDASSQHGELQSSPPPPRPARRRGRPPPAVGLGPVGPSVPPTVPATGGVVRRMRWTREINENVMRAYFGATKGGINLTAYRAKMLSLFQALEPTVDVSSQRLSDQVRFIQRRKLLDDDTLERLRTDLCFVQDDHVSPVSGDQAAGPTPTPVADFELTDNLDDNVSPQAKQQLRGALECAILEFSSLSASCRPRLPRLPTHRRNLALMGALDSMLTTYLESSRDLVDTHSILYCAAVAACRVANIKFPNEYKATRGVVIVPAWQRRIEDRINRARTLIGKLISFKEGNSRPKIMRFVTQAFSGTNTSPRNYRLCVTERIDFFKQKVYAWANRIRRYRRRWDHFQQNRKFQTDQKSVYRCWENPPQGVVDGRLPSAHEMREYWTNIWSSPVSHTEASWFSVVDRACEAIPAMETILISPEDVLTAIRQTQNWKSPGPDGLHNFWLKWFPSSHARLAAQFQNALERGSLPTFMTTGVTHLLFKSGCTTEPKNYRPITCLPTIYKVLTSIIRSKITDHINSNQILFSGQTGCMNGSRGTKELLLINMTICQQARHNRRNLSAAWIDYKKAYDSVPHTWLMRVLNLYKINTNLCNFLGSCMGQWTTVLRYPGGTVPPDCDEPIRIKRGIFQGDSLSPLWFCMALNPLSTLLLDSGLGYRLRRGSEPISHLLYMDDLKLFASKQTELIELLKITERFSNSINMDFGVDKCAVIHVKRGEVAVSDDILVSETVRLRSLSVTETYKYLGMPEALGIMGADVKRSLKERFFSRLTKVLNSFLSGGNKIRAFNGWVMPVLIYSFGILKWTQTELDALDRKVRTLLTAHRMHHPRSSVMRLYIPRRCGGRGILNAKDLHNREVCNLRDYFLHSDVDMHRVVVMVDKGFTPLSLAIENWRKPLVVGIKDREDIWKSKELHGRFYRALHGPDVDRLASVSWLRFGNLFGETEGFVFAIMDEVIKTNNYRKYILKDGTVDICRACHRPGESIRHVISGCSYLANGEYLHRHNLVAKIIHQQIALRYGLVTPEVPYYQYVPQPVLENGHATLYWDRSIITDRTILANKPDIVKKIDWRAGLYLLTSPSRMTITLSKLKKTKCLNI

SEQ ID NO: 26963 - protein, 1202 aa, Ephestia elutella
MITRSARLRSARPTSPPASSSSTSSDEQYATPPTSAVSSDEDGPPTPPPPRLPVRRGRPPLPARLGPAAGPTPLSSAPATGGVVRRMTWTTSINENVMRAYFGATEGGSNLSAYRARMLPLFQALEPTVNVSAQRLSDQVRAIQRCRMLDMPTLERLRQEAQPVPTIIVANSQTRREPVVMSNTQNSSSLQVDDVPAQNDCGNTNVSTQNNEQLRSALDDAIHLYRSVPASQRPRLPRLPMHKKNILLMGALDRLLDPYLESSQDLADTHSILYCAAIAACRVAQVKFPDSNRSPRQVTETPAWQLRIERRITTARTLIAKLICFRSGNNRPRVMRFVTQAFVGTNIQPRDYMLWVTERIDFLKQKIYAWANRIRRFRERVDRYRQNRIFQCDQRKVYRQWESPANSVVDRQLPSDQNIIHFWQSIWSVPVDHTEDAWIDVVGGACDSMDTMEPVIISADDVSCAIRSAHNWKTPGPDGLHNFWLKWFHRSHAVLATQFQNSIEAGSLPAFMTTGITFLLYKNGSTTEAKNYRPITCLPTLYKLLTSILTSKINQHVDNNNIMAIVQNGCRAGSRGTKELLLIDKTICQQVRRNRKNLSVAWIDYKKAYDSVPHSWLRRVLELYKLDTTLCTFLNTCMGQWTTVLCRPGGGVSSCLTDPIRIQRGIFQGDSLSPLWFCLALNPLSTLLKDSGLGIRLRRGGEIISHLLYMDDLKLFAPKKPDLLRMLKITENFSTSIGMEFGVDKCAVMHVERGRVVNSDGLQLSEMMTLRSLSEVETYKYLGMPESLGISDGDIKQSVRERFFGRLKKVLKSVLSGGNKVRAFNGWVMPLLIYTFGILKWTQTELDALDVKVRKLLTTYRMYHPRSSVMRLYIPRKCGGRGFLNAKNLHNREVCYLREYFLSRESGLHRDVVTVDNGFTPLSMANRNWRKPQVLTTQSRIDVWKSKELHGRFYRVLHGPDVDLLASVAWLRFGDLFGETEGFACAIMDEVIKTNNYRKYILKDGTVDICRACHHPGESLRHIVSGCSHLANGEYLHRHNQVARIIHQQLALKYGLVGSEVPYYKYAPAPVLENGHVTLYWDRSIITDRTIVANRPDIVIIDRETSRAILVDVTIPHDENLVKAEKEKLSKYLDLAHEVTAMWRVGSTIIVPIVVSVNGLIAKSLDRHLERLSLGSWVKSQIQKAVLLDTARIVRRFLSLEP

SEQ ID NO: 26964 - protein, 1193 aa, Laothoe populi
MTTRNRVRCARLPSPSSSSSSASWASASEAPEPLPVTDASSQRDGLQSSPPTLTPARRRGRQHPPSVGLGPVGPCAPPMAPAAGGVVRRMRWTHSINENVMRAYFGATEGGTKLTAYRPKMLALFQDLEPKIDVSAQRLSDQVRYIQRRKLLDDAALDRLRANLCVVQDVVQRTVDTPSVPTDDVNIELVDDLDNNVSSHDIQCLRGALESAILEFKLVPACLRPRLPRLPTHKRNLALMGALDSMLPEYMESSRDLVDTHAILYCAAIAACRVANVRFPNDYRAARDATHVPAWQRRIEERIDRTRTLISKLICFKAGNNRPKVMRFVTQAFLGSSIRPQDYRFCVTERIDLLKQKVYAWANRIRRYKKRWNRFQQNRAFQSDQKRVYRCWEHSQQGVGDGRLPDVRDMRTYWANIWSSPVSHTEGAWIGVVERACEAISPMETISISPDDVLRAVRPTQNWKSPGPDGLHNFWLKWFVTSHSRLAAQFQSALESGSLPTFMTTGVTHLLFKSGSTTDPKNYRPITCLPTIYKLFTSIIRFKIAYHIDNNNILFSAQTGCKIGSRGTKELLLIDMAICQQVRHNRRNLSAAWIDYKKAYDSVPHTWLMRVLDLYKIHSNLRTLLGACMRQWTTVLKYPGGASPLDCDEPIKIDRGIFQGDSLSPLWFCLALNPLSTLLLDSGLGYRLRRGSVPISHLLYMDDLKLFAPKKSDLIELLKITKSFSNSISMEFGVDKCAVIHVGRGAVRVSDDVYLSETERLRSLSESETYKYLGMSEALGIMGADMKQSLKERFFCRLTKVLNSFLSGGNKIRAFNGWVMPVLMYSFGILKWTQTELDALDRRVRTLMTAHRMHHPRSSVMRLYIPRRCGGRGLLNAKDLHNREVRNLRDYILHSDVDVHREVVKVDKGFTPLSLANENWRVPVVMSTGDRKGVWKSKELHGRFYRALNGPDVDQLASVSWLRFGDLFGETEGFVFAIMDEVVKTNNYRKYILKDGTVDICRACHRPGESIRHVISGCSYLANGEYLHRHNLVAKIIHQQLALRYHLVISEVPYYQYVPQPVLENGHTTLYWDRSIITDRTIVANKPDIVVIDRLARRVILVDVTIPHDDNLVKAEKDKMSKYLDLAHEVVDMWNVDSAIIVPIVVTANGLIPKSLDQHLQRLSIGRWVKSQIQKAVLLDTARIVRRFLTLGS

SEQ ID NO: 26965 - protein, 1195 aa, Deilephila porcellus
MIKRARSKHARPTSPSSSSSASWASASDVFEVTPDIDASSQRDELQSSPPPPRPARRRGRPPPVVGLGPVGPSVPPTVPATGGVVRRMRWTHQINENVMRAYFGATRGGTHLTAYRAKMLSLFQALEPTVEVSSQRLSDQVRFIQRRKLLDDEALERLRTDLRVVQDNNVQPVNGDQAADPTPIPIAVTEVTDNSDDNVSPQDEQRLRGALERAISEFMPLSTSCRPRLPRLPTHRRNLALMGAMDSMLPIYLESSRDLVDTHSILYCAAVAACRVANVNFPNEGRATRGVAAVPAWQRRIEERINRARTLIGKLISFKEGNSRPKIMRFVAQAFSGTNTSPRNYRLCVTERIDFYKQKVYAWANRIRRYRRRWDRFQQNRMFQSDQKRVYRCWENSPQSVVDGRLPSAHEMREYWTNIWSSPVSHTEAPWFSVVDRACKVIPAMEAILISPEDVLTAIRPTQNWKSPGPDGLHNFWLKWFPSSHARLATQFQDALEGGSLPTFMTTGVTHLLFKSGSTTEPKNYRPITCLPTIYKVLSTIIRSKIQCHITTNQILYSGQTGCKSGSRGTKELLLIDMAICQQARQNRRNLSAAWIDYKKAYDSVPHTWLMRVLNLYKVDTKLSTFLGACMGQWTTVLKYPGATNPSVNDEPIKIKRGIFQGDSLSPLWFCMALNPLSTLLLDSGLGYRLRRGSEPISHLLYMDDLKLFTSKQSELIELLKIAERFSNSINMEFGVDKCAVIHVKRGVVAVSGDIRVSETVRLRSLSPTETYKYLGMPEALGIMGADVKQSIRERFFSRLTKVLNSFLSGGNKIRAFNGWVMPVLMYSFGILRWTQTELDALDRKVRTLMTAHRMHHPRSSVMRLYIPRRCGGRGILNAKDLHNREVCNLRDYFLHSDVDMHGVVAMVDKGLTPLSLANENWRKPLVVSIRDRLDIWKSKELHGRFYRALHGPDVDRLASVSWLRFGNLFGETEGFVFAIMDEVIKTNNYRKYILKDGTVDICRACHRPGESIRHVISGCSYLANGEYLHRHNLVAKIIHQQIALRYGLVTPEVPYYQYVPQPVLENGHATLYWDRSVITDRTIVANKPDIVIIDRLARRAILVDVTIPHDDNLVKAEKDKMSKYLDLAHEVTDMWNVDSTIIVPIVVSAHGLIPKSLDQHLQRLSIGCWAKSQIQKAVLLDTARIVRRFLTLGS

SEQ ID NO: 26966 - protein, 1197 aa, Hyles vespertilio
MFHNKARKKRNAHLTSPSSSSSASWASASDVFEVTPDNDASSQHGELQSSPPPPRPAQRRGRPPPAVGLGPVGPSVPPTVPATGGVVRRMRWTREINENVMRAYFGATNGGINLTAYRVKMLSLFQALEPTVDVSSQRLSDQVRFIQRRKLLDDDTLERLRTDLCFVQEDHVSPVSGDQAAGPTPTPVADFELTDNLDDNVSPQDKQQLRGALECAILEFASLSASCRPRLPRLPTHRRNLALMGALDSMLPTYLESSRDLVDTHSILYCAAVAACRVANVQFPKEYRATRGVVTVPAWQRRIEDRINRARTLIGKLISFKEGNSRPKIMRFVTQAFSGTNTSPRNYRLCVTERIDFFKQKVYAWANRIRRYRRRWDRFQQNRKFQTDQKRVYRCWENPPQGVVDGRLPSAHEMREYWTNIWSSPVSHTEASWFSVVDRACEAIPAMETILINPEDVLTAIRQTQNWKSPGPDGLHNFWLKWFPSSHARLAVQFQDALERGSLPAFMTTGVTHLLFKSGCTTEPKNYRPITCLPTIYKVLTSIIRSKITDHINSNQILFSGQTGCMNGSRGTKELLLINMTICQQARHNRRNLSAAWIDYKKAYDSVPHTWLMRVLNLYKINTNLSNFLGSCMGQWTTVLRYPGGTVPPDCDEPIRIKRGIFQGDSLSPLWFCMALNPLSTLLLDSGLGYRLRRGSEPISHLLYMDDLKLFASKQTELIELLKITDIFSKSINMDFGVDKCAVIHVKRGEVAVSDDILVSETVRLRSLSVTETYKYLGMPEALGIMGADVKRSLKERFFSRLTKVLNSFLSGGNKIRAFNGWVMPVLMYSFGILKWTQTELDALDRKVRTLLTAHRMHHPRSSVMRLYIPRRCGGRGILNAKDLHNREVCNLRDYFLHSDVDMHRVVVMVDKGFTPLYLAIENWRKPLVVGIKDREDIWKSKELHGRFYRALHGPDVDRLASVSWLRFGNLFGETEGFVFAIMDEVIKTNNYRKYILKDGTVDICRACHRPGESIRHVISSCSYLANGEYLHRHNLVAKIIHQQIALRYGLVTPEVPYYQYVPQPVLENGHATLYWDRSIITDRTIPANKPDIVIIDRLARRAILVDVTIPHDDNLVKAEKDKMSKYLDLAHEVADMWDVDSTIIIPIVVSAHGLIPKSLDQHLQRLSIGCWVRSQIQKAVLLDTARIVRRFLTLGS

SEQ ID NO: 26967 - protein, 954 aa, Hyles vespertilio
MGALDSMLPTYLESSRDLVDTHSILYCAAVAACRVANVQFPKEYRATRGVVTVPAWQRRIEDRINRARTLIGKLISFKEGNSRPKIMRFVTQAFSGTNTSPRNYRLCVTERIDFFKQKVYAWANRIRRYRRRWDRFQQNRKFQTDQKRVYRCWENPPQGVVDGRLPSAHEMREYWTNIWSSPVSHTEASWFSVVDRACEAIPAMETILINPEDVLTAIRQTQNWKSPGPDGLHNFWLKWFPSSHARLAVQFQDALERGSLPAFMTTGVTHLLFKSGCTTEPKNYRPITCLPTIYKVLTSIIRSKITDHINSNQILFSGQTGCMNGSRGTKELLLINMTICQQARHNRRNLSAAWIDYKKAYDSVPHTWLMRVLNLYKINTNLCNFLGSCMGQWTTVLRYPGGTVPPDCDEPIRIKRGIFQGDSLSPLWFCMALNPLSTLLLDSGLGYRLRRGSEPISHLLYMDDLKLFASKQTELIELLKITERFSNSINMDFGVDKCAVIHVKRGEVAVSDDILVSETVRLRSLSVTETYKYLGMPEALGIMGADVKRSLKERFFSRLTKVLNSFLSGGNKIRAFNGWVMPVLIYSFGILKWTQTELDALDRKVRTLLTAHRMHHPRSSVMRLYIPRRCGGRGILNAKDLHNREVCNLRDYFLHSDVDMHRVVVMVDKGFTPLSLAIENWRKPLVVGIKDREDIWKSKELHGRFYRALHGPDVDRLASVSWLRFGNLFGETEGFVFAIMDEVIKTNNYRKYILKDGTVDICRACHRPGESIRHVISGCSYLANGEYLHRHNLVTKIIHQQIALRYGLVTPEVPYYQYVPQPVLENGHATLYWDRSIITDRTILANKPDIVIIDRLARRAILVDVTIPHDDNLVKAEKDKMSKYLALAHEVTDMWDVDSTIIVPIVVSAHGLIPKSLDQHLQRLSIGVWVRSQIQKAVLLDTARIVRRFLTLGS

SEQ ID NO: 26968 - protein, 1194 aa, Hyles vespertilio
MTTRASRRNAQMRSPSSSSSASWASASDVFEVTPDIDVSSQRDELQSSPPPPRPARRRGRPPPAVGLGPTGPSVPPTVLATGGVVRRMRWTHQMNENVMRAYFRATKGGTNLTAYRAQMLSMFQVLEPTVNVSSQRLSDQVRFIQRRKLLDDEALERLRTEACVALDVITPITQRAAETPSIPAADIELVDNLDNTVSPQDQQRLRRTLESAILEYKSIPASCRPRVPRLPTHRRNLALMGALDSIVSTYMESSRDLVDTHSILYCAAVAACRVANVKFPINNVTTTRDVATVPAWQRRIEDRINRARTLIGKLIAFRNGNNRQRVMRFVAQAFSGTNISPRDYGLWVTERIDYYKQKVYAWANRIRRYRKRWDRFQQNRTFQSDQKRVYRCWERSPQCVVDGRLPSVHDMRTYWTNIWSSSISHTEADWFGVVERACESIPIMEAISISPEDVLVAIRPTQNWKSPGPDGLHNFWLKWLPCSHARLAAQFQDALDGGSLPTFMTTGVTHLLYKSGSTTDPKNYRPITCLPTTYKLFTSILRAKIANHFTSNNILFPGQTGCKSGSRGTKELLLIDMTICQQARQNRRNLSAAWIDYKKAFDSVPHTWLMRVLSLYKIDTNLCTFLGSCMGQWTTVLRYPGGMVSPDCDEPIRIKRGIFQGDSLSPLWFCMALNPLSTLLVDSGLGYRLRRGTEPISHLLYMDDLKLFASKQTELIELLKITEKFSNSINMEFCVDKCAIIHVKRGEVAVSDGVQISDAVRLRALSETETYKYLGIPEALGILSADVKQSVKERFFGRLAKVLNSLLSGGNKIRAFNGWVMPVLMYSFGILRWTQTELDALDRKVRTLLTAHRMHHPRSSVMRLYIPRRCGGRGILNAKDLHNREVCNLRDYFLHSDVDMHRVVVKIDKGLTPLSLANENWRKPLVMSTKDREEVWKSKELHGRFYRALHGPDVDRPASVSWLRFGNLFGETEGFVFAIMDEVIKTNNYRKYILKDGTVDICRACHRPGESIRHVISGCSYLANGEYLHRHNLVAKIIHQQIALRYGLVTLEMPYYQYVPQPVLENGHATLYWDRSIITDRTIVANKPDIVIIDRLVRRAILVDVTIPHDVNLVKAEKDKLSKYLDLAHEVTDMWDVDSTVIVPIVVSAHGLMPKSFDQHLQRLSIGRWVKSQIQKAVLLDTARIVRRFLTLDP

SEQ ID NO: 26969 - protein, 1194 aa, Hyles vespertilio
MTTRASRRNAQMRSPSSSSSASWASASDVFEVTPDIDVSSQRDELQSSPPPPRPARRRGRPPPAVGLGPTGPSVPPTVLATGGVVRRMRWTHQMNENVMRAYFRATKGGTNLTAYRAQMLSMFQVLEPTVNVSSQRLSDQVRFIQRRKLLDDEALERLRTEACVALDVITPITQRAAETPSIPAADIELVDNLDNTVSPQDQQRLRRTLESAILEYKSIPASCRPRVPRLPTHRRNLALMGALDSIVSTYMESSRDLVDTHSILYCAAVAACRVANVKFPINNVTTTRDVATVPAWQRRIEDRINRARTLIGKLIAFRNGNNRQRVMRFVAQAFSGTNISPRDYGLWVTERIDYYKQKVYAWANRIRRYRKRWDRFQQNRTFQSDQKRVYRCWERSPQCVVDGRLPSVHDMRTYWTNIWSSSISHTEADWFGVVERACESIPIMEAISISPEDVLVAIRPTQNWKSPGPDGLHNFWLKWLPCSHARLAAQFQDALDGGSLPTFMTTGVTHLLYKSGSTTDPKNYRPITCLPTTYKLFTSILRAKIANHFTSNNILFPGQTGCKSGSRGTKELLLIDMTICQQARQNRRNLSAAWIDYKKAFDSVPHTWLMRVLSLYKIDTNLCTFLGSCMGQWTTVLRYPGGMVSPDCDEPIRIKRGIFQGDSLSPLWFCMALNPLSTLLVDSGLGYRLRRGTEPISHLLYMDDLKLFASKQTELIELLKITEKFSNSINMEFCVDKCAIIHVKRGEVAVSDGVQISDAVRLRALSETETYKYLGIPEALGILSADVKQSVKERFFGRLAKVLNSLLSGGNKIRAFNGWIMPVLMYSFGILRWTQTELDALDRKVRTLLTAHRMHHPRSSVMRLYIPRRCGGRGILNAKDLHNREVCNLRDYFLHSDVDMHRVVVKIDKGLTPLSLANENWRKPLVMSTKDREEVWKSKELHGRFYRALHGPDVDRPASVSWLRFGNLFGETEGFVFAIMDEVIKTNNYRKYILKDGTVDICRACHRPGESIRHVISGCSYLANGEYLHRHNLVAKIIHQQIALRYGLVTLEMPYYQYVPQPVLENGHATLYWDRSIITDRTIVANKPDIVIIDRLARRAILVDVTIPHDVNLVKAEKDKLSKYLDLAHEVTDMWDVDSTVIVPIVVSAHGLMPKSFDQHLQRLSIGRWVKSQIQKAVLLDTARIVRRFLTLDP

SEQ ID NO: 26970 - protein, 1216 aa, Hyles vespertilio
MVQKHNNNNNNNNNNNYYYYHTMTTRASRRNAQMRSPSSSSSASWASASDVFEVTPDIDVSSQRDELQSSPPPPRPARRRGRPPPAVGLGPTGPSVPPTVLATGGVVRRMRWTHQMNENVMRAYFRATKGGTNLTAYRAQMLSMFQVLEPTVNVSSQRLSDQVRFIQRRKLLDDEALERLRTEACVALDVITPITQRAAETPSIPAADIELVDNLDNTVSPQDQQRLRRTLESAILEYKSIPASCRPRVPRLPTHRRNLALMGALDSIVSTYMESSRDLVDTHSILYCAAVAACRVANVKFPINNVTTTRDVATVPAWQRRIEDRINRARTLIGKLIAFRNGNNRQRVMRFVAQAFSGTNISPRDYGLWVTERIDYYKQKVYAWANRIRRYRKRWDRFQQNRTFQSDQKRVYRCWERSPQCVVDGRLPSVHDMRTYWTNIWSSSISHTEADWFGVVERACESIPIMEAISISPEDVLVAIRPTQNWKSPGPDGLHNFWLKWLPCSHARLAAQFQDALDGGSLPTFMTTGVTHLLYKSGSATDPKNYRPITCLPTTYKLFTSILRAKIANHFTSNNILFPGQTGCKSGSRGTKELLLIDMTICQQARQNRRNLSAAWIDYKKAFDSVPHTWLMRVLSLYKIDTNLCTFLGSCMGQWTTVLRYPGGMVSPDCDEPIRIKRGIFQGDSLSPLWFCIALNPLSTLLVDSGLGYRLRRGTEPISHLLYMDDLKLFASKQTELIELLKITEKFSNSINMEFCVDKCAIIHVKRGEVAVSDGVQISDAVRLRALSETETYKYLGMPEALGILSADVKQSVKERFFGRLAKVLNSLLSGGNKIRAFNGWVMPVLMYSFGILRWTQTELDALDRKVRTLLTAHRMHHPRSSVMRLYIPRRCGGRGILNAKDLHNREVCNLRDYFLHSDVDMHRVVVKIDKGLTPLSLANENWRKPLVMSTKDREEVWKSKELHGRFYRALHGPDVDRPASVSWLRFGNLFGETEGFVFAIMDEVIKTNNYRKYILKDGTVDICRACHRPGESIRHVISGCSYLANGEYLHRHNLVAKIIHQQIALRYGLVTLEMPYYQYVPQPVLENGHATLYWDRSIITDRTIVANKPDIVIIDRLARRAILVDVTIPHDVNLVKAEKDKLSKYLDLAHEVTDMWDVDSTVIVPIVVSAHGLMPKSFDQHLQRLSIGRWVKSQIQKAVLLDTARIVRRFLTLDP

SEQ ID NO: 26971 - protein, 1045 aa, Eilema sororculum
MLNETVLETLRQECLRNICVTPAPAPAPTSTAEINNDTCVAPDDTPIPVSIQYNEEIKEALECALREYRSVPVHVRPRLPRLPIHRRNIALVSALDSLLPRYLENSENLGDTHSILYCTAVAACRMAGAKFPIKDPAIRPKSAIPAWQCRIERRVAEARVLIGKLICFRSGNTHPRVMRYVTRAFAGTDISPQDYTSRVTERIDFLKQKVYAWANRIRRYKRRVDRYTVNHMFQRDQRWVYRSWERTDESVDDVRRPDAEATNAFWRSIWSVPVSHTEGDWMREVERACETIPEMEEIYIDATDVDCAVRSLSNWKSPGPDGLHNFWLKWLRSSHVVLASQFQSAIESGTLPAFMTTGVTHLLHKTGSTLEPNNCRPITCLPTVYKLLTSILRAKINNHINNNSIMCASQNGCRNGARGTKELLLIDMAISQQARRNRKDLTACWIDYKKAFDSVPHTFLLRVLKLYKVNTTLCTFLRSCMGQWRTVLFYPGCRQALGGGVPITIERGIFQGDSLSPLWFCLALNPLSTLLVNSGLGYRLRREGQTVSHLFYMDDLKLFAHTNPQLIALLKVTETFSNSIKMAFGVDKCAVIHVKRGRVVESEGIQLSDSTNLRSLLVTETYKYLGMSQALCINEVDMKQMLQERFFGRLKKVLNSLLSGGNKVRACNSWVMPLLMYSFGILRWTQTELDTIDRKVRTQLTAFRMHHPRSSVMRLYIPRKCGGRGFLNAKTLHNREVCNLRDYFLKSNVDMHRDVVNVDTGLTPLGLAKENWRRPTIVGTDNRREVWQSKELHGRFYRALHRPEVDLLASVSWLRFSDLFGETEGFVCAIADEVIKTNNYRKYIMRDGTIDICRACHQPGESLRHITSGCSRLANGEYLHRHNQVARIIHQRLALKYNLVEFEVPYYRYVPEPVLENTHITLYWDRSIITDRTVVANKPDIVVIDRSERRALIVDVTIPHDENLVKAEKDKQVKYLDLAHEVVDMWNVDSAIIVPIVVSVNGLIAKSLDQHLKRLGLDGWVKGQMQKAVLLDTARIVRKFLSLEP

SEQ ID NO: 26972 - protein, 1193 aa, Laothoe populi
MTTRNRVRCARLPSPSSSSSSASWASASEAPEPLPVTDASSQRDGLQSSPPTLTPARRRGRQHPPPVGLGPVGPCAPSMAPAAGGVVRRMRWTHSINENVMRAYFGATEGGTKLTAYRPKMLALFQDLEPTIDVSAQRLSDQVRYIQRRKLLDDAALDRLRANLCVVQDVVQRTVDRPSVPTDDVNIELVDDLDNYVSSHDIQCLRGALESAILEFKLVPACLRPRLPRLPTHKRNLALMGALDSMLPEYMESSRDLVDTHAILYCAAIAACRLANVRFPNDYRAARDATHVPAWQRRIEERIDRTRTLISKLICFKAGNNRPKVMRFVTQAFLGSSIRPQDYRFCVTERIDLLKQKVYAWANRIRRYKKRWNRFQQNRAFQSDQKRVYRCWEHSQQGVGDGRLPDVRDMRTYWANIWSSPVSHTEGAWIGVVERACEAISPMETISISPDDVLRAVRPTQNWKSPGPDGLHNFWLKWFVTSHSRLAAQFQSALESGSLPTFMTTGVTHLLFKSGSTTDPKNYRPITCLPTIYKLFTSIIRFKIAYHIDNNNILFSAQTGCKIGSRGTKELLLIDMAICQQVRHNRRNLSAAWIDYKKAYDSVPHTWLMRVLDLYKIHSNLRTLLGACMRQWTTVLKYPGGAGPLDCDEPIKIDRGIFQGDSLSPLWFCLALNPLSTLLLDSGLGYRLRRGSVPISHLLYMDDLKLFAPKKSDLIELLKITKSFSNSISMEFGVDKCAVIHVGRGAVRVSDDVYLSETERLRSLSESETYKYLGMSEALGIMGADMKQSLKERFFCRLTKVLNSFLSGGNKIRAFNGWVMPVLMYSFGILKWTQTELDTLDRRVRTLMTAHRMHHPRSSVMRLYIPRRCGGRGLLNAKDLHNREVRNLRDYFLHSDVDVHREVVKVDKGFTPLSLANENGRVPVVMSTGDCKGVWKSKELHGRFYRALNGPDVDQLASVSWLRFGDLFGETEGFVFAIMDEVVKTNNYRKYILKDGTVDICRACHRPGESIRHVISGCSYLANGEYLHRHNLVAKIIHQQLALRYHLVISEVPYYQYVPQPVLENGHTTLYWDRSIITDRTIVANKPDIVVIDRLARRAILVDVTIPHDDNLVKAEKDKMSKYLDLAHEVVDMWNVDSAIIVPIVVTANGLIPKSLDQHLQRLSIGRWVKSQIQKAVLLDTARIVRRFLTLGS

SEQ ID NO: 26973 - protein, 1082 aa, Deilephila porcellus
MYRAKMLSLFQALEPTVEVSSQRLSDQVRFIQRRKLLDDEALERLRTDLRVVQDNNVQPVNGDQAADPTPIPIAVIEVTDNLDDNVSPQDEQRLRGALERAISEFMPLSTSCRPRLPRLPTHRRNLALMGAMDSMLPIYLESSRDLVDTHSILYCAAVAACRVANVNFPNERRATRGVAAVPAWQRRIEERVNRARTLIGKLISFKEGNSRPKIMRFVAQAFSGTNTSPRNYRLCVTERIDFYKQKVYAWANRIRRYRRRWDRFQQNRMFQSDQKRVYRCWENSPQSVVDGRLPSAHEMREYWTNIWSSPVSHTEAPWFSVVDRACKVIPAMEAILISPEDVLTAIRPTQNWKSPGPDGLHNFWLKWFPSSHARLATQFQDALEGGSLPTFMTTGVTHLLFKSGSTTEPKNYRPITCLPTIYKVLSSIIRSKIQCHITTNQILYSGQTGCKSGSRGTKELLLIDMAICQQARQNRRNLSAAWIDYKKAYDSVPHTWLMRVLNLYKVDTKLSTFLGACMGQWTTVLKYPGATNPSVNDEPIKIKRGIFQGDSLSPLWFCMALNPLSTLLLDSGLGYRLRRGSEPISHLLYMDDLKLFTSKQSELIELLKIAERFSNSINMEFGVDKCAVIHVKRGVVAVSDDIRVSETVRLRSLSPTETYKYLGMPEALGIMGADVKQSIRERFFSRLTKVLNSFLSGGNKIRAFNGWVMPVLMYSFGILRWTQTELDALDRKVRTLMTAHRMHHPRSSVMRLYIPRRCGGRGILNAKDLHNREVCNLRDYFLHSDVDMHGIVAMVDKGLTPLSLANENWRKPLVISIRDRLDIWKSKELHGRFYRALHGPDVDRLASVSWLRFGNLFGETEGFVFAIMDEVIKTNNYRKYILKDGTVDICRACHRPGESIRHVISGCSYLANGEYLHRHNLVAKIIHQQIALRYGLVTPEVPYYQYVPQPVLENGHATLYWDRSVITDRTIVANKPDIVIIDRLARRAILVDVTIPHDDNLVKAEKDKMSKYLDLAHEVTDMWNVDSTIIVPIVVSAHGLIPKSLDQHLQRLSIGCWAKSQIQKAVLLDTARIVRKFLTLGS

SEQ ID NO: 26974 - protein, 954 aa, Hemaris fuciformis
MGTLDSILQSYLESSRDLIDTHSMLYCAAVAACRVANVKFLNQVRTTPKVVTVPAWQRRIEHRIDWARTLISKLICFKEGNNRPKIMRFVTQAFSGTNIQPGDYRLCVTERIDFFKQKLYAWANRIRRYKKRSDRFRINRAFQSDQKRVYRCWEHSQQSVEDGRLPSASNMHTYWKSIWSSSVSHTEGPWISVVNQACKDISTMETILISPNDVSVAIRSTQNWKSPGADGLQNFWLKWFPSVHALLAAQFQEALNIGSLPTFMTTGITHLLYKSGTTTDPKNYRPITCLPTIYKLLTSIIRNKISIHIKNNSILFSGQTGCKLGSRGTKELLLIDMTICQQARQNRKNLSVAWIDYKKAYDSVPHTWLRRVFNLYKIDTTLCNFLEACMGQWTTVLKYPGTTCSSDCLEPIRIERGIFQGDSLSPLWFCLALNPLSTLLLDSGLGYCLRRGTEPISHLLYMDDLKLFASKSTELIELLKITQHFSNSINMEFGVDKCAVMHVKRGEIVVSDDIQVSETVRLRSLSEAETYKYLGMSESLGILSSDVKLSLKERFFSRLRKVLNSLLSGGNKIRAFNGWVMPVLMYSFGVLKWTQTELDALDRKIRTLLTAHRMHHPRSSVMRLYIPRRCGGRGLLNAKDLHNREICNLRDYFLHSDESMHGVLVMTDKGFTPLSLANENWRRPMVLGVSERREIWKSKELHGRFFRALNGPDVDQLASVTWLRFGNLFGETEGFVFAIMDEVIKTNNYRKYIMKDGTVDICRACHRPGESIRHVISGCSYLANGEYLHRHNLVAKIIHQQLALRYHLVTDEVPYYQYVPHPVLENSHATLYWDRSVITDRTIVANKPDIVIVDRLARRAMLVDVTIPHDDNLVKAEKDKISKYLDLAHEVTDMWDVDSTVIVPIVVTANGLIPKSLDQHLRRLSIDCWVKTQIQKAVLLDTARIVRRFLTLEP

SEQ ID NO: 26975 - protein, 1197 aa, Hyles vespertilio
MFHNKARKKRNAHLTSPSSSSSASWASASDVFEVTPDNDASSQHGELQSSPPPPRPAQRRGRPPPAVGLGPVGPSVPPTVPATGGVVRRMRWTREINENVMRAYFGATNGGINLTAYRVKMLSLFQALEPTVDVSSQRLSDQVRFIQRRKLLDDDTLERLRTDLCFVQEDHVSPVSGDQAAGPTPTPVADFELTDNLDDNVSPQDKQQLRGALECAILEFASLSASCRPRLPRLPTHRRNLALMGALDSMLPTYLESSRDLVDTHSILYCAAVAACRVANVQFPKEYRATRGVVTVPAWQRRIEDRINRARTLIGKLISFKEGNSRPKIMRFVTQAFSGTNTSPRNYRLCVTERIDFFKQKVYAWANRIRRYRRRWDRFQQNRKFQTDQKRVYRCWENPPQGVVDGRLPSAHEMREYWTNIWSSPVSHTEASWFSVVDRACEAIPAMETILINPEDVLTAIRQTQNWKSPGPDGLHNFWLKWFPSSHARLAVQFQDALERGSLPAFMTTGVTHLLFKSGCTTEPKNYRPITCLPTIYKVLTSIIRSKITDHINSNQIFFSGQTGCMNGSRGTKELLLINMTICQQARHNRRNLSAAWIDYKKAYDSVPHTWLMRVLNLYKINTNLCNFLGSCMGQWTTVLRYPGGTVPPDCDEPIRIMRGIFQGDSLSPLWFCMALNPLSTLLLDSGLGYRLRRGSEPISHLLYMDDLKLFASKQTELIELLKITERFSNSINMDFGVDKCAVIHVKRGEVAVSDDILVSETVRLRSLSVTETYKYLGMPEALGIMGADVKRSLKERFFSRLTKVLNSFLSGGNKIRAFNGWVMPVLIYSFGILKWTQTELDALDRKVRTLLTAHRMHHPRSSVMRLYIPRRCGGRGILNAKDLHNREVCNLRDYFLHSDVDMHRVVVMVDKGFTPLSLAIENWRKPLVVGIKDREDIWKSKELHGRFYRALHGPDVDRLASVSWLRFGNLFGETEGFVFAIMDEVIKTNNYRKYILKDGTVDICRACHRPGESIRHVISGCSYLANGEYLHRHNLVTKIIHQQIALRYGLVTPEVPYYQYVPQPVLENGHATLYWDRSIITDRTILANKPDIVIIDRLARRAILVDVTIPHDDNLVKAEKDKMSKYLDLAHEVTDMWDVDSTIIVPIVVSAHGLIPKSLDQHLQRLSIGVWVRSQIQKAVLLDTARIVRRFLTLGS

SEQ ID NO: 26976 - protein, 1194 aa, Hyles vespertilio
MTTRASRRNAQMRSPSSSSSASWASASDVFEVTPDIDVSSQRDELQSSPPPPRPARRRGRPPPAVGLGPTGPSVPPTVLATGGVVRRMRWTHQMNENVMRAYFRATKGGTNLTAYRAQMLSMFQVLEPTVNVSSQRLSDQVRFIQRRKLLDDEALERLRTEACVALDVITPITQRAAETPSIPAADIELVDNLDNTVSPQDQQRLRRTLESAILEYKSIPASCRPRVPRLPTHRRNLALMGALDSIVSTYMESSRDLVDTHSILYCAAVAACRVANVKFPINNVTTTRDVATVPAWQRRIEDRINRARTLIGKLIAFRNGNNRQRVMRFVAQAFSGTNISPRDYGLWVTERIDYYKQKVYAWANRIRRYRKRWDRFQQNRTFQSDQKRVYRCWERSPQCVVDGRLPSVHDMRTYWTNIWSSSISHTEADWFGVVERACESIPIMEAISISPEDVLVAIRPTQNWKSPGPDGLHNFWLKWLPCSHARLAAQFQDALDGGSLPTFMTTGVTHLLYKSGSATDPKNYRPITCLPTTYKLFTSILRAKIANHFTSNNILFPGQTGCKSGSRGTKELLLIDMTICQQARQNRRNLSAAWIDYKKAFDSVPHTWLMRVLSLYKIDTNLCTFLGSCMGQWTTVLRYPGGMVSPDCDEPIRIKRGIFQGDSLSPLWFCMALNPLSTLLVDSGLGYRLRRGTEPISHLLYMDDLKLFASKQTELIELLKITEKFSNSINMEFCVDKCAIIHVKRGEVAVSDGVQISDAVRLRALSETETYKYLGMPEALGILSADVKQSVKERFFGRLAKVLNSLLSGGNKIRAFNGWVMPVLMYSFGILRWTQTELDALDRKVRTLLTAHRMHHPRSSVMRLYIPRRCGGRGILNAKDLHNREVCNLRDYFLHSDVDMHRVVVKIDKGLTPLSLANENWRKPLVMSTKDREEVWKSKELHGRFYRALHGPDVDRPASVSWLRFGNLFGETEGFVFAIMDEVIKTNNYRKYILKDGTVDICRACHRPGESIRHVISGCSYLANGEYLHRHNLVAKIIHQQIALRYGLVTLEMPYYQYVPQPVLENGHATLYWDRSIITDRTIVANKPDIVIIDRLARRAILVDVTIPHDVNLVKAEKDKLSKYLDLAHEVTDMWDVDSTVIVPIVVSAHGLMPKSFDQHLQKLSIGRWVKSQIQKAVLLDTARIVRRFLTLDP

SEQ ID NO: 26977 - protein, 1194 aa, Hyles vespertilio
MTTRASRRNAQMRSPSSSSSASWASASDVFEVTPDIDVSSQRDELQSSPPPPRPARRRGRPPPAVGLGPTGPSVPPTVLATGGVVRRMRWTHQMNENVMRAYFRATKGGTNLTAYRAQMLSMFQVLEPTVNVSSQRLSDQVRFIQRRKLLDDEALERLRTEACVALDVITPITQRAAETPSIPAADIELVDNLDNTVSPQDQQRLRRTLESAILEYKSIPASCRPRVPRLPTHRRNLALMGALDSIVSTYMESSRDLVDTHSILYCAAVAACRVANVKFPINNVTTTRDVATVPAWQRRIEDRINRARTLIGKLIAFRNGNNRQRVMRFVAQAFSGTNISPRDYGLWVTERIDYYKQKVYAWANRIRRYRKRWDRFQQNRTFQSDQKRVYRCWERSPQCVVDGRLPSVHDMRTYWTNIWSSSISHTEADWFGVVERACESIPIMEAISISPEDVLVAIRPTQNWKSPGPDGLHNFWLKWLPCSHARLAAQFQDALDGGSLPTFMTTGVTHLLYKSGSATDPKNYRPITCLPTTYKLFTSILRAKIANHFTSNNILFPGQTGCKSGSRGTKELLLIDMTICQQARQNRRNLSAAWIDYKKAFDSVPHTWLMRVLSLYKIDTNLCTFLGSCMGQWTTVLRYPGGMVSPDCDEPIRIKRGIFQGDSLSPLWFCMARNPLSTLLVDSGLGYRLRRGTEPISHLLYMDDLKLFTSKQTELIELLKITEKFSNSINMEFCVDKCAIIHVKRGEVAVSDGVQISDAVRLRALSETETYKYLGIPEALGILSADVKQSVKERFFGRLAKVLNSLLSGGNKIRAFNGWVMPVLMYSFGILRWTQTELDALDRKVRTLLTAHRMHHPRSSVMRLFIPRRCGGRGILNAKDLHNREVCNLRDYFLHSDVDMHRVVVKIDKGLTPLSLANENWRKPLVMSTKDREEVWKSKELHGRFYRALHGPDVDRPASVSWLRFGNLFGETEGFVFAIMDEVIKTNNYRKYILKDGTVDICRACHRPGESIRHVISGCSYLANGEYLHRHNLVAKIIHQQIALRYGLVTLEMPYYQYVPQPVLENGHATLYWDRSIITDRTIVANKPDIVIIDRLARRTIFVDVTIPHDVNLVKAEKDKLSKYLDLAHEVTDMWDVDSTVIVPIVVSAHGLMPKSFDQHLQRLSIGRWVKSQIQKAVLLDTARIVRRFLTLDP

SEQ ID NO: 26978 - protein, 1127 aa, Hyles vespertilio
MFHNKARKKRNAHLTSPSSSSSASWASASDVFEVTPDNDASSQHGELQSSPPPPRPAQRRGRPPPAVGLGPVGPSVPPTVPATGGVVRRMRWTREINENVMRAYFGATNGGINLTAYRVKMLSLFQALEPTVDVSSQRLSDQVRFIQRRKLLDDDTLERLRTDLCFVQEDHVSPVSGDQAAGPTPTPVADFELTDNLDDNVSPQDKQQLRGALECAILEFASLSASCRPRLPRLPTHRRNLALMGALDSMLPTYLESSRDLVDTHSILYCAAVAACRVANVQFPKEYRATRGVVTVPAWQRRIEDRINRARTLIGKLISFKEGNSRPKIMRFVTQAFSGTNTSPRNYRLCVTERIDFFKQKVYAWANRIRRYRRRWDRFQQNRKFQTDQKRVYRCWENPPQGVVDGRLPSAHEMREYWTNIWSSPVSHTEASWFSVVDRACEAIPAMETILINPEDVLTAIRQTQNWKSPGPDGLHNFWLKWFPSSHARLAVQFQDALERGSLPAFMTTGVTHLLFKSGCTTEPKNYRPITCLPTIYKVLTSIIRSKITDHINSNQILFYGQTGCMNGSRGTKELLLINMTICQQARHNRRNLSAAWIDYKKAYDSVPHTWLMRVLNLYKINTNLCNFLGSCMGQWTTVLRYPGGTVPPDCDEPIRIKRGIFQGDSLSPLWFCMALNPLSTPLLDSGLGYRLRRGSEPISHLLYMDDLKLFASKQTELIELLKITERFSNSINMDFGVDKCAVIHVKRGEVAVSDDILVSETVRLRSLSVTETYKYLGMPEALGIMGADVKRSLKERFFSRLTKVLNSFLSGGNKIRAFNGWVMPVLIYSFGILKWTQTELDALDRKVRTLLTAHRMHHPRSSVMRLYIPRRCGGRGILNAKDLHNREVCNLRDYFLHSDVDMHRVVVMVDKGFTPLSLAIENWRKPLVVGIKDREDIWKSKELHGRFYRALHGPDVDRLASVSWLRFGNLFGETEGFVFAIMDEVIKTNNYRKYILKDGTVDICRACHRPGESIRHVISGCSYLANGEYLHRHNLVTKIIHQQIALRYGLVTPEVPYYQYVPQPVLENGHATLYWDRSIITDRTILANKPDIVIIDRLARRAILVDVTIPHDDNLVKAEKTKCLNI

SEQ ID NO: 26979 - protein, 1082 aa, Hyles vespertilio
MFHNKARKKRNAHLTSPSSSSSASWASASDVFEVTPVNDASSQNGELQSSPPPPRPAQRRGRPPPAVGLGPVGPSVPPTVPATGGVVRRMRWTREINENVMRAYFGATNGGINLTAYRVKMLSLFQALEPTVDVSSQRLSDQVRFIQRRKLLDDDTLERLRTDLCFIQDDHVSPVSGDQAAGPTPTPVADFELTDNLDDNVSPQDKQQLRGALECAILEFASLSASCRPRLPRLPTHRRNLALMGALDSMLPTYLESSRDLVDTHSILYCAAVAACRVANVQFPKEYRATRGVVTVPAWQRRIEDRINRARTLIGKLISFKEGNSRPKIMRFVTQAFSGTNTSPRNYRLCVTERIDFFKQKVYAWANRIRRYRRRWDRFQQNRKFQTDQKRVYRCWENPPQGVVDGRLPSAHEMREYWTNIWSSPVSHTEASWFSVVDRACEAIPAMETILISPEDVLTAIRQTQNWKSPGPDGLHNFWLKWFPSSHARLAAQFQNALERGSLPTFMTTGVTHLLFKSGCTTEPKNYRPITCLPTIYKVLTSIIRSKITDHINSNQILFSGQTGCMNGSRGTKELLLINMTICQQARHNRRNLSAAWIDYKKAYDSVPHTWLMRVLNLYKINTNLCNFLGSCMGQWTNVLRYPGGTVPPDCDEPIRIKRGIFQGDSLSPLWFCMALNPLSTLLLDSGLGYRLRRGSEPISHLLYMDDLKLFASKQTELIELLKITDRFSKSINMDFGVDKCAVIHVKRGEVAVSDDILVSETQRLRSLSVTETYKYLGMPEALGIMGADVKRSLKERFFSRLTKVLNSFLSGGNKIRAFNGWVMPVLMYSFGILKWTQTELDALDRKVRTLLTAHRMHHPRSSVMRLYIPRRCGGRGILNAKDLHNREVYNLRDYFLHSDVDMHRVVVMVDKGFTPLSLAIENWRKPLVVRIKDREDIWKSKELHGRFYRALHGPDVDRVASVSLLRFGNLFGETEGFVFAIMDEVIKTNNYRKYILKDGTVDICRACHRPGESIRHVISGCSYLANGEYLHRHNLVAKIIHQQIALRYGLVTPEVPYYLQRCIGIDLLSQTGLFQPISLTL

SEQ ID NO: 26980 - protein, 1111 aa, Dendrolimus kikuchii
MRWTQELNECVMRAYYEATEGETNLTSYRGRLLSLFQTLQPASTVTAQRLSDQVRAIQRLHLLDESTLDRLRNAVRINREATDTPQPTSPAPPADSQRPVNFTMDDVSDGLAVGDVSIQINEQLRRTLEHSIQEFRDQPILNRPRVPKLPMHRNNLLLMGTLDCLLAPYFRSSTDLADTHSILYCGAVAVCRVAGVKFPNTQPTRPASGKPAWQIRIERRIDRARVLIAKLICFRAGNCRPRVMRFVAQAFAGTNISPSEHMARATERIDFWKQKVYAWANRIRRYKERADRYFLNRTFQSEEKRVYRGWEKSSDSVADRQIPNTDAMASFWRSIWSVPVSHTEGDWIEVIKQSCEQVPDMEPITIEPLDVGNAIRSAHNWKSPGPDGLHNFWIKWFKSSHGCLANQFQEAVDRGSLPTFMTTGVTHLLFKSGCTTEPKNYRPITCLPTIYKLLTSILEKKLSNYFYNNNILAITQNGCKAGSRGTKELLLIDTTVSQQARRNRRNLSVAWIDYKKAYDSVPHTWLMRVLELYKVDATLRTFLQACMRQWVTYLRVPGGGGVPLPEGEINIERGIFQGDSLSPLWFCLALNPLSTLLESSKLGYRFRRGGEIVSHLLYMDDLKLFASNEPDLIELLKTTEHFSKSINMEFGIEKCAVMHVRRGKVVNSPNLQLSENMSLKSLSETETYKYLGMSESLGIADADVKQTVKDRFFCRLRKVLTSLLSGGNKVRAFNSWVMPVLAYSFGILRWTQTELDALDRRVRCLLTKHRMHHPRSSVMRLYISRRCGGRGFLNAKDLHNREVNNLRAYFLKMNVGLHKDVVAVDKGLTTLALAKENWCNLAVLSTSDRINVWKSKELHGRFYRALTGPDVDLSASVNWLRFGNLFGETEGFVFAIMDEVIKTNNYRKYILKDGTLDICRACHRPGESLRHIVSGCSHLSNGEYLHRHNLVARIIHQQLALRYGLVETEVPYYQYSPEPVLENSRATLYWDRSVITDRTIVANKPDIVIIDRSARRAILVDISIPHDDNLVKKEKEKLSKYLDLAHEVTAMWRLESTSIVPIVVTVNGLIAKSLDRHLERLSLGSWVKGQIQKAALLDTARIVRRFLSLEP

SEQ ID NO: 26981 - protein, 920 aa, Eilema sororculum
MAGAKFPIKDPAIRPKPAIPAWQCRIERRVAEARVLIGKLICFRSGNTRPRVMRYVTRAFAGTNISPQDYTSRVTERIDFLKQKVCAWANRIRRYKKRVDRYTVNRMFQRDQRWVYRGWERTDESVDDVRRPDAEATNAFWRSIWSVPVSHTEGDWMREVERACETIPAMEEIYIDATDVDCAVRSLSNWKSPGPDGLHNFWLKWLRSSHVVLASQFQSAVESGTLPTFMTTGVTHLLHKTGSTLEPNNYRPITCLPTVYKLLTSILRAKINNHINNNSIMCASQNGCRNGARGTKELLLIDMTISQQARRNRKDLAACWIDYKKAFDSVPHTWLLRVLELYKVNTTLCTFLRSCMGQWRMVLFYPGCRQALGSDEPITIERGIFQGDSLSPLWFCLALNPLSTLLVNSGLGYRLRREGQMVSHLFYMDDLKLFAHTNPQLIALLKVTETFSNSIKMAFGVDKCAVIHVKRGRVVESEGIQLSDSTNLRSLLVTETYKYLGMSQALCINEADMKQMLQDRFFGRLKKVLNSLLSGGNKVRACNSWVMPLLMYSFGILKWTQTELDTIDRKVRAQLTAFRMHHPRSSVMRLYIPRKCGGRGFLNAKTLHNREVCNLRDYFLKSNVDMHRDVVNVDTGLTPLGLAKENWRRPTIVSTDSRREVWQSKELHGRFYRALHRPEVDLLASVSWLRFSDLFGETEGFVCAIADEVIKTNNYRKYIMRDGTIDICRACHQPGESLRHITSGCSRLANGEYLHRHNQVARIIHQRLALKYNLVDVEVPYYRYVPEPVLENSHITLYWDRSIITDRTVIANKPDIVVIDRSERRALIVDVTIPHDENLVKAEKDKQVKYLDLAHEVVDMWNVDSAIIVPIVVSVNGLIAKSLEQHLKRLGLDGWVKGQMQKAVLLDTARIVRKFLSLEP

SEQ ID NO: 26982 - protein, 1115 aa, Laothoe populi
MAPAAGGVVRRMRWTHSINENVMRAYFGATEGGTKLTAYRPKMLALFQDLEPTIDVSAQRLSDQVRYIQRRKLLDDAALDRLRANLCVVQDVVQRTVDTPSVPTDDVNIELVDDLDNNVSSHDIQCLRGALESAILEFKLVPACLRPRLPRLPTHKRNLALMGALDSMLPEYMESSRDLVDTHAILYCAAIAACRVANVRFPNDYRAARDATHVPAWQRRIEERIDRTRTLISKLICFKAGNNRPKVMRFVTQAFLGSSIRPQDYRFYVTERIDLLKQKVYAWANRIRRYKKRWNRFQQNRAFQSDQKRVYRCWEHSQQGVGDGRLPDVRDMRTYWANIWSSPVSHTEGAWIGIVERACEAISPMETISISPDDVLRAVRPTQNWKSPGPDGLHNFWLKWFVTSHSRLAAQFQSALESGSLPTFMTTGVTHLLFKSGSTTDPKNYRPITCLPTIYKLFTSIIRFKIAYHIDNNNILFSAQTGCKIGSRGTKELLLIDMAICQQVRHNRRNLSAAWIDYKKAYDSVPHTWLMRVLDLYKIHSNLRTLLGACMRQWTTVLKYPGGAGPLDWDEPIKIDRGIFQGDSLSPLWFCLALNPLSTLLLDSGLGYRLRRGSVPISHLLYMDDLKLFAPKKSDLIELLKITKSFSNSISMEFGVDKCAVIHVGRGAVRVSDDVYLSETERLRSLSESETYKYLGMSEALGIMGADMKQSLKERFFCRLTKVLNSFLSGGNKIRAFNGWVMPVLMYSFGILKWTQTELDALDRRVRTLMTAHRMHHPRSSVMRLYIPRRCGGRGLLNAKDLHNREVRNLRDYFLHSDVDVHREVVKVDKGFTPLSLANENWRVPVVMSTGDRRGVWKSKELHGRFYRALNGPDVDQLASVSWLRFGDLFGETEGFVFAIMDEVVKTNNYRKYILKDGTVDICRACHRPGESIRHVISGCSYLANGEYLHRHNLVAKIIHQQLALRYHLVISEVPYYQYVPQPVLENGHTTLYWDRSIITDRTIVANKPDIVVIDRLARRAILVDVTIPHDDNLVKAEKDKMSKYLDLAHEVVDMWNVDSAIIVPIVVTANGLIPKSLDQHLQRLSIGRWVKSQIQKAVLLDTARIVRRFLTLGS

SEQ ID NO: 26983 - protein, 976 aa, Deilephila porcellus
MPLSASCRPRLPRLPTHRRNLALMGALDSMLPIYLESSRDLVDTHSILYCAAVAACRVANVNFPNERRATRGVAAVPAWQRRIEERINRARTLIGKLISFKEGNSRPKIMRFVAQAFSGTNTSPRNFRLCVTERIDFYKQKVYAWANRIRRYRRRWDRFQQNRMFQSDQKRVYRCWENSPQSVVDGRLPSAHEMREYWTNIWSSPVSHTEAPWFSVVDRACKVVPAMEAILISPEDVLTAIRPTQNWKSPGPDGLHNFWLKWFPSSHARLATQFQDALEGGSLPTFMTTGVTHLLFKSGSTTEPKNYRPITCLPTIYKVLSSIIRSKIQCHITTNQILYSGQTGCKSGSRGTKELLLIDMAICQQARQNRRNLSAAWIDYKKAYDSVPHTWLMRVLNLYKVDTKLSAFLGACMGQWTTVLKYPGATNPSVNDEPIKIKRGIFQGDSLSPLWFCMALNPLSTLLLDSGLGYRLRRGSEPISHLLYMDDLKLFTSKQSELIELLKIAERFSKSINMEFGVDKCAVIHVKRGVVAVSDDIRVSETVRLRSLSPTETYKYLGMPEALGIKGADVKQSIKERFFSRLTKVLNNFLSGGNKIRAFNGWVMPVLMYSFGILRWTQTELDALDRKVRTLLTAHRMHHPRSSVMRLYIPRRCGGRGMLNAKDLHNREVCNLRDYFLHSDVDMHGVVVMVDKGFTPLSLANQNWRKPLVMGIKDREEIWKGKELHGRFYRALHGPDVDRLASVSWLRFGNLFGETEGFVFAIMDEVIKTNNYRKYIVKDGTVDICRACHRPGESIRHVISGCSYLANGEYLHRHNLVAKIIQQIALRYGLVTPEVPYYQYVPQPVLENGHATLYWDRSVITDRTIVANKPDIVIIDRLARRAILVDVTIPHDDNLVKAEKDKLSKYLDLAHEVTELWDVDSTIIVPIVVSAHGLIPKSLDQHFQRLSMGRWVMSQIQKAVLLDTARIVRRFLTLGS

SEQ ID NO: 26984 - protein, 1196 aa, Deilephila porcellus
MIRKTTRQRNARKTSPSSSSSASWASASDVFEVTPDIDASSQRDELQSSPPPPRPARRRGRPPPVVGLGPVGPSVPPTVPATGGVVRRMRWTHQINENVMRAYFGATRGGTHLTAYRAKMLSLFQALEPTVEVSSQRLSDQVRFIQRRKLLDDQALERLRTDLRVVQDNNVQPVNGDQAADPTPIPIAVIEVTDNLDDNVSPQDEQRLRGALERAISEFMPLSTSCRPRLPRLPTHRRNLALMGAMDSMFPIYLESSRDLVDTHSILYCAAVAACRVANVNFPNERRATRGVAAVPAWQRRIEERINRARTLIGKLISFKEGNSRPKIMRFVAQAFSGTNTSPRNYRLCVTERIDFYKQKVYAWANRIRRYRRRWDRFQQNRMFQSDQKRVYRCWENSPQSVVDGRLPSAHEMREYWTNIWSSPVSHTEAPWFSVVDRACKVIPAMEAILISPEDVLTAIRPTQNWKSPGPDGLHNFWLKWFPSSHARLATQFQDALEGGSLPTFMTTGVTHLLFKSGSTTEPKNYRPITCLPTIYKVLSSIIRSKIQCHITTNQILYSGQTGCKSGSRGTKELLLIDMAICQQARQNRRNLSAAWIDYKKAYDSVPHTWLMKVLNLYKVDTKLSTFLGACMGQWTTVLKYPGATNPSVNDEPIKIKRGIFQGDSLSPLWFCMALNPLSTLLLDSGLGYRLRRGSEPISHLLYMDDLKLFTSKQSELIELLKIAERFSNSINMEFGVDKCAVIHVKRGVVAVSDDIRVSETVRLRSLSPTETYKYLGMPEALGIMGADVKQSIRERFFSRLTKVLNSFLSGGNKIRAFNGWVMPVLTYSFGILRWTQTELDALDRKVRTLMTAHRMHHPRSSVMRLYIPRRCGGRGILNAKDLHNREVCNLRDYFLHSDVDMHGIVAMVDKGLTPLSLANENWRKPLVVSIRDRLDIWKSKELHGRFYRALHGPDVDRLASVSWLRFGNLFGETEGFVFAIMDEVIKTNNYRKYILKDGTVDICRACHRPGESIRHVISGCSYLANGEYLHRHNLVAKIIHQQIALRYGLVTPEVPYYQYVPQPVLENGHATLYWDRSVITDRTIVANKPDIVIIDRLARRAILVDVTIPHDDNLVKAEKDKMSKYLDLAHEVTDMWNVDSTIIVPIVVSAHGLIPKSLDQHLQRLSIGCWAKSQIQKAVLLDTARIVRKFLTLGS

SEQ ID NO: 26985 - protein, 1197 aa, Hyles vespertilio
MFHNKARKKRNAHLTSPSSSSSASWASASDVFEVTPDNDASSQHGELQSSPPPPRPAQRRGRPPPAVGLGPVGPSVPPTVPATGGVVRRMRWTREINENVMRAYFGATNGGINLTAYRVKMLSLFQALEPTVDVSSQRLSDQVRFIQRRKLLDDDTLERLRTDLCFVQEDHVSPVSGDQAAGPTPTPVADFELTDNLDDNVSPQDKQQLRGALECAILEFASLSASCRPRLPRLPTHRRNLALMGALDSMLPTYLESSRDLVDTHSILYCAAVAACRVANVQFPKEYRATRGVVTVPAWQRRIEDRINRARTLIGKLISFKEGNSRPKIMRFVTQAFSGTNTSPRNYRLCVTERIDFFKQKVYAWANRIRRYRRRWDRFQQNRKFQTDQKRVYRCWENPPQGVVDGRLPSAHEMREYWTNIWSSPVSHTEASWFSVVDRACEAIPAMETILINPEDVLTAIRQTQNWKSPGPDGLHNFWLKWFPSSHARLAVQFQDALERGSLPAFMTTGVTHLLFKSGCTTEPKNYRPITCLPTIYKVLTSIIRSKITDHINSNQILFSGQTGCMNGSRGTKELLLINMTICQQARHNRRNLSAAWIDYKKAYDSVPHTWLMRVLNLYKINTNLCNFLGSCMGQWTTVLRYPGGTVPPDCDEPIRIKRGIFQGDSLSPLWFCMALNPLSTLLLDSGLGYRLRRGSEPISHLLYMDDLKLFASKQTELIELLKITDIFSKSINMDFGVDKCAVIHVKRGEVAVSDDILVSETVRLRSLSVTETYKYLGMPEALGIMGADVKRSLKERFFSRLTKVLNSFLSGGNKIRAFNGWVMPVLMYSFGILKWTQTELDALDRKVRTLLTAHRMHHPRSSVMRLYIPRRCGGRGILNAKDLHNREVCNLRDYFLHSDVDMHRVVVMVDKGFTPLYLAIENWRKPLVVGIKDREDIWKSKELHGRFYRALHGPDVDRLASVSWLRFGNLFGETEGFVFAIMDEVIKTNNYRKYILKDGTVDICRACHRPGESIRHVISSCSYLANGEYLHRHNLVAKIIHQQIALRYGLVTPEVPYYQYVPQPVLENGHATLYWDRSIITDRTIPANKPDIVIIDRLARRAILVDVTIPHDDNLVKAEKDKMSKYLDLAHEVADMWDVDSTIIVPIVVSAHGLIPKSLDQHLQRLSIGCWVRSQIQKAVLLDTARIVRRFLTLGS

SEQ ID NO: 26986 - protein, 1177 aa, Hyles vespertilio
MYASWASASDVFEVTPDNDASSQHGELQSSPPPPRPAQRRGRPPPAVGLGPVGPSVPPTVPATGGVVRRMRWTREINENVMRAYFGATNGGINLTAYRVKMLSLFQALEPTVDVSSQRLSDQVRFIQRRKLLDDDTLERLRTDLCFVQEDHVSPVSGDQAAGPTPTPVADFELTDNLDDNVSPQDKQQLRGALECAILEFASLSASCRPRLPRLPTHRRNLALMGALDSMLPTYLESSRDLVDTHSILYCAAVAACRVANVQFPKEYRATRGVVTVPAWQRRIEDRINRARTLIGKLISFKEGNSRPKIMRFVTQAFSGTNTSPRNYRLCVTERIDFFKQKVYAWANRIRRYRRRWDRFQQNRKFQTDQKRVYRCWENPPQGVVDGRLPSAHEMREYWTNIWSSPVSHTEASWFSVVDRACEAIPAMETILINPEDVLTAIRQTQNWKSPGPDGLHNFWLKWFPSSHARLAVQFQDALERGSLPAFMTTGVTHLLFKSGCTTEPKNYRPITCLPTIYKVLTSIIRSKITDHINSNQILFSGQTGCMNGSRGTKELLLINMTICQQARHNRRNLSAAWIDYKKAYDSVPHTWLMRVLNLYKINTNLCNFLGSCMGQWTTVLRYPGGTVPPDCDEPIRIKRGIFQGDSLSPLWFCMALNPLSTLLLDSGLGYRLRRGSEPISHLLYMDDLKLFASKQTELIELLKITERFSNSINMDFGVDKCAVIHVKRGEVAVSDDILVSETVRLRSLSVTETYKYLGMPEALGIMGADVKRSLKERFFSRLTKVLNSFLSGGNKIRAFNGWVMPVLIYSFGILKWTQTELDALDRKVRTLLTAHRMHHPRSSVMRLYIPRRCGGRGILNAKDLHNREVCNLRDYFLHSDVDMHRVVVMVDKGFTPLSLAIENWRKPLVVGIKDREDIWKSKELHGRFYRALHGPDVDRLASVSWLRFGNLFGETEGFVFAIMDEVIKTNNYRKYILKDGTVDICRACHRPGESIRHVISGCSYLANGEYLHRHNLVTKIIHQQIALRYGLVTPEVPYYQYVPQPVLENGHATLYWDRSIITDRTILANKPDIVIIDRLARRAILVDVTIPHDDNLVKAEKDKMSKYLDLAHEVTDMWDVDSTIIVPIVVSAHGLIPKSLDQHLQRLSIGVWVRSQIQKAVLLDTARIVRRFLTLGS

SEQ ID NO: 26987 - protein, 954 aa, Hyles vespertilio
MGALDSMLPTYLESSRDLVDTHSILYCAAVAACRVANVQFPKEYRATRGVVTVPAWQRRIEDRINRARTLIGKLISFKEGNSRPKIMRFVTQAFSGTNTSPRNYRLCVTERIDFFKQKVYAWVNRIRRYRRRWDRFQQNRKFQTDQKRVYRCWENPPQGVVDGRLPSAHEMREYWTNIWSSPVSHTEASWFSVVDRACEAIPAMETILINPEDVLTAIRQTQNWKSPGPDGLHNFWLKWFPSSHARLAVQFQDALERGSLPAFMTTGVTHLLFKSGCTTEPKNYRPITCLPTIYKVLTSIIRSKITDHINSNQILFSGQTGCMNGSRGTKELLLINMTICQQARHNRRNLSAAWIDYKKAYDSVPHTWLMRVLNLYKINTNLCNFLGSCMGQWTTVLRYPGGTVPPDCDEPIRIKRGIFQGDSLSPLWFCMALNPLSTLLLDSGLGYRLRRGSEPISHLLYMDDLKLFASKQTELIELLKITDIFSKSINMDFGVDKCAVIHVKRGEVAVSDDILVSETVRLRSLSVTETYKYLGMPEALGIMGADVKRSLKERFFSRLTKVLNSFLSGGNKIRAFNGWIMPVLMYSFGILKWTQTELDALDRKVRTLLTAHRMHHPRSSVMRLYIPRRCGGRGILNAKDLHNREVCNLRDYFLHSDVDMHRVVVMVDKGFTPLYLAIENWRKPLVVGIKDREDIWKSKELHGRFYRALHGPDVDRLASVSWLRFGNLFGETEGFVFAIMDEVIKTNNYRKYILKDGTVDICRACHRPGESIRHVISSCSYLANGEYLHRHNLVAKIIHQQIALRYGLVTPEVPYYQYVPQPVLENGHATLYWDRSIITDRTIPANKPDIVIIDRLARRAILVDVTIPHDDNLVKAEKDKMSKYLDLAHEVADMWDVDSTIIVPIVVSAHGLIPKSLDQHLQRLSIGCWVRSQIQKAVLLDTARIVRRFLTLGS

SEQ ID NO: 26988 - protein, 1197 aa, Hyles vespertilio
MINNKARKKRNAHLTSPSSSSSASWASASDVFEVTSDNDASSQHGELQSSPPPPRPARRRGRPPPAVGLGPVGPSVPPTVPATGGVVRRMRWTREINENVMRAYFGATKGGINLTAYRAKMLSLFQALEPTVDVSSQRLSDQVRFIQRRKLLDDDTLERLRTDLCFVQDDHVSPVSGDQAAGPTPTPVADFELTDNLDDNVSPQAKQQLRGALECAILEFSSLSASCRPRLPRLPTHRRNLALMGALDSMLTTYLESSRDLVDTHSILYCAAVAACRVANIKFPNEYKATRGVVIVPAWQRRIEDRINRARTLIGKLISFKEGNSRPKIMRFVTQAFSGTNTSPRNYRLCVTERIDFFKQKVYAWANRIRRYRRRWDRFQQNRKFQTDQKSVYRCWENPPQGVVDGRLPSAHEMREYWTNIWSSPVSHTEASWFSVVDRACEAIPAMETILISPEDVLTAIRQTQNWKSPGPDGLHNFWLKWFPSSHARLAAQFQNALERGSLPTFMTTGVTHLLFKSGCTTEPKNYRPITCLPTIYKVLTSIIRSKITDHINSNQILFSGQTGCMNGSRGTKELLLINMTICQQARHNRRNLSAAWIDYKKAYDSVPHTWLMRVLNLYKINTNLCNFLGSCMGQWTTVLRYPGGTVPPDCDEPIRFKRGIFQGDSLSPLWFCMALNPLSTLLLDSGLGYRLRRGSEPISHLLYMDDLKLFASKQTELIELLKITERFSNSINMDFGVDKCAVIHVKRGEVAVSDDILVSETVRLRSLSVTETYKYLGMPEALVIMVADVKRSLKERFFSRLTKVLNSFLSGGNKIRAFNGWVMPVLIYSFGILKWTQTELDALDRKVRTLLTAHRMHHPRSSVMRLYIPRRCGGRGILNAKDLHNREVCNLRHYFLHSDVDMHRVVVMVDKGFTPLSLAIENWRKPLVVGIKDREDIWKSKELHGRFYRALHGPDVDRLASVSWLRFGNLFGETEGFVFAIMDEVIKTNNYRKYILKDGTVDICRTCHRPGESIRHVISGCSYLANGEYLHRHNLVAKIIHQQIALRYGLVTPEMPYYQYVPQPVLENGHATLYWDRSIITDRTILANKPDIVIIDRLARRAILVDVTISHDDNLVKAEKDKMSKYLDLAHEVTDMWDVDSTIIVPIVVSAHGLIPKSLDQHLQRLSIGCWVRSQIQKAVLLDTARIVRRFLTLGS

SEQ ID NO: 26989 - protein, 1197 aa, Hyles vespertilio
MIKRKARTTQNARIRSPSSSSSASWASASDVFEVTPDNDALSQRDELQSSPPPPRPARRRGRPPPAVGLGPVGPSVPPTVPATGGVVRRMRWTCEINENVMRAYFGATKGGINLTAYRAKMLSLFQALEPTIDVSSQRLSDQVRFIQRRKLLDDDTLERLRTDLCVVQDDNVSPVSGDQAVGPTPTPVADFELTDNLDDNVSPQDKQHLRGALVRAISDFVSVSASCRPRLLRLPTHRRNLALMGALDSMLPTYLESSRDLVDTHSILYCAAVAACRVANVQFPKEHRATRGVAAVPAWQLRIEDRVNRARTLIGKLISFSEGNSRPRIMRFVTQAFSGTNISPQNYRLCVTERIDFYKQKVYAWANRIRRYRRRWDRFQQNRMFQSDQKRVYRCWEDSSQGVVDGRLPGAHEMREYWTNIWSSPVSHTEASWFSVVDRACESIPAMETILISSEDVQTAIRRTQNWKSPGPDGLHNFWLKWFPSSHARLAAQFQDALEAGSLPAFMTKGVTHLLFKSGCTTEPKNYRPITCLPTIYKILTSIIRSKITDHITSNQILFPGQTGCMNGSRGTKELLLINMTICQQARHNRRNLSAAWIDYKKAYDSVPHTWLMRVLNLYKINTNLCNFLGSCMGQWTTVLRYPGGTAPPDCDEPIRIKRGIFQGDSLSPLWFCMALNPLSTLLLDSGLGYRLRRGSEPISHLLYMDDLKLFASKQTELVELLKITERFSNSINMEFGVDKCAVIHVKRGEVAVSDDIKVSETVRLRPLSVTETYKYLGMPEALGIMGANVKQSLKERFFSRLTKVLNSFLSGGNKIRAFNGWVMPVLMYSFGILKWTQTELDALDRKVRTLLTAHRMHHPRSSVMRLYIPRRCGGRGILNAKDLHNREVCNLRDYFLHSDVDMHGVVVMVDKGFTPLSLAIENWRKPLVVGTKDREDIWKSKELHGRFYRALHGPDVDRLASVSWLRFGNLFGETEGFVFAIMDEVIKTNNYRKYILKDGTVDICRACHRPGESIRHVISGCSYLANGEYLHRHNLVAKIIHQQIALRYGLVTPEVPYYQYVPQPVLENGHATLYWDRSIITDRTILANKPDIVIIDRLARRAILVDVTIPHDDNLVKAEKDKMSKYLDLAHEVTDMWDVDSTIIVPIVVSAHGLIPKSLDQHLQRLSIGVWVRSQIQKAVLLDTARIVRRFLTLGS

SEQ ID NO: 26990 - protein, 1195 aa, Deilephila porcellus
MIKRARSKHARPTSPSSSSSASWASASDVFEVTPDIDASSQRDELQSSPPPPRPARRRGRPPPVVGLGPVGPSVPPTVPATGGVVRRMRWTHQINENVMRAYFGATRGGTHLTAYRAKMLSLFQALEPTVEVSSQRLSDQVRFIQRRKLLDDEALERLRTDLRVVQDNNVQPVNGDQAADPTPIPIAVIEVTDNLDDNVSPQDEQRLRGALERAISEFMPLSTSCRPRLPRLPTHRRNLALMGAMDSMLPIYLESSRDLVDTHSILYCAAVAACRVANVNFPNERRATRGVAAVPAWQRRIEERINRARTLIGKLISFKEGNSRPKIMRFVAQAFSGTNTSPRNYRLCVTERIDFYKQKVYAWANRIRRYRRRWDRFQQNRMFQSDQKRVYRCWENSPQSVVDGRLPSAHEMREYWTNIWSSPVSHTEAPWFSVVDRACKVIPAMEAILISPEDVLTAIRPTQNWKSPGPDGLHNFWLKWFPSSHARLATQFQDALEGGSLPTFMTTGVTHLLFKSGSTTEPKNYRPITCLPTIYKVLSSIIRSKIQCHITTNQILYSGQTGCKSGSRGTKELLLIDMAICQQARQNRRNLSAAWIDYKKAYDSVPHTWLMRVLNLYKVDTKLSTFLGACMGQWTTVLKYPGATNPSVNDEPIKIKRGIFQGDSLSPLWFCMALNPLSTLLLDSGLGYRLRRGSEPISHLLYMDDLKLFTSKQSELIELLKIAERFSNSINMEFGVDKCAVIHVKRGVVAVSDDIRVSETVRLRSLSPTETYKYLGMPEALGIMGADVKQSIRERFFSRLTKVLNSFLSGGNKIRAFNGWVMPVLMYSFGILRWTQTELDALDRKVRTLMTAHRMHHPRSSVMRLYIPRRCGGRGILNAKDLHNREVCNLRDYFLHSDVDMHGIVAMVDKGLTPLSLANENWRKPLVVSIRDRLDIWKSKELHGRFYRALHGPDVDRLASVSWLRFGNLFGETEGFVFAIMDEVIKTNNYRKYILKDGTVDICRACHRPGESIRHVISGCSYLANGEYLHRHNLVAKIIHQQIALRYGLVTPEVPYYQYVPQPVLENGHATLYWDRSVITDRTIVANKPDIVIIDRLARRAILVDVTIPHDDNLVKAEKDKMSKYLDLAHEVTDMWNVDSTIIVPIVVSAHGLIPKSLDQHLQRLSIGCWAKSQIQKAVLLDTARIVRKFLTLGS

SEQ ID NO: 26991 - protein, 1197 aa, Hyles vespertilio
MFHNKTRKKRNAHLTSPSSSSSASWASASDVFEVTPDNDASSQHGELQSSPPPPRPAQRRGRPPPAVGLGPVGPSVPPTVPATGGVVRRMRWTREINENVMRAYFGATNGGINLTAYRVKMLSLFQALEPTVDVSSQRLSDQVRFIQRRKLLDDDTLERLRTDLCFVQEDHVSPVSGDQAAGPTPTPVADFELTDNLDDNVSPQDKQQLRGALECAILEFASLSASCRPRLPRLPTHRRNLALMGALDSMLPTYLESSRDLVDTHSILYCAAVAACRVANVQFPKEYRATRGVVTVPAWQRRIEDRINRARTLIGKLISFKEGNSRPKIMRFVTQAFSGTNTSPRNYRLCVTERIDFFKQKVYAWANRIRRYRRRWDRFQQNRKFQTDQKRVYRCWENPPQGVVDGRLPSAHEMREYWTNIWSSPVSHTEASWFSVVDRACEAIPAMETILINPEDVLTAIRQTQNWKSPGPDGLHNFWLKWFPSSHARLAVQFQDALERGSLPAFMTTGVTHLLFKSGCTTEPKNYRPITCLPTIYKVLTSIIRSKITDHINSNQILFSGQTGCMNGSRGTKELLLINMTICQQARHNRRNLSAAWIDYKKAYDSVPHTWLMRVLNLYKINTNLCNFLGSCMGQWTTVLRYPGGTVPPDCDEPIRIKRGIFQGDSLSPLWFCMALNPLSTLLLDSGLGYRLRRGSEPISHLLYMDDLKLFASKQTELIELLKITDIFSKSINMDFGVDKCAVIHVKRGEVAVSDDILVSETVRLRSLSVTETYKYLGMPEALGIMGADVKRSLKERFFSRLTKVLNSFLSGGNKIRAFNGWVMPVLMYSFGILKWTQTELDALDRKVRTLLTAHRMHHPRSSVMRLYIPRRCGGRGILNAKDLHNREVCNLRDYFLHSDVDMHRVVVMVDKGFTPLYLAIENWRKPLVVGIKDREDIWKSKELHGRFYRALHGPDVDRLASVSWLRFGNLFGETEGFVFAIMDEVIKTNNYRKYILKDGTVDICRACHRPGESIRHVISSCSYLANGEYLHRHNLVAKIIHQQIALRYGLVTPEVPYYQYVPQPVLENGHATLYWDRSIITDRTIPANKPDIVIIDRLARRAILVDVTIPHDDNLVKAEKDKMSKYLDLAHEVADMWDVDSTIIVPIVVSAHGLIPKSLDQHLQRLSIGCWVRSQIQKAVLLDTARIVRRFLTLGS

SEQ ID NO: 26992 - protein, 1194 aa, Hyles vespertilio
MTTRASRRNAQMRSPSSSSSASWASASDVFEVTPDIDVSSQRDELQSSPPPPRPARRRGRPPPAVGLGPTGPSVPPTVLATGGVVRRMRWTHQMNENVMRAYFRATKGGTNLTAYRAQMLSMFQVLEPTVNVSSQRLSDQVRFIQRRKLLDDEALERLRTEACVALDVITPITQRAAETPSIPAADIELVDNLDNTVSPQDQQRLRRTLESAILEYKSIPASCRPRVPRLPTHRRNLALMGALDSIVSTYMESSRDLVDTHSILYCAAVAACRVANVKFPINNVTTTRDVATVPAWQHRIEDRINRARTLIGKLIAFRNGNNRQRVMRFVAQAFSGTNISPRDYGLWVTEHIDYYKQKVYAWANRIRRYRKRWDRFQQNRTFQSDQKRVYRCWERSPQCVVDGRLPSVHDMRTYWTNIWSSSISHTEADWFGVVERACESIPIMEAISISPEDVLVAIRPTQNWKSPGPDGLHNFWLKWLPCSHARLAAQFQDALDGGSLPTFMTTGVTHLLYKSGSATDPKNYRPITCLPTTYKLFTSILRAKIANHFTSNNILFPGQTGCKSGSRGTKELLLIDMTICQQARQNRRNLSAAWIDYKKAFDSVPHTWLMRVLSLYKIDTNLCTFLGSCMGQWTTVLRYPGGMVSPDCDEPIRIKRGIFQGDSLSPLWFCMALNPLSTLLVDSGLGYRLRRGTEPISHLLYMDDLKLFASKQTELIELLKITEKFSNSINMEFYVDKCAIIHVKRGEVAVSDGVQISDAVRLRALSETETYKYLGMPEALGILSADVKQSVKERFFGRLAKVLHSLLSGGNKIRAFNGWVMPVLMYSFGILRWTQTELDALDRKVRTLLTAHRMHHPRSSVMRLYIPRRCGGRGILNAKDLHNREVCNLRDYFLHSDVDMHRVVVKIDKGLTPLSLANENWRKPLVMSTKDREEVWKSKELHGRFYRALHGPDVDRPAYVSWLRFGNLFGETEGFVFAIMDEVIKTNNYRKYILKDGTVDICRACHRPGESIRHVISGCSYLANGEYLHRHNLVAKIIHQQIALRYGLVTLEMPYYQYVPQPVLENGHATLYWDRSIITDRTIVANKPDIVIIDRLARRAILVDVTIPHDVNLVKAEKDKLSKYLDLAHEVTDMWDVDSTFIVPIVVSAHGLMPKSFDQHLQRLSIGRWVKSQIQKAVLLDTARIVRRFLTLDP

SEQ ID NO: 26993 - protein, 954 aa, Hyles vespertilio
MGALDSMLPTYLESSRDLVDTHSILYCAAVAACRVANVQFPKEYRATRGVVTVPAWQRRIEDRINRARTLIGKLISFKEGNSRPKIMRFVTQAFSGTNTSPRNYRLCVTERIDFFKQKVYAWANRIRRYRRRWDRFQQNRKFQTDQKRVYRCWENPPQGVVDGRLPSAHEMREYWTNIWSSPVSHTEASWFSVVDRACEAIPAMETILINPEDVLTAIRQTQNWKSPGPDGLHNFWLKWFPSSHARLAVQFQDALERGSLPAFMTTGVTHLLFKSGCTTEPKNYRPITCLPTIYKVLTSIIRSKITDHINSNQILFSGQTGCMNGSRGTKELLLINMTICQQARHNRRNLSAAWIDYKKAYDSVPHTWLMRVLNLYKINTNLCNFLGSCMGQWTTVLRYPGGTVPPDCDEPIRIKRGIFQGDSLSPLWFCMALNPLSTLLLDSGLGYRLRRGSEPISHLLYMDDLKLFASKQTELIELLKITDIFSKSINMDFGVDKCAVIHVKLGEVAVSDDILVSETVRLRSLSVTETYKYLGMPEALGIMGADVKRSLKERFFSRLTKVLNSFLSGGNKIRAFNGWVMPVLMYSFGILKWTQTELDALDRKVRTLLTAHRMHHPRSSVMRLYIPRRCGGRGILNAKDLHNREVSNLRDYFLHSDVDMHRVVVMVDKGFTPLYLAIENWRKPLVVGIKDREDIWKSKELHGRFYRALHGPDVDRLASVSWLRFGNLFGETEGFVFAIMDEVIKTNNYRKYILKDGTVDICRACHRPGESIRHVISSCSYLANGEYLHRHNLVAKIIHQQIALRYGLVTPEVPYYQYVPQPVLENGHATLYWDRSIITDRTIPANKPDIVIIDRLARRAILVDVTIPHDDNLVKAEKDKMSKYLDLAHEVADMWDVDSTIIVPIVVSAHGLIPKSLDQHLQRLSIGCWVRSQIQKAVLLDTARIVRRFLTLGS

SEQ ID NO: 26994 - protein, 1194 aa, Hyles vespertilio
MTTRASRRNAQMRSPSSSSSASWASASDVFEVTPDIDVSSQRDELQSSPPPPRPARRRGRPPPAVGLGPTGPSVPPTVLATGGVVRRMRWTHQMNENVMRAYFRATKGGTNLTAYRAQMLSMFQVLEPTVNVSSQRLSDQVRFIQRRKLLDDEALERLRTEACVALDVITPITQRAAETPSIPAADIELVDNLDNTVSPQDQQRLRRTLESAILEYKSIPASCRPRVPRLPTHRRNLALMGALDSIVSTYMESSRDLVDTHSILYCAAVAACRVANVKFPINNVTTTRDVATVPAWQRRIEDRINRARTLIGKLIAFRNGNNRQRVMRFVAQAFSGTNISPRDYGLWVTERIDYYKQKVYAWANRIRRYRKRWDRFQQNRTFQSDQKRVYRCWERSPQCVVDGRLPSVHDMRTYWTNIWSSSISHTEADWFGVVERACESIPIMEAISISPEDVLVAIRPTQNWKSPGPDGLHNFWLKWLPCSHARLAAQFQDALDGGSLPTFMTTGVTHLLYKSGSATDPKNYRPITCLPTTYKLFTSILRAKIANHFTSNNILFPGQTGCKSGSRGTKELLLIDMTICQQARQNRRNLSAAWIDYKKAFDSVPHTWLMRVLSLYKIDTNLCTFLGSCMGQWTTVLRYPGGMVSPDCDEPIRIKRGIFQGDSLSPLWFCMALNPLSTLLVDSGLGYRLRRGTEPISHLLYMDDLKLFASKQTELIELLKITEKFSNSINMEFCVDKCAIIHVKRGEVAVSDGVQISDAVRLRALSETETYKYLGMPEALGILSADVKQSVKERFFGRLAKVLNSLLSGGNKIRAFNGWVMPVLMYSFGILRWTQTELDALDRKVRTLLTAHRMHHPRSSVMRLYIPRRCGGRGILNAKDLHNREVCNLRDYFLHSDVDMHRVVVKIDKGLTPLSLANENWRKPLVMSTKDREEVWKSKELHGRFYRALHGPDVDRPASVSWLRFGNLFGETEGFVFAIMDEVIKTNNYRKYILKDGTVDICRACHRPGESIRHVISGCSYLANGEYLHRHNLVAKIIHQQIALRYGLVTLEMPYYQYVPQPVLENGHATLYWDRSIITDRTIVANKPDIVIIDRLARRAILVDVTIPHDVNLVKAEKDKLSKYLDLAHEVTDMWDVDSTVIVPIVVSAHGLMPKSFDQHLQRLSIGRWVKSQIQKAVLLDTARIVRRFLTLDP

SEQ ID NO: 26995 - protein, 954 aa, Hyles vespertilio
MGALDSMLPTYLESSRDLVDTHSILYCAAVAACRVANVQFPKEHRATRGVAAVPAWQLRIEDRINRARTLIGKLISFSEGNSRPRIMRFVTQAFSGTNISPQNYRLCVTERIDFYKQKVYAWANRIRRYRRRWDRFQQNRMFQSDQKRVYRCWEDSSQGVVDGRLPGAHEMREYWTNIWSSPVSHTEASWFSVVDRACESIPAMETILISSEDVQTAIRRTQNWKSPGPDGLHNFWLKWFPSSHARLAAQFQDALEAGSLPAFMTKGVTHLLFKSGCTTEPKNYRPITCLPTIYKILTSIIRSKITDHITSNQILFPGQTGCMNGSRGTKELLLINMTICQQARHNRRNLSAAWIDYKKAYDSVPHTWLMRVLNLYKINTNLCNFLGSCMGQWTTVLRYPGGTAPPDCDEPIRIKRGIFQGDSLSPLWFCMALNPLSTLLLDSGLGYRLRRGSEPISHLLYMDDLKLFASKQTELVELLKITERFSNSINMEFGVDKCAVIHVKRGEVAVSDDIQVSETVRLRPLSVTETYKYLGMPEALGIMGANVKQSLKERFFSRLTKVLNSFLSGGNKIRAFNGWVMPVLMYSFGILKWTQTELDALDRKVRTLLTAHRMHHPRSSVMRLYIPRRCGGRGILNAKDLHNREVCNLRDYFLHSDVDMHGVVVMVDKGFTPLSLAIENWRKPLVVGTKDREDIWKSKELHGRFYRALHGPDVDRLASVSWLRFGNLFGETEGFVFAIMDEVIKTNNYRKYILKDGTVDICRACHRPGESIRHVISGCSYLANGEYLHRHNLVAKIIHQQIALRYGLVTPEVPYYQYVPQPVLENGHATLYWDRSIITDRTILANKPDIVIIDRLARRAILVDVTIPHDDNLVKAEKDKMSKYLDLAHEVTDMWDVDSTIIVPIVVSAHGLIPKSLDQHLQRLSIGVWVRSQIQKAVLLDTARIVRRFLTLGS

SEQ ID NO: 26996 - protein, 1197 aa, Hyles vespertilio
MFHNKARKKRNAHLTSPSSSSSASWVSASDVFEVTPDNDASSQHGELQSSPPPPRPAQRRGRPPPAVGLGPVGPSVPPTVPATGGVVRRMRWTREINENVMRAYFGATNGGINLTAYRVKMLSLFQALEPTVDVSSQRLSDQVRFIQRRKLLDDDTLERLRTDLCFVQEDHVSPVSGDQAAGPTPTPVADFELTDNLDDNVSPQDKQQLRGALECAILEFASLSASCRPRLPRLPTHRRNLALMGALDSMLPTYLESSRDLVDTHSILYCAAVAACRVANVQFPKEYRATRGVVTVPAWQRRIEDRINRARTLIGKLISFKEGNSRPKIMRFVTQAFSGTNTSPRNYRLCVTERIDFFKQKVYAWANRIRRYRRRWDRFQQNRKFQTDQKRVYRCWENPPQGVVDGRLPSAHEMREYWTNIWSSPVSHTEASWFSVVDRACEAIPAMETVLINPEDVLTAIRQTQNWKSPGPDGLHNFWLKWFPSSHARLAVQFQDALERGSLPAFITTGVTHLLFKSGCTTEPKNYRPITCLPTIYKVVTSIIRSKITDHINSNQILFSGQTGFMNGSRGTKELLLINMTICQQARHNRRNLSAAWIDYKKAYDSVPHTWLMRVLNLYKINTNLCNFLGSCMGQWTTVLRYPGGTVPPDCDEPIRIKRGIFQGDSLSPLWFCMALNPLSTLLLDSGLGYRLRRGSEPISHLLYMDDLKLFASKQTELIELLKITDIFSKSINMDFGVDKCAVIHVKRGEVAVSDDILVSETVRLRSLSVTETYKYLGMPEALGIMGADVKRLLKERFFSRLTKVLNSFLSGGNKIRAFNGWVMPVLMYSFGILKWTQTELDALDRKVRTLLTAHRMHHPRSSVMRLYIPRRCGGRGILNAKDLHNREVCNLRDYFLHSDVDMHRVVVMVDKGFTPLYLAIENWRKPLVVGIKDREDIWKSKELHGRFYRALHGPDVDRLASVSWLRFGNLFGETEGFVFAIMDEVIKTNNYRKYILKDGTVDICRACHRPGESIRHVISSCSYLANGEYLHRHNLVAKIIHQQIALRYGLVTPEVPYYQYVPQPVLENGHATLYWDRSIITDRTIPANKPDIVIIDRLARRAILVDVTIPHDDNLVKAEKDKMSKYLDLAHEVADMWDVDSTIIVPIVVSAHGLIPKSLDQHLQRLSIGCWVRSQIQKAVLLDTARIVRRFLTLGS

SEQ ID NO: 26997 - protein, 1192 aa, Eilema sororculum
MLTRAQAKRHRNAPTTSPDSSLSSAAQPPAVEPAASSSSSSDEFFSPPTSPTPVRRPGRGRPPTCLGPRRPPASSGAPATGGDVHRMRWTTSINENVMRAYFAATEGGTNLSAYRTRMLPLFQALEPSINTSAQRLSDQVRVIQRNRMLNETVLETLRLECLRNICVTPAPVPVPASTVELNDDTCVAPDDTPIPVSIQYNEEIKEALECALREYRSMPVHVRPRLPRLPIHRRNIALVSALDSLLPRYLENSENLGDTHSILYCTAVAACRMAGAKFPIKDPAIRPKFTIPAWQCRIERRVAEARVLIGKLICFRSGNTRPRVMRYVTRAFVGTDISPQDYTSRVTERIDFLKQKVCAWANRIRRYKKRVDRYTVNRMFQRDQRWVYRSWERTDESVDDVRRPDAEATNAFWRSIWSVPVSHTEGDWMREVERACETIPEMEEIYIDATDVDCAVRSLSNWKSPGPDGLHNFWLKWLRSSHVVLASQFQSAIESGTPPAFMTTGVTHLLHKTGSTLEPNNYRPITCLPTVYKLLTSILRAKINNHINNNYIMCASQNGCRNGARGTKELLLIDMAISQQARRNRKDLTACWIDYKKAFDSVPHTWLLRVLELYKVNTTLCTFLRSCMRQWRTVLFYPGCRQALGGGVPITIERGIFQGDSLSPLWFCLALNPLSALLVNSGLGYRLRREGQMVSHLFYMDDLKLFAHTNPQLIALLKVTETFSNSIKMAFGVDKCAVIHVKRGRVVESEGIQLSDSTNLRSLLVTETYKYLGMSQALCINEVDMKQLLQERFFGRLKKVLNSLLSGGNKVRACNSWVMPLLMYSFGILKWTQTELDTIDRKVRTQLTAFRMHHPRSSVMRLYIPRKCGGRGFLNAKTLHNREVCNLRDYFLKSNVDMHCDVVNVDTGLTPLGLAKENWRRPTIVSTDSRREVWQSKELHGRFYRALHRPEVDLLASVSWLRFSDLFGETEGFVCAIADEVIKTNNYRKYIMRDGTIDICRACHQPGESLRHITSGCSRLANGEYLHRHNQVARIIHQRLALKYNLVEVEVPYYRYVPEPVLENSHITLYWDRSIITDRTVIANKPDIVVIDRPERRALIVDVTIPHDENLVKAEKDKQVKYLDLAHEVVDMWNVDSAIIVPIVVSVNGLIAKSLDQHLKRLGLDGWAKGQMQKAVLLDTARIVRKFLSLEP

SEQ ID NO: 26998 - protein, 1193 aa, Laothoe populi
MTTRNRVRCARLPSPSSSSSSASWASASEAPEPLPVTDASSQCDGLQSSPPTLTPARRRGRQHPPPVGLGPVRPCAPPMAPAAGGVVRRMRWTHSINENVMRAYFGATEGGTKLTAYRPKMLALFQDLEPTIDVSGQRLSDQVRYIQRRKLLDDAALDRLRANLCVVQDVVQRTVDTPSVPTDDVNIELVDDLDNNVSSHDIQCLRGALEGAILEFKLVPACLRPRLPRLPTHKRNLALMGALDSMLPEYMESSRDLVDTHAILYCAAIAACRVANVRFPNDYRAARDATHVPAWQRRIEERIDRTRTLISKLICFKAGNNRPKVMRFVTQAFLGSSIRPQDYRFCVTERIDLLKQKVYAWANRIRRYKKRWNRFQQNRGFQSDQKRVYRCWEHSQQGVGDGRLPDVRDMRTYWANIWSSPVSHTEGAWIGVVERACEAISPMETISISPDDVLRAVRPTQNWKSPGPDGLHNFWLKWFVTSHSRLAAQFQSALESGSLPTFMTTGVTHLLFKSGSTTDPKNYRPITCLPTIYKLFTSIIRFKIAYHIDNNNILFSAQTGCKIGSRGTKELLLIDMAICQQVRHNRRNLSAAWIDYKKAYDSVPHTWLMRVLDLYKIHSNLRTLLGACMRQWTTVLKYPGGAGPLDCDEPIKIDRGIFQGDSLSPLWFCLALNPLSTLLLNSGLGYRLRRGSVPISHLLYMDDLKLFAPKKSDLIELLKITKSFSNSISMEFGVDKCAVIHVGRGAVRVSDDVYLSETERLRSLSESETYKYLGMSEALGIMGADMKQSLKERFLCRLTKVLNSFLSGGNKIRAFNGWVMPVIMYSFGILKWTQTELDALDRRVRTLMTAHRMHHPRSSVMRLYIPRRCGGRGLLNAKDLHNREVRNLRDYFLHSDVDVHREVVKVDKGFTPLSLANENWRVPVVMSTGDRRGVWKSKELHGRFYRALNGPDVDQLASVSWLRFGDLFGETEGFVFAIMDEVVKTNNYRKYILKDGTVDICRACHRPGESIRHVISGCSYLANGEYLHRHNLVAKIIHQQLALRYHLVISEVPYYQYVPQPVLENGHTTLYWDRSVITDRTIVANKPDIVVIDRLARRAILVDVTIPHDDNLVKAEKDKMSKYLDLAHEVVDMWNVDSAIIVPIVVTANGLIPKSLDQHLQRLSIGRWVKSQIQKAVLLDTARIVRRFLTLGS

SEQ ID NO: 26999 - protein, 1196 aa, Deilephila porcellus
MIRKTTRQRNARKTSPSSSSSASWASASDVFEVTPDIDASSQRDELQSSPPPPRPARRRGRPPPVVGLGPVGPSVPPTVPATGGVVRRMRWTHQINENVMRAYFGATRGGTHLTAYRAKMLSLFQALEPTVEVSSQRLSDQVRFIQRRKLLDDQALERLRTDLRVVQDNNVQPVNGDQAADPTPIPIAVIEVTDNLDDNVSPQDEQRLRGTLERAISEFMPLSTSCRPRLPRLPTHRRNLALMGAMDSMLPIYLESSRDLVDTHSILYCAAVAACRVANVNFPNERRATRGVAAVPAWQRRIEERINRARTLIGKLISFKEGNSRPKIMRFVAQAFSGTNTSPRNYRLCVTERIDFYKQKVYAWANRIRRYRRRWDRFQQNRMFQSDQKRVYRCWENSPQSVVDGRLPSAHEMREYWTNIWSSPVSHTEAPWFSVVDRACKVIPAMEAILISPEDVLTAIRPTQNWKSPGPDGLHNFWLKWFPSSHARLATQFQDALEGGSLPTFMTTGVTHLLFKSGSTTEPKNYRPITCLPTIYKVLSSIIRSKIQCHITTNQILYSGQTGCKSGSRGTKELLLIDMAICQQARQNRRNLSAAWIDYKKAYDSVPHTWLMRVLNLYKVDTKLSTFLGACMGQWTTVLKYPGATNPSVNDEPIKIKRGIFQGDSLSPLWFCMALNPLSTLLLDSGLGYRLRRGSEPISHLLYMDDLKLFTSKQSELIELLKIAERFSNSINMEFGVDKCAVIHVKRGVVAVSDDIRVSETVRLRSLSPTETYKYLGMPEALGIMGADVKQSIRERFFSRLTKVLNSFLSGGNKIRAFNGWVMPVLTYSFGILRWTQTELDALDRKVRTLMTAHRMHHPRSSVMRLYIPRRCGGRGILNAKDLHNREVCNLRDYFLHSDVDMHGIVAMVDKGLTPLSLANENWRKPLVVSIRDRLDIWKSKELHGRFYRALHGPDVDRLASVSWLRFGNLFGETEGFVFAIMDEVIKTNNYRKYILKDGTVDICRACHRPGESIRHVISGCSYLANGEYLHRHNLVAKIIHQQIALRYGLVTPEVPYYQYVPQPVLENGHATLYWDRSVITDRTIVANKPDIVIIDRLARRAILVDVTIPHDDNLVKAEKDKMSKYLDLAHEVTDMWNVDSTIIVPIVVSAHGLIPKSLDQHLQRLSIGCWAKSQIQKAVLLDTARIVRKFLTLGS

SEQ ID NO: 27000 - protein, 1162 aa, Dendrolimus punctatus
MGTSSEDEEEPAPPAPPPRPVRGRGRPPSARLGPAGRIPRPAPATGGVVRRMRWTQELNECVMRAYYEATEGGTNLTSYRGRLLSLFQTLQPASAVTAQRLSDQVRAIQRLHLLDESTLDRLRNAVRINRESTDTPQPTSPATPADSQGTVNFTIDDVSDSIAVGNVSIQINEQLRRTLEHSIQEFRDQPILNRPRVPKLPLHRNNLLLMGALDCLLAPYFGSSADLVDTHSILYCGAVAVCRVAGVKFPNTQPTRPASGKPAWQIRIERRIDRARVLIAKLICFRAGNCRPRVVRFVAQAFTGTNVSPSEYMARATERIDFWKQKVYAWANRIRRYKERADRYFLNRTFQSEEKRVYRGWEKSRDSVADRQILNIDAMASFWRSIWSMPVSHTEGDWIELVKQSCDQVPDMEPITIEPLDVGNAIRSAHNWKSPGPDGLHNFWIKWFKSSHSCLANQFQEAVDRGSLPTFMTTGVTHLLFKSGCTTEPKNYRPITCLPTIYKLLTSILGKKLSNYFYNNNILAITQNGCKAGSRGTKELLLIDTTVSQQARRNRRNLSVAWIDYKKAYDSVPHTWLMRVLELYKVDATLRTFLQACMRQWVTHLKLPGGRGPSLPEGAINIERGIFQGDSLSPLWFCLALNPLSTLLESSKLGYRFRRGGEIMSHLLYMDDLKLFASNEPDLIELLKTTERFSKSINMEFGIEKCAVMHVRRGKVVNSPNLQLSENMSLKSLSETETYKYLGMSESLGIADADVKQTVKDRFFCRLRKVLTSLLSGGNKVRAFNSWVMPVLAYSFGILRWTQTELDALDRRVRCLLTKHRMHHPRSSVMRLYISRRCGGRGFLNAKDLHNREVNNLRAYFLKMDVGLHKDVVAVDKGLTTLSLANENWRNLAVLSASDRINVWKSKALHGRFYRALTGPDVDLSASVNWLRFGNLFGETEGFVFAIMDEVIKTNNYRKYILKDGTLDICRACHRPGESLRHIVSGCSHLSNGEYLHRHNLVARIIHQQLALRYGLVETEVPYYQYSPEPVLENSRATLYWDRSIITDRTIVANKPDIVIIDRSARRAILVDISIPHDDNLVKKEKEKLSKYLDLAHEVTAMWRLESTSIVPIVVTVNGLIAKSLDRHLERLSLGSWVKGQIQKAALLDTARIVRRFLSLEP

SEQ ID NO: 27001 - protein, 1008 aa, Hyles vespertilio
MRWTREINENVMRAYFGATKGGINLTAYRAKMLSLFQALEPTVDVSSQRLSDQVRFIQRRKLLDDDTLERLRTDLCFVQDDHVSPVSGDQAAGPTPTPVADFELTDNLDDNVSPQAKQQLRGDLECAILEFASLSASCRPRLPRLPTHRRNLALMGALDSMLTTYLESSRDLVDTHSILYCAAVAACRVANIKFPNEYKATRGVVIVPAWQRRIEDRINRARTLIGKLISFKEGNSRPKIMRFVTQAFSGTNTSPRNYRLCVTERIDFVKQKVYAWANRIRRYRRRWDRFQQNRKFQTDQKSVYGCWENPPQGVVDGRLPSAHEMREYRTNIWSSPVSHTEASWFSVVDRACEAIPAMETILISPEDVLTAIRQTQNWKSPGPDGLHNFWLKWFPSSHARLAAQFQNALERGSLPTFMTTGVTHLLFKSGCTTEPKNYRPITCLPTIYKVLTSIIRCKITDHINSNQILFSGQTGCMNGSRGTKELLLINMTICQQARHNRRHLSAAWIDYKKAYDSVPHTWLMRVLNLYKINTNLCNFLGSCMGQWTTVLRYPGGTVPPDCDEPIRIKRGIFQGDSLSPLWFCMALNPLSTLLLDSGLGYRLRRGSEPISHLLYMDDLKLFASKQTELIELLKITERFSNSINMDFGVDKCAVIHVKRGEVAVSDDILVSETVRLRSLSVTETYKYLGMPEALGIMGADVKRSLKERFFSRLTKVLNSFLSGGNKIRTFNGWVMPVLIYSFGILKWTQTELDALDRKVRTLLTAHRMHHPRSSVMRLYISRRCGGRGILNAKDLHNREVCNLRDYFLHSDVDMHRVVVMVDKGFTPLSLAIENWRKPLVVGIKDREDIWKSKELHGRFYRALHGPDVDRLSSVSWLRFGNLFGETEGFVFAIMDEVIKTNNYRKYILKDGTVDICRACHRPGESIRHVISGCSYLANGEYLHRHNLVAKIIHQQIALRYGLVTPEVPYYQYVPQPVLENGHATLYWDRSIITDRTILANKPDIVIID

SEQ ID NO: 27002 - protein, 1096 aa, Hyles vespertilio
MRAYFGATKGGINLTAYRAKTLSLFQALEPTVDVSSQRLSDQVRFIQRRKLLDDDTLERLRTDLCFVQDDHVSPVSGDQAAGPTPTPVADFELTDNLDDNVSPQAKQQLRGALECAILEFASLSASCRPRLPRLPTHRRNLALMGALDSMLTTYLESSRDLVDTHSILYCAAVAACRVANIKFPNEYKATRGVVIVPAWQRRIEDRINRARTLIGKLISFKEGNSRPKIMRFVTQAFSETNTSPRNYRLCVTERIDFFKQKVYAWANRIRRYRRRWDRFQQNRKFQTDQKSVYRCWENPPQGVVDGRLPSAHEMREYWTNIWSSPVSHTEASWFSVVDRACEAIPAMETILISPEDVLTAIRQTQNWKSPGPDGLHNFWLKWFPSSHARLAAQFQNALERGSLPTFMTTGVTHLLFKSGCTTEPKNYRPITCLPTIYKVLTSIIRSKITDHINSNQILFSGQTGCMNGSRGTKELLLINMTICQQARHNRRNLSAAWIDYKKAYDSVPHTWLMRVFLYKINTNLCNFLGSCMGQWTTVLRYPGGTVPPDCDEPIRIKRGIFQGDSLSPLWFCMALNPLSTLLLDSGLGYRLRRGSEPISHLLYMDDLKLFASKQTELIELLKITERFSNSINMDFGVDKCAVIHVKRGEVAISDDILVSETVRLRSLSVTETYKYLGMPEALGIMGADVKRSLKERFFSRLIKVLNSFLSGGNKIRAFNGWVMPVLIYSFGILKWTQTELDALDRKVRTLLTAHRMHHPRSSVMRLYIPRRCGGRGILNAKDLHNREVCNLRDYFLHSDVDMHRVVVMVDKGFTPLSLAIENWRKPLVVGIKDREDIWKSKELHGRFYRALHGPDVDRLASVSWLRFGNLFGETEGFVFAIMDEVIKTNNYRKYILKDGTVDICRACHRPGESIRHVISGCSYLANGEYLHRHNLVAKIIHQQIALRYGLVTPEVPYYQYVPQPVLENGHATLYWARSIITDRTILANKPDIVIIDRLARRAILVDVTIPHDDNLVKAEKDKMSKYLDLAHEVTDMWDVDSTIIVPIVVSAHGLIPKSLDQHLQRLSIGCWVRSQIQKAVLLDTARIVRRFLTLGS

SEQ ID NO: 27003 - protein, 1183 aa, Hyles vespertilio
MFHNKARKKRNAHLTSPSSSSSASWASASDVFEVTPDNDASSQHGELQSSPPPPRPAQRRGRPPPAVGLGPVGPSVPPTVPATGGVVRRMRWTREINENVMRAYFGATNGGINLTAYRVKMLSLFQALEPTVDVSSQRLSDQVRFIQRRKLLDDDTLERLRTDLCFVQEDHVSPVSGDQAAGPTPTPVADFELTDNLDDNVSPQDKQQLRGALECAILEFASLSASCRPRLPRLPTHRRNLALMGALDSMLPTYLESSRDLVDTHSILYCAAVAACRVANVQFPKEYRATRGVVTVPAWQRRIEDRINRARTLIGKLISFKEGNSRPKIMRFVTQAFSGTNTSPRNYRLCVTERIDFFKQKVYAWANRIRRYRRRWDRFQQNRKFQTDQKRVYRCWENPPQGVVDGRLPSAHEMREYWTNIWSSPVSHTEASWFSVVDRACEAIPAMETILINPEDVLTAIRQTQNWKSPGPDGLHNFWLKWFPSSHARLAVQFQDALERGSLPAFMTTGVTHLLFKSGCTTEPKNYRPITCLPTIYKVLTSIIRSKITDHINSNQILFSGQTGCMNGSRGTKELLLINMTICQQARHNRRNLSAAWIDYKKAYDSVPHTWLMRVLNLYKINTNLCNFLGSCMGQWTTVLRYPGGTVPPDCDEPIRIKRGIFQGDSLSPLWFCMALNPLSTLLLDSGLGYRLRRGSEPISHLLYMDDLKLFASKQTELIELLKITERFSNSINMDFGVDKCAVIHVKRGEVAVSDDILVSETVRLRSLSVTETYKYLGMPEALGIMGADVKRSLKVRFFSRLTKVLNSFLSGGNKIRAFNGWVMPVLIYSFGILKWTQTELDALDRKVRTLLTAHRMHHPRSSVMRLYIPRRCGGRGILNAKDLHNREVCNLRDYFLHSDVDMHRVVVMVDKGFTPLSLAIENWRKPLVVGIKDREDIWKSKELHGRFYRALHGPDVDRLASVSWLRFGNLFGETEGFVFAIMDEVIKTNNYRKYILKDGTVDICRACHRPGESIRHVISGCSYLANGEYLHRHNLVTKIIHQQIALRYGLVTPEVPYYQYVPQPVLENGHATLYWDRSIITDRTILANKPDIVIIDRLARRAILVDVTIPHDDNLVKAEKDKMSKYLDLAHEVTDMWDVDLNNYCPDCRFCSWVDTKEPRPTSTEALNRRLGQESDTEGSIA

SEQ ID NO: 27004 - protein, 1197 aa, Hyles vespertilio
MITRKARARHNARLRPPSSSSSASWASASDVFEVTPDIDVSSQRDELQSSPPPPRPARRRGRPPPAVGLGPVGQSVPPTVPATGGVVRRMRWTREINENVMRAYFGATKGGINLTAYRAKMLSLFQALEPMVDVSSQRLSDQVRFIQRRKLLDDDTLERLRTDLCVVQDDDISPVSGDQAASPTPTPVSDFELTDNLDDNVSPQDKQHLRGALERAISEFVSLSASCRPRLPRLPTHRRNLALMGALDSMLPTYLESSRDLVDTHSILYCAAVAACRVANVQFPKEYRATRGVVTVPAWQLRIEDRINRARILIGKLISFSEGNSRPRIMRFVTQAFSGTNISPQNYRLCVTERIDFYKQKVYAWANRIRHYRRRWDRFQQNRMFQSDQKRVYRCWENSSQGVVDGRLPGAHEMREYWTNIWSSPVSHTEASWFSVVDRACEAIPAMETILISLEDVQTAIRRTQNWKSPGPDGLHNFWLKWFPSSHVRLEAQFQDALEAESLPAFMTTGVTHLLFKSGCTTEPKNYRPITCLPTIYKILTSIIRSKITDHITSNQILFPGQTVCMNGSRGTKELLLIYMTICQQARHNRRNLSAAWIDYKKAYDSVPHTWLMRVLNLYKINTNLCNFLGSCMGQWTTVLRYPGSTAPPDCDELIRIKRGIFQGDSLSPLWFCMALNPLSTLLLDSGLGYRLRRGSEPISHLLYMDDLKLFASKQTELVELLKITERFSNSINMEFGVDKCAVIHVKRGEVAVSDDIQVSETVRLRHLSVTETYKYLGMPEALGIMGADVKQSLKERFFSRLAKVLKSFLSGGNKIRAFNGWVMPVLMYSFGILKWTQTELDALDRKVRTLLTAHRMHHPRSSVMRLYIPRRCRGRGILNAKDLHNREVCNLRDYFLHSDVDMHGVVVMVDKGFTPLSLAIENWRKPLVMGIRDREDIWKSKELHGRFYRALHGPDVDRLASVSWLRFGNLFGETEGFVFAIMDEVIKTNNYRKYILKDGTVDICRACHRPGESIRHVISGCSYLANGEYLHRHNLVAKIIHQQIALRYGLVTNGVPYYQYVPQPVLENGHATLYWDRSIITDRTILANKPDIVIIDRLARRAILVDVTIPHDDNLVKAEKDKMSKYLDLAHEVTDMWDVDSTIIVPIVVSAHGLIPKSLDQHLQRLSISCWVRSQIQKAVLLDTARIVRRFLTLGS

SEQ ID NO: 27005 - protein, 868 aa, Dendrolimus kikuchii
MRFVAQAFAGTNISPSEHMARATERIDFWKQKVYAWANRIRRYKERADRYFLNRTFQSEEKRVYRGWEKSSDSVADRQIPNTDAMASFWRSIWSVPVSHTEGDWIEVIKQSCEQVPDMEPITIEPLDVGNAIRSAHNWKSPGPDGLHNFWIKWFKSSHGCLANQFQEAVDRGSLPTFMTTGVTHLLFKSGCTTEPKNYRPITCLPTIYKLLTSILEKKLSNYFYNNNILAITQNGCKAGSRGTKELLLIDTTVSQQARRNRRNLSVAWIDYKKAYDSVPHTWLMRVLELYKVDATLRTFLQACMRQWVTYLRVPGGGGVPLPEGEINIERGIFQGDSLSPLWFCLALNPLSTLLESSKLGYRFRRGGEIVSHLLYMDDLKLFASNEPDLIELLKTTERFSKSINMEFGIEKCAVMHVRRGKVVNSPNLQLSENMSLKSLSETETYKYLGMSESLGIADADVKQTVKDRFFCRLRKVLTSLLSGGNKVRAFNSWVMPVLAYSFGILRWTQTELDALDRRVRCLLTKHRMHHPRSSVMRLYISRRCGGRGFLNAKDLHNREVNNLRAYFLKMNVGLHKDVVAVDKGLTTLALAKENWCNLAVLSTSDRINVWKSKELHGRFYRALTGPDVDLSASVNWLRFGNLFGETEGFVFAIMDEVIKTNNYRKYILKDGTSDICRACHRPGESLRHIVSGCSHLSNGEYLHRHNLVARIIHQQLALRYGLVETEVPYYQYSPEPVLENSRATLYWDRSVITDRTIVANKPDIVIIDRSARRAILVDISIPHDDNLVKKEKEKLSKYLDLAHEVTAMWRLESTSIVPIVVSVNGLIAKSLDRHLERLSLGSWVKGQIQKAALLDTARIVRRFLSLEP

SEQ ID NO: 27006 - protein, 920 aa, Eilema sororculum
MAGAKFPIKDPAIRPKSAIPAWQCRIERRVAEARVLIGKLICFRSGNTRPRVMRYVTRAFAGTDISPQDYTSRVTERIDFLKQKIYAWANRIRRYKRRVDRYTVNHMFQRDQRWVYRSWERTDESVDDVRRPDAEATNAFWRSIWSVPVSHTEGDWMREVERACETIPEMEEIYIDATDVDCAVRSLSNWKSPGPDGLHNFWLKWLRSSHVVLASQFQSAVESGTLPAFMTTGVTHLLHKTGSTLEPNNYRPITCLPTVYKLLTSILRAKINNHINNNSIMCASQNGCRNGARGTKELLLIDMAISQQARRNRKDLTACWIDYKKAFDSVPHTWLLRVLELYKVNTTLCTFLRSCMGQWRTVLFYPGCRRALGGGVPITIERGIFQGDSLSPLWFCLALNPLSTLLVNSGLGYRLRREGQMVSHLFYMDDLKLFAHTNPQLIPLLKITETFSNSIKMAFGVDKCAVIHVKRGRVVESEGIQLSDSTNLRSLLVTETYKYLGMSQALCINEVDMKQMLQERFFGRLKKVLNSLLSGGNKVRACNSWVMPLLMYSFGILKWTQTELDTIDRKVRTQLTAFRMHHPRSSVMRLYIPRKCGGRGFLNAKTLHNREVCNLRDYFLKSNVDMHHDVVNVDTGLTPLGLAKENWRRPTIVSTDSRREVWQSKELHGRFYRALHRPEVDLLASVSWLRFSDLFWETEGFVCAIADEVIKTNNYRKYIMRDGTIDICRACHQPGESLRHITSGCSRLANGEYLHRHNQVARIIHQRLALKYNLVEFEVPYYRYVPEPVLENTHITLYWDRSIITDRTVVANKPDIVVIDRSERRALIVDVTIPHDENLVKAEKDKQVKYLDLAHEVVDMWNVDSAIIVPIVVSVNGLIAKSLDQHLKRLGLDGWVKGQMQKAVLLDTARIVRKFLSLEP

SEQ ID NO: 27007 - protein, 1193 aa, Laothoe populi
MTTRNRVRCARLPSPSSSSSSASWASASEAPEPLPVTDVSSQRDGLQSSPPTLTPARRRGRQHPPPVGLGPVGPCAPPMAPAAGGVVRRMRWTYSINENVMRAYFGATEGGTKLTAYRPKMLALFQDLEPTIDVSAQRLSDQVRYIQRRKLLDDAALDRLRANLCVVQDVVQRTVDTPSVPTDDVNIELVDDLDNNVSSHDIQCLRGALESAILEFKLVPACLRPRLPRLPTHKRNLALMGALDSMLPEYMESSRDLVDTHAILYCAAIAACRVANVRFPNDYRAARDATHVPAWQRRIEERIDRTRTLISKLICFKAGNNRPKVMRFVTQAFLGSSIRPQDYRFYVTERIDLLKQKVYAWANRIRRYKKRWNRFQQNRAFQSDQKRVYRCWEHSQQGVGDGRLPDVRDMRTYWANIWSSPVSHTEGAWIGVVERACEAISPMETISISPDDVLRAVRPTQNWKSPGPDGLHNFWLKWFVTSHSRLAAQFQSALESGSLPTFMTTGVTHLLFKSGSTTDPKNYRPITCLPTIYKLFTSIIRFKIAYHIDNNNILFSAQTGCKIGSRGTKELLLIDMAICQQVRHNRRNLSAAWIDYKKAYDSVPHTWLMRVLDLYKIHSNLRTLLGACMRQWTTVLKYPGGAGPLDCDEPIKIDRGIFQGDSLSPLWFCLALNPLSTLLLDSGLGYRLRRGSVPISHLLYMDDLKLFAPKKSDLIELLKITKSFSNSISMEFGVDKCAVIHVGRGAVRVSDDVYLSETERLRSLSESETYKYLGMSEALGIMGADMKQSLKERFFCRLTKVLNSFLSGGNKIRAFNGWVMPVLMYSFGILKWTQTELDALDRRVRTLMTAHRMHHPRSSVMRLYIPRRCGGRGLLNAKDLHNREVRNLRDYFLHSDVDVHREVVKVDKGFTPLSLANENWRVPVVMSTGDRRGVWKSKELHGRFYRALNGPDVDQLASVSWLRFGDLFGETEGFVFAIMDEVVKTNNYRKYILKDGTVDICRACHRPGESIRHVISGCSYLANGEYLHRHNLVAKIIHQQLALRYHLVISEVPYYQYVPQPVLENGHTTLYWDRSVITDRTIVANKPDIVVIDRLARRAILVDVTIPHDDNLVKAEKDKMSKYLDLAHEVVDMWNVDSAIIVPIVVTANGLIPKSLDQHLQRLSIGRWVKSQIQKAVLLDTARIVRRFLTLGS

SEQ ID NO: 27008 - protein, 943 aa, Laothoe populi
MESSRDLVDTHAILYCAAIAACRVANVRFPNDYRAARDATHVPAWQRRIEERIDRTRTLISKLICFKAGNNRPKVMRFVTQAFLGSSIRPQDYRFYVTERIDLLKQKVYAWANRIRRYKKRWNRFQQNRAFQSDQKRVYRCWEHSQQGVGDGRLPDVRDMRTYWANIWSSPVSHTEGAWIGVVERACEAISPMETISISPDDVLRAVRPTQNWKSPGPDGLHNFWLKWFVTSHSRLAAQFQSALESGSLPTFMTTGVTHLLFKSGSTTDPKNYRPITCLPTIYKLFTSIIRFKIAYHIDNNNILFSAQTGCKIGSRGTKELLLIDMAICQQVRHNRRNLSAAWIDYKKAYDSVPHTWLMRVLDLYKIHSNLRTLLGACMRQWTTVLKYPGGAGPLDCDEPIKIDRGIFQGDSLSPLWFCLALNPLSTLLLDSGLGYRLRRGSVPISHLLYMDDLKLFAPKKSDLIELLKITKSFSNSISMEFGVDKCAVIHVGRGAVRVSDDVYLSETERLRSLSESETYKYLGMSEALGIMGADMKQSLKERFFCRLTKVLNSFLSGGNKIRAFNGWVMPVLMYSFGILKWTQTELDALDRRVRTLMTAHRMHHPRSSVMRLYIPRRCGGRGLLNAKDLHNREVRNLRDYFLHSDVDVHREVVKVDKGFTPLSLANENWRVPVVMSTGDRRGVWKSKELHGRFYRALNGPDVDQLASVSWLRFGDLFGETEGFVFAIMDEVVKTNNYRKYILKDGTVDICRACHRPGESIRHVISGCSYLANGEYLHRHNLVAKIIHQQLALRYHLVISEVPYYQYVPQPVLENGHTTLYWDRSVITDRTIVANKPDIVVIDRLARRAILVDVTIPHDDNLVKAEKDKMSKYLDLAHEVVDMWNVDSAIIVPIVVTANGLIPKSLDQHLQRLSIGRWVKSQIQKAVLLDTARIVRRFLTLGS

SEQ ID NO: 27009 - protein, 1195 aa, Deilephila porcellus
MKKRARSKHARLTSPSSSSSASWASASDVFEVTPDIDASSQRDELQSSPPPPRPARRRGRPPPVVGLGPVGPSVPPTVPATGGVVRRMRWTHQINENVMRAYFGATRGGTHLTAYRAKMLSLFQALAPTVEVSSQRLSDQVRFIQRRKLLDDETLERLRTDLRVVQDNNVQPVNGDQAADPTPIPIAVIEVTDNLDDNVSPQDEQRLRGALERAISEFMPLSASCRPRLPRLPTHRRNLALMGALDSMLPIYLESSRDLVDTHSILYCAAVAACRVANVNFPNERRATRGVAAVPAWQRRIEERINRARTLIGKLISFKEGNSRPKIMRFVAQAFSGTNTSPRNYRLCVTERIDFYKQKVYAWANRIRRYRRRWDRFQQNRMFQSDQKRVYRCWENSPQSVVDGRLPSAHEMREYWTNIWSSPVSHTEAPWFSVVDRACKVIPAMEAILISPEDVLTAIRPTQNWKSPGPDGLHNFWLKWFPSSHARLATQFQDALEGGSLPTFMTTGVTHLLFKSGSTTEPKNYRPITCLPTIYKVLSSIIRSKIQCHITTNQILYSGQTGCKSGSRGTKELLLIDMAICQQARQNRRNLSAAWIDYKKAYDSVPHTWLMRVLNLYKVDTKLSTFLGACMGQWTTVLKYPGATNPSVNDEPIKIKRGIFQGDSLSPLWFCMALNPLSTLLLDSGLGYRLRRGSEPISHLLYMDDLKLFTSKQSELIELLKIAERFSKSINMEFGVDKCAVIHVKRGVVAVSDDIRVSETVRLRSLSPTETYKYLGMPEALGIKGADVKQSIKERFFSRLTKVLNSFLSGGNKIRAFNGWVMPVLMYSFGILRWTQTELDALDRKVRTLLTAHRMHHPRSSVMRLYIPRRCGGRGMLNAKDLHNREVCNLRDYFLHSDVDMHGVVVMVDKGFTPLSLANENWRKPLVMGIKDREEIWKGKELHGRFYRALHGPDVDRLASVSWLRFGNLFGETEGFVFAIMDEVIKTNNYRKYILKDGTVDICRACHRPGESIRHVISGCSYLANGEYLHRHNLVAKIIHQQIALRYGLVTPEVPYYQYVPQPVLENGHATLYWDRSVITDRTIVANKPDIVIIDRLARRAILVDVTIPHDDNLVKAEKDKLSKYLDLAHEVTELWDVDSTIIVPIVVSAHGLIPKSLDQHLQRLSMGRWVMSQIQKAVLLDTARIVRRFITLGS

SEQ ID NO: 27010 - protein, 868 aa, Hyles vespertilio
MRFVTQAFSGTNTSPRNYRLCVTERIDFFKQKVYAWANRIRRYRRRWDRFQQNRKFQTDQKSVYRCWENPPQGVVDGRLPSAHEMREYWTNIWSSPVSHTEASWFSVVDRACEAIPAMETILISPEDVLTAIRQTQNWKSPGPDGLHNFWLKWFPSSHARLAAQFQNALERGSLPTFMTTGVTHLLFKSGCTTEPKNYRPITCLPTIYKVLTSIIRSKITDHINSNQILFSGQTGCMNGSRGTKELLLINMTICQQARHNRRNLSAAWIDYKKAYDSVPHTWLMRVLNLYKINTNLCNFLGSCMGQWTTVLRYPGGTVPPDCDEPIRIKRGIFQGDSLSPLWFCMALNPLSTLLLDSGLGYRLRRGSEPISHLLYMDDLKLFASKQTELIELLKITERFSNSINMDFGVDKCAVIHVKRGEVAVSDDILVSETVRLRSLSVTETYKYLGMPEALGIMGADVKRSLKERFFSRLTKVLNSFLSGGNKIRAFNGWVMPVLIYSFGILKWTQTELDALDRKVRTLLTAHRMHHPRSSVMRLYIPRRCGGRGILNAKDLHNREVCNLRDYFLHSDVDMHRVVVMVDKGFTPLSLAIENWRKPLVVGIKDREDIWKSKELHGRFYRALHGPDVDRLASVSWLRFGNLFGETEGFVFAIMDEVIKTNNYRKYILKDGTVDICRACHRPGESIRHVISGCSYLANGEYLHRHNLVAKIIHQQIALRYGLVSPEVPYYQYVPQPVLENGHATLYWDRSIITDRTILANKPDIVIIDRLARRAILVDVTIPHDDNLVKAEKDKMSKYLDLAHEVTDMWDVDSTIIVPIVVSAHGLIPKSLDQHLQRLSIGCWVRSQIQKAVLLDTARIVRRFLTLGS

SEQ ID NO: 27011 - protein, 1024 aa, Hyles vespertilio
MRWTREINENVMRAYFGATKGGINLTAYRAKMLSLFQALEPTVDVSSQRLSDQVRFIQRRKLLDDDTLERLRTDLCFVQDDHVSPVSGDQAAGPTPTPVADFELTDNLDDNVSPQAKQQLRGALECAILEFASLSASCRPRLPRLPTHRRNLALMGALDSMLTTYLESSRDLVDTHSILYCAAVAACRVANIKFPNEYKATRGVVIVPAWQRRIEDRINRARTLIGKLISFKEGNSRPKIMRFVTQAFSGTNTSPRNYRLCVTERIDFFKQKVYAWANRIRRYRRRWDRFQQNRKFQTDQKSVYRCWENPPQGVVDGRLPSAHEMREYWTNIWSSPVSHTEASWFSVVDRACEAIPAMETILISPEDVLTAIRQTQNWKSPGPDGLHNFWLKWFPSSHARLAAQFQNALERGSLPTFMTTGVTHLLFKSGCTTEPKNYRPITCLPTIYKVLTSIIRSKITDHINSNQILFSGQTGCMNGSRGTKELLLINMTICQQARHNRRNLSAAWIDYKKAYDSVPHTWLMRVLNLYKINTNLCNFLGSCMGQWTTVLRYPGGTVPPDCDEPIRIKRGIFQGDSLSPLWFCMALNPLSTLLLDSGLGYRLRRGSEPISHLLYMDDLKLFASKQTELIELLKITERFSNSINMDFGVDKCAVIHVKRGEVAVSDDILVSETVRLRSLSVTETYKYLGMPEALGIMGADVKRSLKERFFSRLTKVLNSFLSGGNKIRAFNGWVMPVLIYSFGILKWTQTELDALDRKVRTLLTAHRMHHPRSSVMRLYIPRRCGGRGILNAKDLHNREVCNLRDYFLHSDVDMHRVVVMVDKGFTPLSLAIENWRKPLVVGIKDREDIWKSKELHGRFYRALHGPDVDRLASVSWLRFGNLFGETEGFVFAIMDEVIKTNNYRKYILKDGTVDICRACHRPGESIRHVISGCSYLANGEYLHRHNLVAKIIHQQIALRYGLVTPEVPYYQYVPQPVLENGHATLYWDRSIITDRTILANKPDIVIIDRLARRRVNLTSDPTAD

SEQ ID NO: 27012 - protein, 1194 aa, Hyles vespertilio
MTTRASRRNAQMRSPSSSSSASWASASDVFEVTPDIDVSSQRDELQSSPPPPRPARRRGRPPPAVGLGPTGPSVPPTVLATGGVVRRMRWTHQMNENVMRAYFRATKGGTNLTAYRAQMLSMFQVLEPTVNVSSQRLSDQVRFIQRRKLLDDEALERLRTEACVALDVITPITQRAAETPSIPAADIELVDNLDNTVSPQDQQRLRRTLESAILEYKSIPASCRPRVPRLPTHRRNLALMGALDSIVSTYMESSRDLVDTHSILYCAAVAACRVANVKFPINNVTTTRDVATVPAWQRRIEDRINRARTLIGKLIAFRNGNNRQRVMRFVAQAFSGTNISPRDYGLWVTERIDYYKQKVYAWANRIRRYRKRWDRFQQNRTFQSDQKRVYRCWERSPQCVVDGRLPSVHDMRTYWTNIWSSSISHTEADWFGVVERACESIPIMEAISISPEDVLVAIRPTQNWKSPGPDGLHNFWLKWLPCSHARLAAQFQDALDGGSLPTFMTTGVTHLLYKSGSATDPKNYRPITCLPTTYKLFTSILRAKIANHFTSNNILFPGQTGCKSGSRGTKELLLIDMTICQQARQNRRNLSAAWIDYKKAFDSVPHTWLMRVLSLYKIDTNLCTFLGSCMGQWTTVLRYPGGMVSPDCDEPIRIKRGIFQGDSLSPLWFCMALNPLSTLLVDSGLGYRLRRGTEPISHLLYMDDLKLFASKQTELIELLKITEKFSNSINMEFCVDKCAIIHVKRGEVAVSDGVQISDAVRLRALSETETYKYLGMPEALGILSADVKQSVKERFFGRLAKVLNSLLSGGNKIRAFNGWVMPVLMYSFGILRWTQTELDALDRKVRTLLTAHRMHHPRSSVMRLYIPRRCGGRGILNAKDLHNREVCNLRDYFLHSDVDMHRIVVKIDKGLTPLSLANENWRKPLVMSTKDREEVWKSKELHGRFYRALHGPDVDRPASVSWLRFGNLFGETEGFVFAIMDEVIKTNNYRKYILKDGTVDICRACHLPGESIRHVISGCSYLANGEYLHRHNLVAKIIHQQIALRYGLVTLEMPYYQYVPQPVLENGHATLYWDRSIITDRTIVANKPDIVIIDRLARRAILVDVTIPHDVNLVKAEKDKLSKYLDLAHEVTDMWDVDSTVIVPIVVSAHGLMPKSFDQHLQRLSIGRWVKSQIQKAVLLDTARIVRRFLTLDP

SEQ ID NO: 27013 - protein, 1197 aa, Hyles vespertilio
MIKRKARTTQNARIRSPSSSSSASWASASDVFEVTPDNDALSQRDELQSSPPPPRPARRRGRPPPAVGLGPVGPSVPPTVPATGGVVRRMRWTCEINENVMRAYFGATKGGINLTAYRAKMLSLFQALEPTIDVSSQRLSDQVRFIQRRKLLDDDTLERLRTDLCVVQDDNVSPVSGDQAVGPTPTPVADFELTDNLDDNVSPQDKQHLRGALVRAISDFVSVSASCRPRLLRLPTHRRNLALMGALDSMLPTYLESSRDLVDTHSILYCAAVAACRVANVQFPKEHRATRGVAAVPAWQLRIEDRINRARTLIGKLISFSEGNSRPRIMRFVTQAFSGTNISPQNYRLCVTERIDFYKQKVYAWANRIRRYRRRWDRFQQNRMFQSDQKRVYRCWEDSSQGVVDGRLPGAHEMREYWTNIWSSPVSHTEASWFSVVDRACESIPAMETILISSEDVQTAIRRTQNWKSPGPDGLHNFWLKWFPSSHARLAAQFQDALEAGSLPAFMTKGVTHLLFKSGCTTEPKNYRPITCLPTIYKILTSIIRSKITDHITSNQILFPGQTGCMNGSRGTKELLLINMTICQQARHNRRNLLAAWIDYKKAYDSVPHTWLMRVLNLYKINTNLCNFLGSCMGQWTTVLRYPGGTAPPDCDEPIRIKRGIFQGDSLSPLWFCMALNPLSTLLLDSGLGYRLRRGSEPISHLLYMDDLKLFASKQTELVELLKITERFSNSINMEFGVDKCAVIHVKRGEVAVSDDIQVSETVRLRPLSVTETYKYLGMPEALGIMGANVKQSLKERFFSRLTKVLNSFLSGGNKIRAFNGWVMPVLMYSFGILKWTQTELDALDRKVRTLLTAHRMHHPRSSVMRLYIPRRCGGRGILNAKDLHNREVCNLRDYFLHSDVDMHGVVVMVDKGFTPLSLAIENWRKPLVVGTKDREDIWKSKELHGRFYRALNGPDVDRLASVSWLRFGNLFGETEGFVFAIMDEVIKTNNYRKYILKDGTVDICRACHRPGESIRHVISGCSYLANGEYLHRHNLVAKIIHQQIALRYGLVTPEVPYYQYVPQPVLENGHATLYWDRSIITDRTILANKPDIVIIDRLARRAILVDVTIPHDDNLVKAEKDKMSKYLDLAHEVTDMWDVDSTIIVPIVVSAHGLIPKSLDQHLQRLSIGVWVRSQIQKAVLLDTARIVRRFLTLGS

SEQ ID NO: 27014 - protein, 1197 aa, Hyles vespertilio
MFHNKARKKRNAHLTSPSSSSSASWASASDVFEVTPDNDASSQHGELQSSPPPPRPAQRRGRPPPAVGLGPVGPSVPPTVPATGGVVRRMRWTREINENVMRAYFGATNGGINLTAYRVKMLSLFQALEPTVDVSSQRLSDQVRFIQRRKLLDDDTLERLRTDLCFVQEDHVSPVSGDQAAGPTPTPVADFELTDNLDDNVSPQDKQQLRGALECAILEFASLSASCRPRLPRLPTHRRNLALMGALDSMLPTYLESSRDLVDTHSILYCAAVAACRVANVQFPKEYRATRGVVTVPAWQRRIEDRINRARTLIGKLISFKEGNSRPKIMRFVTQAFSGTNTSPRNYRLCVTERIDFFKQKVYAWANRIRRYRRRWDRFQQNRKFQTDQKRVYRCWENPPQGVVDGRLPSAHEMREYWTNIWSSPVSHTEASWFSVVDRACEAIPAMETILINPEDVLTAIRQTQNWKSPGPDGLHNFWLKWFPSSHARLAVQFQDALERGSLPAFMTTGVTHLLFKSGCTTEPKNYRPITCLPTIYKVLTSIIRSKITDHINSNQILFYGQTGCMNGSRGTKELLLINMTICQQARHNRRNLSAAWIDYKKAYDSVPHTWLMRVLNLYKINTNLCNFLGSCMGQWTTVLRYPGGTVPPDCDEPIRIKRGIFQGDSLSPLWFCMALNPLSTLLLDSGLGYRLRRGSEPISHLLYMDDLKLFASKQTELIELLKITERFSNSINMDFGVDKCAVIHVKRGEVAVSDDILVSETVRLRSLSVTETYKYLGMPEALGIMGADVKRSLKERFFSRLTKVLNSFLSGGNKIRAFNGWVMPVLIYSFGILKWTQTELDALDRKVRTLLTAHRMHHPRSSVMRLYIPRRCGGRGILNAKDLHNREVCNLRDYFLHSDVDMHRVVVMVDKGFTPLSLAIENWRKPLVVGIKDREDIWKSKELHGRFYRALHGPDVDRLASVSWLRFGNLFGETEGFVFAIMDEVIKTNNYRKYILKDGTVDICRACHRPGESIRHVISGCSYLANGEYLHRHNLVTKIIHQQIALRYGLVTPEVPYYQYVPQPVLENGHATLYWDRSIITDRTILANKPDIVIIDRLARRAILVDVTIPHDDNLVKAEKDKMSKYLDLAHEVTDMWDVDSTIIVPIVVSAHGLIPKSLDQHLQRLSIGVWVRSQIQKAVLLDTARIVRRFLTLGS

SEQ ID NO: 27015 - protein, 1197 aa, Hyles vespertilio
MIKRKARTTQNARIRSPSSSSSASWASASDVFEVTPDNDALSQRDELQSSPPPPRPARRRGRPPPAVGLGPVGPSVPPTVPATGGVVRRMRWTREINENVMRAYLGATKGGTNLTAYRAKMLSLFQALEPTIDVSSQRLSDQVRFIQRRKLLDDDTLERLRTDLCVVQDDNVSPVSGDQAVGPTPTPVADFELTDDLDDNVSLQDKQHLRGALVRAISDFVSVSASCRPRLLRLPTHRRNLALMGALDSMLPTYLESSRDLVDTHSILYCAAVAACRVANVQFPKEHRATRGVAAVPAWQLRIEDRINRARTLIGKLISFSEGNSRPRIMRFVTQAFSGTNISPQNYRLCVTERIDFYKQKVYAWANRIRRYRRRWDRFQQNRMFQSDQKRVYRCWEDSSQGVVDGRLPGAHEMREYWTNIWSSPVSHTEASWFSVVDRACESIPAMETILISSEDVQTAIRRTQIWKSPGPDGLHNFWLKWFPSSHARLAAQFQDALEAGSLPAFMTKGVTHLLFKSGCTTEPKNYRPITCLPTIYKILTSIIRSKITDHITSNQILFPGQTGCMNGSRGTKELLLINMTICQQARHNRRNLSAAWIDYKKAYDSVPHTWLMRVLNLYKINTNLCNFLGSCMGQWTTVLRYPGGTAPPDCDEPIRIKRGIFQGDSLSPLWFCMALNPLSTLLLDSGLGYRLRRGSEPISHLLYMDDLKLFASKQTELVELLKITERFSNSINMEFGVDKCAVIHVKRGEVAVSDDIQVSETVRLRPLSVTETYKYLGMPEALGIMGANVKQSLKERFFSRLTKVLNSFLSGGNKIRAFNGWVMPVLMYSFGILKWTQTELDALDRKVRTLLTAHRMHHPRSSVMRLYIPRRCGGRGILNAKDLHNREVCNLRDYFLHSDVDIHGVVVMVDKGFTPLSLAIENWRKPLVVGTKDREDIWKSKELHGRFYRALHGPDVDRLASVSWLRFGNLFGETEGFVFAIMDEVIKTNNYRKYILKDGTVDICRACHRPGESIRHVISGCSYLANGEYLHRHNLVAKIIHQQIALRYGLVTPEVPYYQYVPQPVLENGHATLYWDRSIITDRTILANKPDIVIIDRLARRAILVDVTIPHDDNLVKAEKDKMSKYLDLAHEVTDMWDVDSTIIVPIVVSAHGLIPKSLDQHLQRLSIGVWVRSQIQKAVLLDTARIVRRFLTLGS

SEQ ID NO: 27016 - protein, 1111 aa, Dendrolimus kikuchii
MRWTQELNECVMRAYYEATEGETNLTSYRGRLLSLFQTLQPASTVTAQRLSDQVRAIQRLHLLDESTLDRLRNAVRINREVTDTPQPTSPAPPADSQRPVNFTMDDVSDGLAVGDVSIQINEQLRRTLEHSIQEFRDQPILNRPRVPKLPMHRNNLLLMGTLDCLLAPYFRSSTDLADTHSILYCGAVAVCRVAGVKFPNTQPTRPASGKPAWQIRIERRIDRARVLIAKLICFRAGNCRPRVMRFVAQAFAGTNISPSEHMARATERIDFWKQKVYAWANRIRRYKERADRYFLNRTFQSEEKRVYRGWEKSSDSVADRQIPNTDAMASFWRSIWSVPVSHTEGDWIEVIKQSCEQVPDMEPITIEPLDVGNAIRSAHNWKSPGPDGLHNFWIKWFKSSHGCLANQFQEAVDRGSLPTFMTTGVTHLLFKSGCTTEPKNYRPITCLPTIYKLLTSILEKKLSNYFYNNNILAITQNGCKAGSRGTKELLLIDTTVSQQARRNRRNLSVAWIDYKKAYDSVPHTWLMRVLELYKVDATLRTFLQACMRQWVTYLRVPGGGGVPLPEGEINIERGIFQGDSLSPLWFCLALNPLSTLLESSKLGYRFRRGGEIVSHLLYMDDLKLFASNEPDLIELLKTTEHFSKSINMEFGIEKCAVMHVRRGKVVNSPNLQLSENMYLKSLSETETYKYLGMSESLGIADADVKQTVKDRFFCRLRKVLTSLLSGGNKVRAFNSWVMPVLAYSFGILRWTQTELDALDRRVRCLLTKHRMHHPRSSVMRLYISRRCGGRGFLNAKDLHNREVNNLRAYFLKMNVGLHKDVVAVDKGLTMLALAKENWCNLAVLSTSDRINVWKSKELHGRFYRALTGPDVDLSASVNWLRFGNLFGETEGFVFAIMDEVIKTNNYRKYILKDGTLDICRACHRPGESLRHIVSGCSHLSNGEYLHRHNLVARIIHQQLALRYGLVETEVPYYQYSPEPVLENSRATLYWDRSVITDRTIVANKPDIVIIDRSARRAILVDISIPHDDNLVKKEKEKLSKYLDLAHEVTAMWRLESTSIVPIVVTVNGLIAKSLDRHLERLSLGSWVKGQIQKAALLDTARIVRRFLSLEP

SEQ ID NO: 27017 - protein, 1119 aa, Dendrolimus kikuchii
MRWSQQMNESVMRAYFEATNIGTNLTAYRDRMLSLFQVLHPDTTVTAQRLSDQVRAIQRLHLLDESVLDRLRTEVRISLRITETSQSPVPQNNNIITNTMIDVTLTAAVPPETDLGIPTADYVSSQDNEHMRRSLEAAIKDFKDMPTLSRPRLPRLPIHKRSLAIMGHMNSLLASHLIQSKDLTETHSILYCGAVAVCRTVGVNFSDNPHLIRHTCQKPAWQYRIERRINTARTLIAKLLCFRSGNTRPKIMRFVTQAFAGTNIGPNDYKGRVMERIDLLKQKIYAWANRIRRYKKRTERFYLNRRFQRDQKGVYRGWEQPEEQVIDRQLPNADAISAFWRGIWSVPVNHTEGDWMGAVEQRCGLIPEMDSITIEPYDVGYAIRSAHNWKSPGPDGLHNFWIKWFKVSHPCLATQFQDALNSGNVPTFMTTGVTHLLYKSGSTTEPKNYRPITCLPTIYKLLTSILRSKLMKHLVDNTLLAKTQNGCRPGSRGTKELLLIDMTINHQVRRNKKNLCTAWVDYKKAYDSVPHTWLMRVLELYKIDVTLRTFLGACMGQWVTRLCMPGGGSLPISDGLIKIERGIFQGDSLSPLWFCLALNPLSFLLEDSRLGFHLRRGGEAISHLLYMDDLKLFTSKKHDLLELLNLTETFSSSIGMEFGVDKCAVMYVQRGRVVNSNGLQLSGGVCFKTLSEDETYKYLGISQSLGIVDEDVKQLIKERFFSRLRKVLNCLLSGGNKIRAFNSWVMPSLTYSFGILRWTQTELDALDRRVRCMLTTYRMHHPRSSVMRLYIPRKCGGRGLLNAKDLHNREVYNLREYFLKTIQSIHRDMLSVDKGFTPLSLAKQNWLRPPVLSTSERMDVWKSKELHGRFHRALYGPDIDLPASVNWLRFGDLFGETEGFVCAIMDEVIKTNNYRKYILKDGTLDVCRACHRPGESIRHIISCCSRLANSEYLHRHNLVARIIHQQLALRYGLIATEVPYYKYTPEPVLENGHITLYWDRSIITDRTIVANKPDIAIIDRSARRTLLVDISIPHDCNLVNAETDKLTKYLDLAHEITDMWHMESTIIVPIVVSVNGLVAKSLDRHLERLSLGKWVKGQMQKAVLLSTARIVRKFLSLEP

SEQ ID NO: 27018 - protein, 1191 aa, Eilema sororculum
MLTRAQARNRNAQSTSPGSSLSSAAQLPAVEPAASSSSSSDEFFSPPTSPTPVRRPGRGRPPTCLGPRRPPASNRAPATGGNVHRMRWTTSINENVMRAYFAATEGGTNLSAYRTRMLPLFQALEPTINTSAQRLSDQVRVIQRNRLLNETVLETLRLECLRNICVTPAPAPAPASTAEINDDAYVAPDDTPIPVSIQYNEEIKEALECALREYRSMPVHVRPRLPRLPIHRRNIALVSALDSLLPRYLENSENLGDTHSILYCTAVAACRIAGAKFPIKDPAIRPKPAIPAWQCRIERRVAEARVLIGKLICFRSGNTRPRVMRYVTRAFAGTDISPLDYTSRVTERIDFLKQKVYAWANRIRRYKKRVDRYTLNCMFQRDQRWVYRSWERTEESVDDVRRPDAEATNAFWRSIWSVPVSHTEGDWMREVERACETIPEMEEINIDAIDVDCAVRPLSNWKSPGPDGLHNFWLKWLRSSHVVLASQFQSAIESGTLPAFMTTGVTHLLHKTGSTLEPNNYRPITCLPTVYKLPTSILRAKINNHINNNSIMCASQNGCRNGARGTKELLLIDMTISQQARRNRKDLAACWIDYKKAFDSVPHTWLLRVLELYKVNTTLCTFLRSCMGQWRTVLFYPGCRQALGSGEPITIERGIFQGDSLSPLWFCLALNPLSTLLVNSGLGYRLRREGQMVSHLFYMDDLKLFAHTNPQLIALLKVTETFSNSIKMAFGVDKCAVIHVKRGRVVESEGIQLSDSTNLRSLLVTETYKYLGMSQTLCINEADMKQMLQDRFFGRLKKVLNSLLSGGNKVRACNSWVMPLLMYSFGILKWTQTELDTIDRKVRAQLTAFRMHHPRSSVMRLYIPRKCGGRGFLNAKTLHNREVCNLRDYFLKSNVDMHRDVVNVDTGLTPLGLAKENWRRPTIVSTDSRREVWQSKELHGRFYRALHRPEVDLLASVSWLRFSDLFGETEGFVCAIADEVIKTNNYRKYIMRDGTIDICRACHQPGESLRHITSGCSRLANGEYLHRHNQVARIIHQRLALKYNLVQVEVPYYRYVPEPVLENSHITLYWDRSIITDRTVVANKPDIVVIDRSERRALIVDVTIPHDENLVKAETDKQVKYLDLAHEVVDMWNVDSAIIVPIVVSVNGLIAKSLDQHLKRLGLDGWVKGQMQKAVLLDTARIVRKFLSLEP

SEQ ID NO: 27019 - protein, 1116 aa, Laothoe populi
MTTRNRVRCARLPSPSSSSSSASWASASEAPEPLPVTDASSQRDGLQSSPPTLTPARRRGRQHPPPVGLGPVGPCAPPMAPAAGGVVRRMRWTHSINENVMRAYFGATEGGTKLTAYRPKMLALFQDLEPTIDVSAQRLSDQVRYIQRRKLLDDAALDRLRVNLCVVQDVVQRTVDRPSVPTDDVNIELVDDLDNNVSSHDIQCLRGALESAILEFKLVPACLRPRLPRLPTHKRNLALIGALDSMLPEYMESSRDLVDTHAILYCAAIAACRVANVRFPNDYRAARDATHVPAWQRRIEERIDRTRTLISKLICFKAGNNRPKVMRFVTQAFLGSSIRPQDYRFCVTERIDLLKQKVYAWANRIRRYKKRWNRFQQNRAFQSDQKRVYRCWEHSQQGVGDGRLPDVRDMRTYWANIWSSPVSHTEGAWIGVVERACEAISPMETISISPDDVLRAVRPTQNWKSPGPDGLHNFWLKWFVTSHSRLAAQFQSALESGCLPTFMTTGVTHLLFKSGSTTDPKNYRPITCLPTIYKLFTSIIRFKIAYHIDNNNILFSAQTGCKIGSRGTKELLLIDMAICQQVRHNRRNLSAAWIDYKKAYDSVPHTWLMRVLDLYKIHSNLRTLLGACMRQWTTVLKYPGGAGPLDCDEPIKIDRGIFQGDSLSPLWFCLALNPLSTLLLDSGLGYRLRRGSVPISHLLYMDDLKLFAPKKSDLIELLKITKSFSNSISMEFGVDKCAVIHVGRGAVRVSDDVYLSETERLRSLSESETYKYLGMSEALGIMGADMKQSLKERFFCRLTKVLNSFLSGGNKIRAFNGWVMPVLMYSFGILKWTQTELDALDRRVRTLMTAHRMHHPRSSVMRLYIPRRCGGRGLLNAKDLHNREVRNLRDYFLHSDVDVHREVVKVDKGFTPLSLANENWRVPVVMSIGDRKGVWKSKELHGRFYRALNGPDVDQLASVSWLRFGDLFGETEGFVFAIMDEVVKTNNYRKYILKDGTVDICRACHRPRPGESIRHVISGCSYLANGEYLHRHNLVAKIIHQQLALRYHLVISEVPYYQYVPQPVLENGHTTLYWDRSIITDRTIVANKPDIVVIDRLARRAIFFFFLIFFFFFFFK

SEQ ID NO: 27020 - protein, 1193 aa, Deilephila porcellus
MMKRTRSKHARPTSTSSSSSASWASASDVFEVTPDIDASSQRDELQSSPPPPRPARRRGRPPPVVGLGPVGPSVPPTVPATGGVVRRMRWTQQINENVMRAYFGATKGGTHLTAFRAQMLSVFQVLEPTINVSSQRLSDQVRFIQRRKLLDDEILERLRTEACVVLDVVTPTTQRAADSPPSPAADIEVVDNLDNTVSPHEEQRLRRTLESAILEYKSIPASCRPRVPRLPTHRRNLALMGALDSMLATYMESSRDLVDTHSILYCAAVAACRVANVKFPNNFTITRDVTTVPAWQRRIEDRINWARTLIGKLTAFQNGNNRPRVMRFVTQAFSGTYISSRDYRLWVTERIDYYKQKIYAWANRIRRYRRRWDRFQQNRAFQRDEKRVYRCWERSPQSVVDGRLPSVHDMRSYWENIWSSSVSHTEADWFGVVERACECIPTMGAISISPEDVLFAIRPAQNWKSPGPDGLHNFWLIWFPSSHVRLAAQFQDALDGGSLPTFMTTGVTHLLYKSGSTTDPKNYRPITCLPTIYKLFTSILRAKISDHFTLNNILFSGQTGCKNGSRGTKELLLIDMTICQQARHNRRNLSAAWIDYKKAFDSVPHTWLRRVLNLYKIDTNLCTFLGSCMGQWTTVLRYPGGTVPPDCDEPIRIKRGIFQGDSLSLLWFCMALNPLSTLLLHSGLGYRLRRGSEPISHLLYMDDLKLFASKQSELIELLKITEKFSNSINMEFGVDKCVVIHVKRGKVTVSDDIQVSETVRLRSLSETETYKYLGMSESLGILSADVKQSLKERFFSRLTKVLNSFLSGGNKIRAFNGWVMPVLMYSFGILRWTQTELDALDRKVRTLLTAHRMHHPRSSVMRLYIPRRCGGRGILNAKVLHNREVCNLRDYFLHSDVGMHRAVVSVDKGLTPLSLANENWRKPLVMSVRDREEIWKSKELHGRFYRALHGPDVDRPASVSWLRFGNLFGETEGFIFAIMDEVIKTNNYRKYILKDGTVDICRACHRPGESIRHVISGCSYLANGEYLHRHNLVAKIIHQQIALRYKLVTPEVPYYQYVPQPVLENGHATLYWDRSVITDRTIVANKPDIVIIDRCARRAILVDVTVPHDDNLVKAEKDKLSKYSDLAHEVTDMWDVDSTIIVPIVVSAHGLIAKSLDQHLQRLSIGRWVKSQIQKAVLLDTARIVRRFLTLDP

SEQ ID NO: 27021 - protein, 1194 aa, Hemaris fuciformis
MNKKAKKTHARKTSPSSSSSSASWASASEIFEPPPGNDVSSQIDGLQSSPPPLRPARRGGRRPPPACLGPVGPRVLPTAPATGGVVRRMRWTTSINENVMRAYFGATEGGTKLTAYRSKMLALFQALEPTIDVSAQRLSDQVRYIQRRKALGDEVLDRLRADLRVVQENFDPAPTQQIVDPSPPPDTSCDINNLDNIVSSDDNQRLRRALEDAISEFAPIPASSRPCLPRLPTHRRNLALMGTLDSILPSYLESSRDLIDTHSMLYCAAVAACRVANVKFLNQVRTTPKVVTVPAWQRRIEHRIDWARTLISKLICFKEGNNRPKIMRFVTQAFSGTNIQPGDYRLCVTERIDFFKQKLYAWANRIRRYKKRSDRFRINRAFQSDQKRVYRCWEHSQQSVEDGRLPGASNMHTYWKSIWSSSVSHTEGPWISVVNQACKDISTMETILISPNDVSVAIRSTQNWKSPGADGLQNFWLKWFPSVHALLAAQFQEALNIGSLPTFMTTGITHLLYKSGTTTDPKNYRPITCLPTIYKLLTSIIRNKISIHIKNNSILFSGQTGCKLGSRGTKELLLIDMTICQQARQNRKNLSVAWIDYKKAYDSVPHTWLRRVFNLYKIDTTLCNFLEACMGQWTTVLKYPGTTCSSDCLEPIRIERGIFQGDSLSPLWFCLALNPLSTLLLDSGLGYCLRRGTEPISHLLYMDDLKLFASKSTELIELLKITQHFSNSINMEFGVDKCAVMHVKRGEIVVSDDIQVSETVRLRSLSEAETYKYLGMSESLGILSSDVKLSLKERFFSRLRKVLNSLLSGGNKIRAFNGWVMPVLMYSFGVLKWTQTELDALDRKIRTLLTAHRMHHPRSSVMRLYIPRRCGGRGLLNAKDLHNREICNLRDYFLHSDESMHGVLVMTDKGFTPLSLANENWRRPMVLGVSERREIWKSKELHGRFFRALNGSDVDQLASVTWLRFGNLFGETEGFVFAIMDEVIKTNNYRKYIMKDGTVDICRACHRPGESIRHVISGCSYLANGEYLHRHNLVAKIIHQQLALRYHLVTDEVPYYQYVPHPVLENSHATLYWDRSVITDRTIVANKPDIVIVDRLARRAMLVDVTIPHDDNLVKAEKDKISKYLDLAHEVTDMWDVDSTVIVPIVVTANGLIPKSLDQHLRRLSIDCWVKTQIQKAVLLDTARIVRRFLTLEP

SEQ ID NO: 27022 - protein, 1194 aa, Hyles vespertilio
MTTRASRRNAQMRSPSSSSSASWASASDVFEVTPDIDVSSQRDELQSSPPPPRPARRRGRPPPAVGLGPTGPSVPPTVLATGGVVRRMRWTHQMNENVMRAYFRATKGGTNLTAYRAQMLSMFQVLEPTVNVSSQRLSDQVRFIQRRKLLDDEALERLRTEACVALDVITPITQRAAETPSIPAADIELVDNLDNTVSPQDQQRLRRTLESAILEYKSIPASCRPRVPRLPTHRRNLALMGALDSIVSTYMESSRDLVDTHSILYCAAVAACRVANVKFPINNVTTTRDVATVPAWQHRIEDRINRARTLIGKLIAFRNGNNRQRVMRFVAQAFSGTNISPRDYGLWVTERIDYYKQKVYAWANRIRRYRKRWDRFQQNRTFQSDQKRVYRCWERSPQCVVDGRLPSVHDMRTYWTNIWSSSISHTEADWFGVVERACESIPIMEAISISPEDVLVAIRPTQNWKSPGPDGLHNFWLKWLPCSHARLAAQFQDALDGGSLPTFMTTGVTHLLYKSGSATDPKNYRPITCLPTTYKLFTSILRAKIANHFTSNNILFPGQTGCKSGSRGTKELLLIDMTICQQARQNRRNLSAAWIDYKKAFDSVPHTWLMRVLSLYKIDTNLCTFLGSCMGQWTTVLRYPGGMVSPDCDEPIRIKRGIFQGDSLSPLWFCMALNPLSTLLMDSGLGYRLRRGTEPISHLLYMDDLKLFASKQTELIELLKITEKFSNSINMEFCVDKCAIIHVKRGEVAVSDGVQISDAVRLRALSETETYKYLGMPEALGILSADVKQSVKERFFGRLAKVLNSLLSGGNKIRAFNGWVMPVLMYSFGILRWTQTELDALDRKVRTLLTAHRMHQPRSSVMRLYIPRRCGGRGILNAKDLHNREVCNLRDYFLHSDVDMHRVVVKIDKGLTPLSLANENWRKPLVMSTKDREEIWKSKELHGRFYRALHGPDVDRPASVSWLRFGNLFGETEGFVFAIMDEVIKTNNYRKYILKDGTVDICRACHRPGESIRHVISGCSYLANGEYLHRHNLVAKIIHQQIALRYGLVTLEMPYYQYVPQPVLENGHATLYWDRSIITDRTIVANKPDIVIIDRLARRAILVDVTIPHDVNLVKAEKDKLSKYLDLAHEVTDMWDVDSTVIVPIVVSAHGLMPKSFDQHLQRLSIGRWVKSQIQKAVLLDTARIVRRFLTLDP

SEQ ID NO: 27023 - protein, 1197 aa, Hyles vespertilio
MIKRKARTTQNARIRSPSSSSSASWASASDVFEVTPDNDALSLRDELQSSPPPPRPARRRGQPPPAVGLGPVGPSVPPTVPATGGVVRRMRWTREINENVMRAYLGATKGGTNLTAYRAKMLSLFQALEPTIDVSSQRLSDQVRFIQRRKLLDDDTLERLRTDLCVVQDDNVSPVSGDQAVGPTPTPVADFELTDNLDDNVSPQDKQHLRGALVRAISDFVSVSASCRPRLLRLPTHRRNLALMGALDSMLPTYLESSRDLVDTHSILYCAAVAACRVANVQFPKEHRATRDVAAVPAWQLRIEDRINRARTLIGKLISFSEGNSRPRIMRFVTQAFSGTNISPQNYRLCVTERIDFYKQKVYAWANRIRRYRRRWDRFQQNRMFQSDQKRVYRCWEDSSQGVVDGRLPGAHEMREYWTNIWSSPVSHTEASWFSVVDRACESIPAMETILITSEDVQTAIRRTQNWKSPGPDGLHNFWLKWFPSSHARLAAQFQDALEAGSLPAFMTKGVTHLLFKSGCTTEPKNYRPITCLPTIYKILTSIIRSKITDHITSNQILFPGQTGCMNGSRGTKELLLINMTICQQARHNRRNLSAAWIDYKKAYDSVPHTWLMRVLNLYKINTNLCNFLGSCMGQWTTVLRYPGGTAPPDCDEPIRIKRGIFQGDSLSPLWFCMALNPLSTLLLDSGLGYRLRRGSEPISHLLYMDDLKLFASKQTELVELLKITERFSNSINMEFGVDKCAVIHVKRGEVAVSDDIQVSETVRLRPLSVTETYKYLGMPEALGIMGANVKQSLKERFFSRLTKVLNSFLSGGNKIRAFNGWVMPVLMYSFGILKWTQTELDALDRKVRTLLTAHRMHHPRSSVMRLYIPRRCGGRGILNAKDLHNHEVCNLRDYFLHSDVDMHGVVVMVDKGFTPLSLAIENWRKPLVVGTKDREDIWKSKELHGRFYRALHGPDVDRLASVSWLRFGNLFGETEGFVFAIMDEVIKTNNYRKYILKDGTVDICRACHRPGESIRHVISGCSYLANGEYLHRHNLVAKIIHQQIALRYGLVTPEVPYYQYVPQPVLENGHATLYWDRSIITDRTILANKPDIVIIDRLARRAILVDVTIPHDDNLVKAEKDKMSKYLDLAHEVTDMWDVDSTIIVPIVVSAHGLIPKSLDQHLQRLSIGVWVRSQIQKAVLLDTARIVRRFLTLGS

SEQ ID NO: 27024 - protein, 1197 aa, Hyles vespertilio
MFHNKARKKRNAHLTSPSSSSSASWASASDVFEVTPDNDASSQHGELQSSPPPPRPAQRRGRPPPAVGLGPVGPSVPPTVPATGGVVRRMRWTREINENVMRAYFGATNGGINLTAYRVKKLSLFQALEPTVDVSSQRLSDQVRFIQRRKLLDDDTLERLRTDLCFVQEDHVSPVSGDQAAGPTPTPVADFELTDNLDDNVSPQDKQQLRGALECAILEFASLSASCRPRLPRLPTHRRNLALMGALDSMLPTYLESSRDLVDTHSILYCAAVAACRVANVQFPKEYRATRGVVTVPAWQRRIEDRINRARTLIGKLISFKEGNSRPKIMRFVTQAFSGTNTSPRNYRLCVTERIDFFKQKVYAWANRIRRYRRRWDRFQQNRKFQTDQKRVYRCWENPPQGVVDGRLPSAHEMREYWTNIWSSPVSHTEASWFSVVDRACEAIPAMETILINPEDVLTAIRQTQNWKSPGPDGLHNFWLKWFPSSHARLAVQFQDALERGSLPAFMTTGVTHLLFKSGCTTEPKNYRPITCLPTIYKVLTSIIRSKITDHINSNQILFSGQTGCMNGSRGTKELLLINMTICQQARHNRRNLSAAWIDYKKAYDSVPHTWLMRVLNLYKINTNLCNFLGSCMGQWTTVLRYPGGTVPPDCDEPIRIKRGIFQGDSLSPLWFCMALNPLSTLLLDSGLGYRLRRGSEPISHLLYMDDLKLFASKQTELIELLKITDIFSKSINMDFGVDKCAVIHVKRGEVAVSDDILVSETVRLRSLSVTETYKYLGMPEALGIMGADVKRSLKERFCSRLTKVLNSFLSGGNKIRAFNGWVMPVLMYSFGILKWTQTELDALDRKVRTLLTAHRMHHPRSSVMRLYIPRRCGGRGILNAKDLHNREVCNLRDYFLHSDVDMHRVVVMVDKGFTPLYLAIENWRKPLVVGIKDREDIWKSKELHGRFYRALHGPDVDRLASVSWLRFGNLFGETEGFVFAIMDEVIKTNNYRKYILKDGTVDICRACHRPGESIRHVISSCSYLANGEYLHRHNLVAKIIHQQIALRYGLVTPEVPYYQYVPQPVLENGHATLYWDRSIITDRTIPANKPDIVIIDRLARRAILVDVTIPHDDNLVKAEKDKMSKYLDLAHEVADMWDVDSTIIVPIVVSAHGLIPKSLDQHLQRLSIGCWVRSQIQKAVLLDTARIVRRFLTLGS

SEQ ID NO: 27025 - protein, 1076 aa, Hyles vespertilio
MLSMFQVLEPTVNVSSQRLSDQVRFIQRRKLLDDEALERLRTEACVALDVITPITQRAAETPSIPAADIELVDNLDNTVSPQDQQRLRRTLESAILEYKSIPASCRPRVPRLPTHRRNLALMGALDSIVSTYMESSRDLVDTHSILYCAAVAACRVANVKFPINNVTTTRDVATVPAWQRRIEDRINRARTLIGKLIAFRNGNNRQRVMRFVAQAFSGTNISPRDYGLWVTERIDYYKQKVYAWANRIRRYRKRWDRFQQNRTFQSDQKRVYRCWERSPQCVVDGRLPSVHDMRTYWTNIWSSSISHTEADWFGVVERACESIPIMEAISISPEDVLVAIRPTQNWKSPGPDGLHNFWLKWLPCSHARLATQFQDALDGGSLPTFMTTGVTHLLYKSGSATDPKNYRPITCLPTTYKLFTSILRAKIANHFTSNNILFPGQTGCKSGSRGTKELLLIDMTICQQARQNRRNLSAAWIDYKKAFDSVPHTWLMRVLSLYKIDTNLCTFLGSCMGQWTTVLRYPGGMVSPDCDEPIRIKRGIFQGDSLSPLWFCMALNPLSTLLVDSGLGYRLRRGTEPISHLLYMDDLKLFASKQTELIELLKITEKFSNSINMDFCVDKCAIIHVKRGEVAVSDGVQISDAVRLRALSETETYKYLGMPEALGILSADVKQSVKERFFGRLAKVLNSLLSGGNKIRAFNGWVMPVLMYSFGILRWTQTELDALDRKVRTLLTAHRMHHPRSSVMRLYIPRRCGGRGILNAKDLHNREVCNLRDYFLHSDVDMHRVVVKIDKGLTPLSLANENWRKPLVMSTKDREEVWKSKELHGRFYRALHGPDVDRPASVSWLRFGNLFGETEGFVFAIMDEVIKTNNYRKYILKDGTVDICRACHRPGESIRHVISGCSYLANGEYLHRHNLVAKIIHQQIALRYGLLTLEMPYYQYVPQPVLENGHATLYWDRSIITDRTIVANKPDIVIIDRLARRAILVDVTIPHDVNLVKAEKDKLSKYLDLAHEVTDMWDVDSTVIVPIVVSAHGLMPKSFDQHLQRLSIGRWVKSQIQKAVLLDTARIVRRFLTLDP

SEQ ID NO: 27026 - protein, 1197 aa, Hyles vespertilio
MINNKARKKRNAHLTSPSSSSSASWASASDVFEVTSDNDASSQHGELQSSPPPPRPARRRGRPPPAVGLGPVGPSVPPTVPATGGVVRRMRWTREINENVMRAYFGATKGGINLTAYRAKMLSLFQALEPTVDVSSQRLSDQVRFIQRRKLLDDDTLERLRTDLCFVQDDHVSPVSGDQAAGPTPTPVADFELTDNLDDNVSPQAKQQLRGALECAILEFASLSASCRPRLPRLPTHRRNLALMGALDSMLTTYLESSRDLVDTHSILYCAAVAACRVANIKFPNEYKATRGVVIVPAWQRRIEDRINRARTLIGKLISFKEGNSRPKIMRFVTQAFSGTNTSPRNYRLCVTERIDFFKQKVYAWANRIRRYRRRWDRFQQNRKFQTDQKSVYRCWENPPQGVVDGRLPSAHEMREYWTNIWSSPVSHTEASWFSVVDRACEAIPAMETILISPEDVLTAIRQTQNWKSPGPDGLHNFWLKWFPSSHARLAAQFQNALERGSLPTFMTTGVTHLLFKSGCTTEPKNYRPITCLPTIYKVLTSIIRSKITDHINSNQILFSGQTGCMNGSRGTKELLLINMTICQQARHNRRNLSAAWIDYKKAYDSVPHTWLMRVLNLYKINTNLCNFLGSCMGQWTTVLRYPGGTVPPDCDEPIRIKRGIFQGDSLSPLWFCMALNPLSTLLLDSGLGYRLRRGSEPISHLLYMDDLKLFASKQTELIELLKITDRFSKSINMDFGVDKCAVIHVKRGEVAVSDDILVSETVRLRSLSVTETYKYLGMPEALGIMGADVKRSLKERFFSRLTKVLNSFLSGGNKIRAFNGWVMPVLIYSFGILKWTQTELDALDRKVRTLLTAHRMHHPRSSVMRLYIPRRCGGRGILNAKDLHNREVCNLRDYFLHSDVDMHRVVVMVDKGFTPLSLAIENWRKPLVVGIKDREDIWKSKELHGRFYRALHGPDVDRLSSVSWLRFGNLFGETEGFVFAIMDEVIKTNNYRKYILKDGTVDICRACHRPGESIRHVISGCSYLANGEYLHRHNLVAKIIHQQIALRYGLVTPEVPYYQYVPQPVLENGHATLYWDRSIITDRTILANKPDIVIIDRLARRAILVDVTIPHDDNLVKAEKDKMSKYLDLAHEVTDMWDVDSTIIVPIVVSAHGLIPKSLDQHLQRLSIGCWVRSQIQKAVLLDTARIVRRFLTLGS

SEQ ID NO: 27027 - protein, 1197 aa, Hyles vespertilio
MFHNKARKKRNAHLTSPSSSSSASWASASDVFEVTPDNDASSQHGELQSSPPPPRPAQRRGRPPPAVGLGPVGPSVPPTVPATGGVVRRMRWTREINENVMRAYFGATNGGINLTAYRVKMLSLFQALEPTVDVSSQRLSDQVRFIQRRKLLDDDTLERLRTDLCFVQEDHVSPVSGDQAAGPTPTPVADFELTDNLDDNVSPQDKQQLRGALECAILEFASLSASCRPRLPRLPTHRRNLALMGALDSMLPTYLESSRDLVDTHSILYCAAVAACRVANVQFPKEYRATRGVVTVPAWQRRIEDRINRARTLIGKLISFKEGNSRPKIMRFVTQAFSGTNTSPRNYRLCVTERIDFFKQKVYAWANRIRRYRRRWDRFQQNRKFQTDQKRVYRCWENPPQGVVDGRLPSAHEMREYWTNIWSSPVSHTEASWLSVVDRACEAIPAMETILINPEDVLTAIRQTQNWKSPGPDGLHNFWLKWFPSSHVRLAAQFQDALEAESLPAFMTTGVTHLLFKSGCTTEPKNYRPITCLPTIYKILTSIIRSKITDHITSNQILFPGQTGCMNGSRGTKELLLINMTICQQARHNRRNLSAAWIDYKKAYDSVPHTWLMRVLNLYKINTNLCNFLGSCMGQWTTVLRYPGGTVPPDCDEPIRIKRGIFQGDSLSPLWFCMALNPLSTLLLDSGLGYRLRRGSEPISHLLYMDDLKLFASKQTELIELLKITERFSNSINMDFGVDKCAVIHVKRGEVAVSDDILVSETVRLRSLSVTETYKYLGMPEALGIMGADVKRSLKERFFSRLTKVLNSFLSGGNKIRAFNGWVMPVLIYSFGILKWTQTELDALDRKVRTLLTAHRMHHPRSSVMRLYIPRRSGGRGILNAKDLHNREVCNLRDYFLHSDVDMHRVVVMVDKGFTPLSLAIENWRKPLVVGIKDREDIWKSKELHGRFYRALHGPDVDRLASVSWLRFGNLFGETEGFVFAIMDEVIKTNNYRKYILKDGTVDICRACHRPGESIRHVISGCSYLANGEYLHRHNLVTKIIHQQIALRYGLVTPEVPYYQYVPQPVLENGHATLYWDRSIITDRTILANKPDIVIIDRLARRAILVDVTIPHDDNLVKAEKDKMSKYLDLAHEVTDMWDVDSTIIVPIVVSAHGLIPKSLDQHLQRLSIGVWVRSQIQKAVLLDTARIVRRFLTLGS

SEQ ID NO: 27028 - protein, 1194 aa, Hyles vespertilio
MTTRASRRNAQMRSPSSSSSASWASASDVFEVTPDIDVSSQRDELQSSPPPPRPARRRGRPPPAVGLGPTGPSVPPTVLATGGVVRRMRWTHQMNENVMRAYFRATKGGTNLTAYRAQMLSMFQVLEPTVNVSSQRLSDQVRFIQRRKLLDDEALERLRTEACVALDVITPITQRAAETPSIPAADIELVDNLDNTVSPQDQQRLRRTLESAILEYKSIPASCRPRVPRLPTHRRNLALMGALDSIVSTYMESSRDLVDTHSILYCAAVAACRVANVKFPINNVTTTRDVATVPAWQRRIEDRINRARTLIGKLIAFRNGNNRQRVMRFVAQAFSGTNISPRDYGLWVTERIDYYKQKVYAWANRIRRYRKRWDRFQQNRTFQSDQKRVYRCWERSPQCVVDGRLPSVHDMRTYWTNIWSSSISHTEADWFGVVERACESIPIMEAISISPEDVLVAIRPTQNWKSPGPDGLHNFWLKWLPCSHARLAAQFQDALDGGSLPTFMTTGVTHLLYKSGSATDPKNYRPITCLPTTYKLFTSILRAKIANHFTSNNILFPGQTGCKSGSRGTKELLLIDMTICQQARQNRRNLSAAWIDYKKAFDSVPHTWLMRVLSLYKIDTNLCTFLGSCMGQWTTVLRYPGGMVSPDCDEPIRIKRGIFQGDSLSPLWFCMALNPLSTLLVDSGLGYRLRRGTEPISHLLYMDDLKLFASKQTELIELLKITEKFSNSINMEFCVDKCAIIHVKRGEVAVSDGVQISDAVRLRALSETETYKYLSMPEALGILSADVKQSVKERFFGRLAKVLNSLLSGGNKIRAFNGWVMPVLMYSFGILRWTQTELDALDRKVRTLLTAHRMHHPRSSVMRLYIPRRCGGRGILNAKDLHNREVCNLRDYFLHSDVDMHRVVVKIDKGLTPLSLANENWRKPLVMSTKDREEVWKSKELHGRFYRALHGPDVDRPASVSWLRFGNLFGETEGFVFAIMDEVIKTNNYRKYILKDGTVDICRACHRPGESIRHVISGCSYLANGEYLHRHNLVAKIIHQQIALRYGLVTLEMPYYQYVPQPVLENGHATLYWDRSIITDRTIVANKPDIVIIDRLARRAILVDVTIPHDVNLVKAEKDKLSKYLDLAHEVTDMWDVDSTVIVPIVVSAHGLMPKSFDQHLQRLSIGRWVKSQIQKAVLLDTARIVRRFLTLDP

SEQ ID NO: 27029 - protein, 1197 aa, Hyles vespertilio
MFHNKARKKRNAHLTSPSSSSSASWASASDVFEVTPDNDASSQHGELQSSPPPPRPAQRRGRPPPAVGLGPVGPSVPPTVPATGGVVRRMRWTREINENVMRAYFGATNGGINLTAYRVKMLSLFQALEPTVDVSSQRLSDQVRFIQRRKLLDDDTLERLRTDLCFVQEDHVSPVSGDQAAGPTPTPVADFELTDNLDDNVSPQDKQQLRGALECAILEFASLSASCRPRLPRLPTHRRNLALMGALDSMLPTYLESSRDLVDTHSILYCAAVAACRVANVQFPKEYRATRGVVTVPAWQRRIEDRINRARTLIGKLISFKEGNSRPKIMRFVTQAFSGTNTSPRNYRLCVTERIDFFKQKVYAWANRIRRYRRRWDRFQQNRKFQTDQKRVYRCWENPPQGVVDGRLPSAHEMREYWTNIWSSPVSHTEASWFSVVDRACEAIPAMETILINPEDVLTAIRQTQNWKSPGPDGLHNFWLKWFPSSHARLAVQFQDALERGSLPAFMTTGVTHLLFKSGCTTEPKNYRPITCLPTIYKVLTSIIRSKITDHINSNQILFSGQTGCMNGSRGTKELLLINMTICQQARHNRRNLSAAWIDYKKAYDSVPHTWLMRVLNLYKINTNLCNFLGSCMGQWTTVLRYPGGTVPPDCDEPIRIKRGIFQGDSLSPLWFCMALNPLSTLLLDSGLGYRLRRGSEPISHLLYMDDLKLFASKQTELIELLKITERFSNSINMDFGVDKCAVIHVKRGEIAVSDDILVSETVRLRSLSVTETYKYLGMPEALGIMGADVKRSLKERFFSRLTKVLNSFLSGGNKIRAFNGWVMPVLIYSFGILKWTQTELDALDRKVRTLLTAHRMHHPRSSVMRLYIPRRCGGRGILNAKDLHNREVCNLRDYFLHSDVDMHRVVVMVDKGFTPLSLAIENWRKPLVVGIKDREDIWKSKELHGRFYRALHGPDVDRLASVSWLRFGNLFGETEGFVFAIMDEVIKTNNYRKYILKDGTVDICRACHRPGESIRHVISGCSYLANGEYLHRHNLVTKIIHQQIALRYGLVTPEVPYYQYVPQPVLENGHATLYWDRSIITDRTILANKPDIVIIDRLARRAILVDVTIPHDDNLVKAEKDKMSKYLDLAHEVTDMWDVDSTIIVPIVVSAHGLIPKSLDQHLQRLSIGVWVRSQIQKAVLLDTARIVRRFLTLGS

SEQ ID NO: 27030 - protein, 954 aa, Hyles vespertilio
MGALDSMLPTYLESSRDLVDTHSILYCAAVAACRVANVQFPKEYRATRGVVTVPAWQRRIEDRINRARTLIGKLISFKEGNSRPKIMRFVTQAFSGTNTSPRNYRLCVTERIDFFKQKVYAWANRIRRYRRRWDRFQQNRKFQTDQKRVYRCWENPPQGVVDGRLPSAHEMREYWTNIWSSPVSHTEASWFSVVDRACEAIPAMETILINPEDVLTAIRQTQNWKSPGPDGLHNFWLKWFPSSHARLAVQFQDALERGSLPAFMTTGVTHLLFKSGCTTEPKNYRPITCLPTIYKVLTSIIRSKITDHINSNQILFSGQTGCMNGSRGTKELLLINMTICQQARHNRRNLSAAWIDYKKAYDSVPHTWLMRVLNLYKINTNLCNFLGSCMGQWTIVLRYPGGTVPPDCNEPIRIKRGIFQGDSLSPLWFCMALNPLSTLLLDSGLGYRLRRGSEPISHLLYMDDLKLFASKQTELIELLKITERFSNSINMDFGVDKCAVIHVKRGEVAVSDDILVSETVRLRSLSVTETYKYLGMPEALGIMGADVKRSLKERFFSRLTKVLNSFLSGGNKIRAFNGWVMPVLIYSFGILKWTQTELDALDRKVRTLLTAHRMHHPRSSVMRLYIPRRCGGRGILNAKDLHNREVCNLRDYFLHSDVDMHRVVVMVDKGFTPLSLAIENWRKPLVVGIKDREDIWKSKELHGRFYRALHGPDVDRLASVSWLRFGNLFGETEGFVFAIMDEVIKTNNYRKYILKDGTVDICRACHRPGESIRHVISGCSYLANGEYLHRHNLVTKIIHQQIALRYGLVTPEVPYYQYVPQPVLENGHATLYWDRSIITDRTILANKPDIVIIDRLARRAILVDVTIPHDDNLVKAEKDKMSKYLDLAHEVTDMWDVDSTIIVPIVVSAHGLIPKSLDQHLQRLSIGVWVRSQIQKAVLLDTARIVRRFLTLGS

SEQ ID NO: 27031 - protein, 954 aa, Hyles vespertilio
MGALDSMLPTYLESSRDLVDTHSILYCAAVAACRVANVQFPKEHRATRDVAAVPAWQLRIEDRINRARTLIGKLISFSEGNSRPRIMRFVTQAFSGTNISPQNYRLCVTERIDFYKQKVYAWANRIRRYRRRWDRFQQNRMFQSDQKRVYRCWEDSSQGVVDGRLPGAHEMREYWTNIWSSPVSHTEASWFSVVDRACESIPAMETILITSEDVQTAIRRTQNWKSPGPDGLHNFWLKWFPSSHARLAAQFQDALEAGSLPAFMTKGVTHLLFKSGCTTEPKNYRPITCLPTIYKILTSIIRSKITDHITSNQILFPGQTGCMNGSRGTKELLLINMTICQQARHNRRNLSAAWIDYKKAYDSVPHTWLMRVLNLYKINTNLCNFLGSCMGQWTTVLRYPGGTAPPDCDEPIRIKRGIFQGDSLSPLWFCMALNPLSTLLLDSGLGYRLRRGSEPISHLLYMDDLKLFASKQTELVELLKITERFSNSINMEFGVDKCAVIHVKRGEVAVSDDIQVSETVRLRPLSVTETYKYLGMPEALGIMGANVKQSLKERFFSRLTKVLNSFLSGGNKIRAFNGWVMPVLMYSFGILKWTQTELDALDRKVRTLLTAHRMHHPRSSVMRLYIPRRCGGRGILNAKDLHNREVCNLRDYFLHSDVDMHGVVVMVDKGFTPLSLAIENWRKPLVVGTKDREDIWKSKELHGRFYRALHGPDVDRLASVSWLRFGNLFGETEGFVFAIMDEVIKTNNYRKYILKDGTVDICRACHRPGESIRHVISGCSYLANGEYLHRHNLVAKIIHQQIALRYGLVTPEVPYYQYVPQPVLENGHATLYWDRSIITDRTILANKPDIVIIDRLARRAILVDVTIPHDDNLVKAEKDKMSKYLDLAHEVTDMWDVDSTIIVPIVVSAHGLIPKSLDQHLQRLSIGVWVRSQIQKAVLLDTARIVRRFLTLGS

SEQ ID NO: 27032 - protein, 954 aa, Hyles vespertilio
MGALDSMLTTYLESSRDLVDTHSILYCAAVAACRVANIKFPNEYKATRGVVIVPAWQRRIEDRINRARTLIGKLISFKEGNSRPKIMRFVTQAFSGTNTSPRNYRLCVTERIDFFKQKVYAWANRIRRYRRRWDRFQQNRKFQTDQKSVYRCWENPPQGVVDGRLPSAHEMREYWTNIWSSPVSHTEASWFSVVDRACEAIPAMETILISPEDVLTAIRQTQNWKSPGPDGLHNFWLKWFPSSHARLAAQFQNALERGSLPTFMTTGVTHLLFKSGCTTEPKNYRPITCLPTIYKVLTSIIRSKITDHINSNQILFSGQTGCMNGSRGTKELLLINMTICQQARHNRRNLSAAWIDYKKAYDSVPHTWLMRVLNLYKINTNLCNFLGSCMGQWTTVLRYPGGTVPPDCDEPIRIKRGIFQGDSLSPLWFCMALNPLSTLLLDSGLGYRLRRGSEPISHLLYMDDLKLFASKQTELIELLKITERFSNSINMDFGVDKCAVIHVKRGEVAVSDDILVSETVRLRSLSVTETYKYLGMPEALGIMGADVKRSLKERFFSRLTKVLNSFLSGGNKIRAFNGWVMPVLIYSFGILKWTQTELDALDRKVRTLLTAHRMHHPRSSVMRLYIPRRCGGRGILNAKDLHNREVCNLRDYFLHSDVDMHRVVVMVDKGFTPLSLAIENWRKPLVVGIKDREDIWKSKELHGRFYRALHGPDVDRLASVSWLRFGNLFGETEGFVFAIMDEVIKTNNYRKYILKDGTVDICRACHRPGESIRHVISGCSYLANGEYLHRHNLVAKIIHQQIALRYGLVTPEVPYYQYVPQPVLENGHATLYWDRSIITDRTILANKPDIVIIDRLARRAILVDVTIPHDDNLVKAEKDKMSKYLDLAHEVTDMWDVDSTIIVPIVVSAHGLIPKSLDQHLQRLSIGCWVRSQIQKAVLLDTARIVRRFLTLGS

SEQ ID NO: 27033 - protein, 1111 aa, Dendrolimus punctatus
MRWTQELNECVMRAYYEATEGGTNLTSYRGRLLSLFQTLQPASAVTAQRLSDQVRAIQRLHLLDESTLDRLRNAVRINRESTDTPQPTSPAMPADSQGTVNFTIDDVSDSIAVGNVSIQINEQLRRTLEHSIQEFRDQPILNRPRVPKLPLHRNNLLLMGALDCLLAPYFGSSADLVDTHSILYCGAVAVCRVAGVKFPNTQPTRPASGKPAWQIRVERRIDRARVLIAKLICFRAGNCRPRVVRFVAQAFTGTNVSPSEYMARATERIDFWKQKVYAWANRIRRYKERADRYFLNRTFQSEEKRVYRGWEKSRDSVADRQIPNIDAMASFWRSIWSMPVSHTEGDWIELVKQSCDQVPDMEPITIEPLDVGNAIRSAHNWKSPGPDGLHNFWIKWFKSSHSCLANQFQEAVDRGSLPTFMTTGVTHLLFKSGCTTEPKNYRPITCLPTIYKLLTSILGKKLSNYFYNNNILAITQNGCKAGSRGTKELLLIDTTVSQQARRNRRNLSVAWIDYKKAYDSVPHTWLMRVLELYKVDATLRTFLQACMRQWVTHLKLPGGRGPSLPEGAINIERGIFQGDSLSPLWFCLALNPLSTLLESSKLGYRFRRGGEIMSHLLYMDDLKLFASNEPDLIELLKTTERFSKSINMEFGIEKCAVMHVRRGKVVNSPNLQLSENMSLKSLSETETYKYLGMSESLGIADADVKQTVKDRFFCRLRKVLTSLLSGGNKVRAFNSWVMPVLAYSFGILRWTQTELDALDRRVRYLLTKHRMHHPRSSVMRLYIPRRCGGRGFLNAKDLHNREVNNLRTYFLKIDVGLHKDVVAVDKGLTTLSLANENWCNLAVLSASDRINVWKSKALHGRFYRALTGPDIDLSASVNWLRFGNLFGETEGFVFAIMDEVIKTNNYRKYILKDGTLDICRACHRPGESLRHIVSGCSHLSNGEYLHRHNLVARIIHQQLALRYGLVETEVPYYQYSPEPVLENSRATLYWDRSIITDRTIVANKPDIVIIDRSARRAILVDISIPHDDNLVKKEKEKLSKYLDLAHEVTAMWRLESTSIVPIVVTVNGLIAKSLDRHLERLSLGSWVKGQIQKAALLDTARIVRRFLSLEP

SEQ ID NO: 27034 - protein, 850 aa, Dendrolimus punctatus
MARATERMDFWKQKVYAWANRIRRYKERADRYFLNRTFQSEEKRVYRGWEKSRDSVADRQIPNIDAMASFWRSIWSMPVSHTEGDWIELVKQSCDQVPDMEPITIEPLDVGNAIRSAHNWKSPGPDGLHNFWIKWFKSSHSCLANQFQEAVDRGSLPTFMTTGVTHLLFKSGCTTEPKNYRPITCLPTIYKLLTSILGKKLSNYFYNNNILAITQNGCKAGSRGTKELLLIDTTVSQQARRNRRNLSVAWIDYKKAYDSVPHTWLMRVLELYKVDATLRTFLQACMRQWVTHLKLPGGRGPSLPEGAINIERGIFQGDSLSPLWFCLALNPLSTLLESSKLGYRFRRGGEIMSHLLYMDDLKLFASNEPDLIELLKTTERFSKSINMEFGIEKCAVMHVRRGKVVNSPNLQLSENMSLKSLSETETYKYLGMSESLGIADADVKQTVKDRFFYRLRKVLTSLLSGGNKVRAFNSWVMPVLAYSFGILRWTQTELDALDRRVRCLLTKHRMHHPRSSVMRLYISRRCGGRGFLNAKDLHNREVNNLRAYFLKMDVGLHKDVVAVDKGLTTLSLANENWCNLAVLSASDRINVWKSKALHGRFYRALTGPDVDLSASVNWLRFGNLFGETEGFVFAIMDEVIKTNNYRKYILKDGTLDICRACHRPGESLRHIVSGCSHLSNGEYLHRHNLVARIIHQQLALRYGLVETEVPYYQYSPEPVLENSRATLYWDRSIITDRTIVANKPDIVIIDRSARRAILVDISIPHDDNLVKKEKEKLSKYLDLAHEVTAMWRLESTSIVPIVVTVNGLIAKSLDRHLERLSLGSWVKGQIQKAALLDTARIVRRFLSLEP

SEQ ID NO: 27035 - protein, 1077 aa, Hyles vespertilio
MLSLFQALEPTVDVSSQRLSDQVRFIQRRKLLDDDTLERLRTDLCFVQDDHVSPVSGDQAAGPTPTPVADFELTDNLDDNVSPQAKQQLRGALECAILEFSSLSASCRPRLPRLPTHRRNLALMGALDSMLTTYLESSRDLVDTHSILYCAAVAACRVANIKFPNEYKATRGVVIVPAWQRRIEDRINRARTLIGKLISFKEGNSRPKIMRFVTQAFSGTNTSPRNYRLCVTERIDFFKQKVYAWANRIRRYRRRWDRFQQNRKFQTDQKSVYRCWENPPQGVVDGRLPSAHEMREYWTNIWSSPVSHTEASWFSVVDRACEAIPAMETILISPEDVLTAIRQTQNWKSPGPDGLHNFWLKWFPSSHARLAAQFQNALERGSLPTFMTTGVTHLLFKSGCTTEPKNYRPITCLPTIYKVLTSIIRSKITDHINSNQILFSGQTGCMNGSRGTKELLLINMTICQQARHNRRNLSAAWIDYKKAYDSVPHTWLMRVLNLYKINTNLCNFLGSCMGQWTTVLRYPGGTVPPDCDEPIRIKRGIFQGDSLSPLWFCMALNPLSTLLLDSGLGYRLRRGSEPISHLLYMDDLKLFASKQTELIELLKITERFSNSINMDFGVDKCAVIHVKRGEVAVSDDILVSETVRLRSLSVTETYKNLGMPEALGIMGADVKRSLKERFFSRLTKVLNSFLSGGNKIRAFNGWVMPVLIYSFGILKWTQTELDALDRKVRTLLTAHRMHHPRSSVMRLYIPRRCGGRGILNAKDLHNREVCNLRDYFLHSDVDMHRLVVMVDKGFTPLSLAIENWRKPLVVGIKDREDIWKSKELHGRFYRALHGPDVDRLASVSWLRFGNLFGETEGFVFAIMDEVIKTNNYRKYILKDGTVDICRACHRPGESIRHVISGCLYLANGEYLHRHNLVAKIIHQQIALRYGLVTPEVPYYQYVPQPVLENGHATLYWDRSIITDRTILANKPDIVIIDRLARRAILVDVTIPHDDNLVKAEKDKMSKYLDLAHEVTDMWNVDSTIIVPIVVSAHGLIPKSLDQHLQRLSIGCWVRSQIQKAVLLDTARIVRRFLTLGS

SEQ ID NO: 27036 - protein, 1197 aa, Hyles vespertilio
MFHNKARKKRNAHLTSPSSSSSASWASASDVFEVTPDNDASSQHGELQSSPPPPRPAQRRGRPPPAVGLGPVGPSVPPTVPATGGVVRRMRWTREINENVMRAYFGATNGGINLTAYRVKMLSLFQALEPTVDVSSQRLSDQVRFIQRRKLLDDDTLERLRTDLCFVQEDHVWPVSGDQAAGPTPTPVADFELTDNLDDNVSPQDKQQLRGALECAILEFASLSASCRPRLPRLPTHRRNLALMGALDSMLPTYLESSRDLVDTHSILYCAAVAACRVANVQFPKEYRATRGVVTVPAWQRRIEDRINRARTLIGKLISFKEGNSRPKIMRFVTQAFSGTNTSPRNYRLCVTERIDFFKQKVYAWANRIRRYRRRWDRFQQNRKFQTDQKRVYRCWENPPQGVVDGRLPSAHEMREYWTNIWSSPVSHTEASWLSVVDRACEAIPAMETILINPEDVLTAIRQTQNWKSPGPDGLHNFWLKWFPSSHARLAVQFQDALERGSLPAFMTTGVTHLLFKSGCTTEPKNYRPITCLPTIYKVLTSIIRSKITDHINSNQILFSGQTGCMNGSRGTKELLLINMTICQQARHNRRNLSAAWIDYKKAYDSVPHTWLMRVLNLYKINTNLCNFLGSCMGQWTTVLRYPGGTVPPDCDEPIRIKRGIFQGDSLSPLWFCMALNPLSTLLLDSGLGYRLRRGSEPISHLLYMDDLKLFASKQTELIELLKITERFSNSINMDFGVDKCAVIHVKRGEVAVSDDILVSETVRLRSLSVTETYKYLGMPEALGIMGADVKRSLKERFFSRLTKVLNSFLSGGNKIRAFNGWVMPVLIYSFGILKWTQTELDALDRKVRTLLTAHRMHHPRSSVMRLYIPRRCGGRGILNAKDLHNREVCNLRDYFLHSDVDMHRVVVMVDKGFTPLSLAIENWRKPLVVGIKDREDIWKSKELHGRFYRALHGPDVDRLASVSWLRFGNLFGETEGFVFAIMDEVIKTNNYRKYILKDGTVDICRACHRPGESIRHVISGCSYLANGEYLHRHNLVTKIIHQQIALRYGLVTPEVPYYQYVPQPVLENGHATLYWDRSIITDRTILANKPDIVIIDRLARRAILVDVTIPHDDNLVKAEKDKMSKYLDLAHEVTDMWDVDSTIIVPIVVSAHGLIPKSLDQHLQRLSIGVWVRSQIQKAVLLDTARIVRRFLTLGS

SEQ ID NO: 27037 - protein, 1082 aa, Eilema sororculum
MLTRAQARNRNAQTTSPDSSLSSAAQPPAMEPAASSSSSSDEFFSPPTSPTPVRRPGRGRPPTCLGPRRPPASNRAPAAGGNVHRMRWTNSINENVMRAYFAATEGGTNLSAYRTRMLPLFQALEPSINTSAQRLSDQVRVIQRNRMLNETVLETLRQECLRNICVTPAPAPAPASTAEINNDTCVAPDDTPFPVSIQYNEEIKEALECALREYRSVPVHVRPRLPRLPIHRRNIALVSALDSLLPRYLENSENLGDTHSILYCTAVAACRMAGAKFPIKDPAIRPKSAIPAWQCRIERRVAEARVLIGKLICFRSGNTRPRVMRYVTRAFAGTDISPQDYTSRVTERIDFLKQKVYAWANRIRRYKRRVDRYTVNHMFQRDQRWVYRSWERTDESVDDVRRPDAEATNAFWRSIWSVPVSHTEGDWMREVEIACETIPEMEEIYIDATDVDCAVHSLSNWKSPGPDGLHNFWLKWLRSSHVVLASQFQSAIESGTLPGFMTTGVTHLLHKTGSTLEPNNYRPITCLPTVYKLLTSILRAKINNHINNNSIMCASQNGCRNGARGTKELLLIDMAISQQARRNRKDLTACWIDYKKAFDSVPHTWLLRVLELYKVNTTLCTFLRSCMGQWRTVLFYPGCRQALGGGVPITIERGIFQGDSLSPLWFCLALNPLSTLLVHSGLGYRLRREGQMVSHLFYMDDLKLFAHTNPQLIALLKVTETFSNSIKMAFGVDKCAVIHVKRGRVVESEGIQLSDSTNLRSLLVTETYKYLGMSQALCINEVDMKQMLQERFFGRLKKVLNSLLSGGNKVRACNSWVMPLLMYSFGILRWTQTELDTIDRKVRTQLTAFRMHHPRSSVMRLYIPRKCGGRGFLNAKTLHNREVCNLRDYFLKSNVDMHRDVVNVDTGLTPLGLAKENWRRPTIVSTDSRREVWQSKELHGRFYRALHRPEVDLLASVSWLRFSDLFGETEGFVCAIADEVIKTNNYRKYIMRDGTIDICRAFHQPGESLRHITSGCSRLADGEYLHRHNQVARIIHQRLALKYNLVEVEVPYYKYVPEPVLQNSHITLYWDRFSRGPTNLFH

SEQ ID NO: 27038 - protein, 1196 aa, Deilephila porcellus
MIRKTTRQRNARKTSPSSSSSASWASASDVFEVTPDIDASSQRDELQSSPPPPRPARRRGRPPPVVGLGPVGPSVPPTVPATGGVVRRMRWTHQINENVMRAYFGATRGGTHLTAYRAKMLSLFQALEPTVEVSSQRLSDQVRFIQRRKLLDDQALERLRTDLRVVQDNNVQPVNGDQAADPTPIPIAVIEVTDNLDDNVSPQDEQRLRGALERAISEFMPLSTSCRPRLPRLPTHRRNLALMGAMDSMLPIYLESSRDLVDTHSILYCAAVAACRVANVNFPNERRATRGVAAVPAWQRRIEERINRARTLIGKLISFKEGNSRPKIMRFVAQAFSGTNTSPRNYRLCVTERIDFYKQKVYAWANRIRRYRRRWDRFQQNRMFQSDQKRVYRCWENSPQSVVDGRLPSAHEMREYWTNIWSSPVSHTEAPWFSVVDRACKVIPAMEAILISPEDVLTAIRPTQNWKSPGPDGLHNFWLKWFPSSHARLATQFQDALEGGSLPTFMTTGVTHLLFKSGSTTEPKNYRPITCLPTIYKVLSSIIRSKIQCHITTNQILYSGQTGCKSGSRGTKELLLIDMAICQQARQNRRNLSAAWIDYKKAYDSVPHTWLMRVLNLYKVDTKLSTFLGACMGQWTTVLKYPGATNPSVNDEPIKIKRGIFQGDSLSPLWFCMALNPLSTLLLDSGLGYRLRRGSEPISHLLYMDDLKLFTSKQSELIELLKIAERFSNSINMEFGVDKCAVIHVKRGVVAVSDDIRVSETVRLRSLSPTETYKYLGMPEALGIMGADVKQSIGERFFSRLTKVLNSFLSGGNKIRAFNGWVMPVLTYSFGILRWTQTELDALDRKVRTLMTAHRMHHPRSSVMRLYIPRRCGGRGILNAKDLHNREVCNLRDYFLHSDVDMHGIVAMVDKGLTPLSLANENWRKPLVVSIRDRLDIWKSKELHGRFYRALHGPDVDRLASVSWLRFGNLFGETEGFVFAIMDEVIKTNNYRKYILKDGTVDICRACHRPGESIRHVISGCSYLANGEYLHRHNLVAKIIHQQIALRYGLVTPEVPYYQYVPQPVLENGHATLYWDRSVITDRTIVANKPDIVIIDRLARRAILVDVTIPHDDNLVKAEKDKMSKYLDLAHEVTDMWNVDSTIIVPIVVSAHGLIPKSLDQHLQRLSIGCWAKSQIQKAVLLDTARIVRKFLTLGS

SEQ ID NO: 27039 - protein, 959 aa, Dendrolimus punctatus
MVFQIARLKKSEQSQFSNKYLRRHAKAKEVSLLLLVIKCNNNNNFADNPQPTRDACQKPAWQYRIERRINTARTLIAKLLCFRSGNTRPKVMRFVTQAFVGTNIGPNDYKERVMERIDFLKQNIYAWANRIRRYKKRTKRFYLNRRFQRDQKGVYRGWEQTEEQVADRQLPNADAIAAFWRGIWSVPVNHTEGDWMGVVEQRCELIPEMDSITIEPYDVGYAIRSAHNWRSPGPDGLHNFWIKWFKVSHPCLATQFQDALNSGNVPTFMTTGVTHLLFKSGSTTEPKNYRPITCLPTIYKLLTSILRSKLIKHLVDNTLLAKTQNGCRPGTRGTKELLLIDMTINQQVRRNRKNLCTAWVDYKKAYDSVPHTWLGRVLELYKIDVTLRTFLGVCMGQWVTRLCMPGGGSLPISDGLIKIERGIFQGDSLSPLWFCLALNPLSSLLEDSKLGFHLRRGGEAISHLLYMDDLKLFASKKHDLLELLNLTETFSSSIGMEFGVDKCAVMYVQRGRVVNSNGLQLSEGVCFKTLSEDETYKYLGISQSLGIVDENVKQLIKERFFSRLRKVLNCLLSGGNKIRAFNSWVMPSLTYSFGILKWTQTELDALDRRIRYMLTTYRMHHQRSSVMRLYIPRKCGGRGLLNAKDLHNREVYNLREYFLKTNESIHRDMLSVDKGLTPLSLAKQNWLRLPVSSTSERMDVWKSKELHGRFHRALYGPDIDLPASVNWLRFGDLFGETEGFACAIMDEVIKTKNYRKYIMKDGTLDICRACHHPGESIRHIISCCSRLANSEYLHRHNLVARIIHQQLALQYDLIATEVPYYKYTPEPVLEKGHITLYWDRSIITDRTIVANKPDIVIIDRSARRTMLVDISIPHDCNLIKAETDKLTKYLDLAHEIAAMWHMESTIIVPIVVSVNGLIAKSLDRHLEKLSLGKWVKGQIQKAVIPSTTRIVRKFLSLEP

SEQ ID NO: 27040 - protein, 868 aa, Hyles vespertilio
MRFVTQAFSGTNISPQNYRLCVTERIDFYKQKVYAWANRICRYRRRWDRFQQNRMFQSDQKRVYRCWEDSSQGVVDGRLPGAHEMREYWTNIWSSPVSHTEASWFSVVDRACESIPAMETILISSEDVQTAIRRTQNWKSPGPDGLHNFWLKWFPSSHARLAAQFQDALEAGSLPAFMTKGVTHLLFKSGCTTEPKNYRPITCLPTIYKILTSIIRSKITDHITSNQILFPGQTGCMNGSRGTKELLLINMTICQQARHNRRNLSAAWIDYKKAYDSVPHTWLMRVLNLYKINTNLCNFLGSCMGQWTTVLRYPGGTAPPDCDEPIRIKRGIFQSDSLSPLWFCMALNPLSTLLLDSGLGYRLRRGSEPISHLLYMDDLKLFASKQTELVELLKITERFSNSINMEFGVDKCAVIHVKRGEVAVSDDIQVSETVRLRPLSVTETYKYLGMPEALGIMSANVKQSLKERFFSRLTKVLNSFLSGGNKIRAFNGWVMPVLMYSFGILKWTQTELDALDRKVRTLLTAHRMHHPRSSVMRLYIPRRCGGRGILNAKDLHNREVCNLRDYFLHSDVDMHGVVVMVDKGFTPLSLAIENWRKPLVVGTKDREDIWKSKELHGRFYRALHGPDVDRLASVSWLRFGNLFGETEGFVFAIMDEVIKTNNYRKYILKDGTVDICRACHRPGESIRHVISGCSYLANGEYLHRHNLVAKIIHQQIALRYGLVTPEVPYYQYVPQPVLENGHATLYWDRSIITDRTILANKPDIVIIDRLARRAILVDVTIPHDDNLVKAEKDKMSKYLDLAHEVTDMWDVDSTIIVPIVVSAHGLIPKSLDQHLQRLSIGVWVRSQIQKAVLLDTARIVRRFLTLGS

SEQ ID NO: 27041 - protein, 1197 aa, Hyles vespertilio
MINNKARKKRNARLTSPSSSSSASWASASDVFEVTSDNDASSQHGELQSSPPPPRPARRRGRPPPAVGLGPVGPSVPPTVPATGGVVRRMRWTREINENVMRAYFGATKGGINLTAYRAKMLSLFQALEPTVDVSSQRLSDQVRFIQRRKLLDDDTLERLRTDLCFVQDDHVSPVSGDQAAGPTPTPVADFELTDNLDDNVSPQAKQQLRGALECAILEFASLSASCRPRLPRLPTHRRNLALMGALDSMLTTYLESSRDLVDTHSILYCAAVAACRVANIKFPNEYKATRGVVIVPAWQRRIEDRINRARTLIGKLISFKEGNSRPKIMRFVTHAFSGTNTSPRNYRLCVTERIDFFKQKVYAWANRIRRYRRRWDRFQQNRKFQTDQKSVYRCWENPPQGVVDGRLPSAHEMREYWTNIWSSPVSHTEASWFSVVDRACEAIPAMETILISPEDVLTAIRQTQNWKSPGPDGLHNFWLKWFPSSHARLAAQFQNALERGSLPTFMTTGVTHLLFKSGCTTEPKNYRPITCLPTIYKVLTSIIRSKITDHINSNQILFSGQTGCMNGSRGTKELLLINMTICQQARHNRRNLSAAWIDYKKAYDSVPHTWLMRVLNLYKINTNLCNFLGSCMGQWTTVLRYPGGTVPPDCDEPIRIKRGIFQGDSLSPLWFCMALNPLSTLLLDSGLGYRLRRGSEPISHLLYMDDLKLFASKQTELIELLKITERFSNSINMDFGVDKCAVIHVKRGEVAVSDDILVSETVRLRSLSVTETYKYLGMPEALGIMGADVKRSLKERFFSRLTKVLNSFLSGGNKIRAFNGWVMPVLIYSFGILKWTQTELDALDRKVRTLLTAHRMHHPRSSVMRLYIPRRCGGRGILNAKDLHNREVCNLRDYFLHSDVDMHRVVVMVDKGFTPLSLAIENWRKPLVVGIKDREDIWKSKELHGRFYRALHGPDVDRLASVSWLRFGNLFGETEGFVFAIMDEVIKTNNYRKYILKDGTVDICRACHRPGESIRHVISGCSYLANGEYLHRHNLVAKIIHQQIALRYGLVTPEVPYYQYVPQPVLENGHATLYWDRSIITDRTILANKPDIVIIDRLARRAILVDVTIPHDDNLVKAEKDKMSKYLDLAHEVTDMWDVDSTIIVPIVVSAHGLIPKSLDQHLQRLSIGCWVRSQIQKAVLLDTARIVRRFLTLGS

SEQ ID NO: 27042 - protein, 1194 aa, Hyles vespertilio
MTTRASRRNAQMRSPSSSSSASWASASDVFEVTPDIDVSSQRDELQSSPPPPRPARRRGRPPPAVGLGPTGPSVPPTVLATGGVVRRMRWTHQMNENVMRAYFRATKGGTNLTAYRAQMLSMFQVLEPTVNVSSQRLSDQVRFIQRRKLLDDEALERLRTEACVALDVITPTTQRAAETPSIPAADIELVDNLDNTVSPQDQQRLRRTLESAILEYKSIPASCRPRVPRLPTHRRNLALMGALDSIVSTYMESSRDLVDTHSILYCAAVAACRVANVKFPINNVTTTRDVATVPAWQRRIEDRINRARTLIGKLIAFRNGNNRQRVMRFVAQAFSGTNISPRDYGLWVTERIDYYKQKVYARANRIRRYRKRWDRFQQNRTFQSDQKRVYRCWERSPQCVVDGRLPSVHDMRTYWTNIWSSSISHTEADWFGVVERACESIPIMEAISISPEDVLVAIRPTQNWKSPGPDGLHNFWLKWLPCSHARLAAQFQDALDGGSLPTFMTTGVTHLLYKSSSATDPKNYRPITCLPTTYKLFTSILRAKIANHFTSNNILFPGQTGCKSGSRGTKELLLIDMTICQQARQNRRNLSAAWIDYKKAFDSVPHTWLMRVLSLYKIDTNLCTFLGSCMGQWTTVLRYPGGMVSPDCDEPIRIKRGIFQGDSLSPLWFCMALNPLSTLLVDSGLGYRLRRGTEPISHLLYMDDFKLFASKQTELIELLKITEKFSNSINMEFCVDKCAIIHVKRGEVAVSDGVQISDAVRLRALSETETYKYLGMPEALGILSADVKQSVKERFFGRLAKVLNSLLSGGNKIRAFNGWVMPVLMYSFGILRWTQTELDALDRKVRTLLTAHRMHHPRSSVMRLYIPRRCGGRGILNAKDLHNREVCNLRDYFLHSDVDMHRVVVKIDKGLTPLSLANENWRKPLVMSTKDREEVWKSKELHGRFYRALHGPDVDRPASVSWLRFGNLFGETEGFVFAIMDEVIKTNNYRKYILKDGTVDICRACHRPGESIRHVISGCSYLANGEYLHRHNLAAKIIHQQIALRYGLVTLEMPYYQYVPQPVLENGHATLYWDRSIITDRTIVANKPDIVIIDRLARRAILVDVTIPHDVNLVKAEKDKLSKYLDLAHEVTDMWDVDSTVIVPIVVSAHGLMPKSFDQHLQRLSIGRWVKSQIQKAVLLDTARIVRRFLTLDP

SEQ ID NO: 27043 - protein, 1197 aa, Hyles vespertilio
MFHNKARKKRNAHLTSPSSSSSASWASASDVFEVTPDNDASSQHGELQSSPPPPRPAQRRGRPPPAVGLGPVGPSVPPTVPATGGVVRRMRWTREINENVMRAYFGATNGGINLTAYRVKMLSLFQALEPTVDVSSQRLSDQVRFIQRRKLLDDDTLERLRTDLCFVQEDHVSPVSGDQAAGPTPTPVADFELTDNLDDNVSPQDKQQLRGALECAILEFASLSASCRPRLPRLPTHRRNLALMGALDSMLPTYLESSRDLVDTHSILYCAAVAACRVANVQFPKEYRATRGVVTVPAWQRRIEDRINRARTLIGKLISFKEGNSRPKIMRFVTQAFSGTNTSPRNYRLCVTERIDFFKQKVYAWANRIRRYRRRWDRFQQNRKFQTDQKRVYRCWENPPQGVVDGRLPSAHEMREYWTNIWSSPVSHTEASWLSVVDRACEAIPAMETILINPEDVLTAIRQTQNWKSPGPDGLHNFWLKWFPSSHARLAVQFQDALERGSLPAFMTTGVTHLLFKSGCTTEPKNYRPITCLPTIYKVLTSIIRSKITDHINSNQILFSGQTGCMNGSRGTKELLLINMTICQQARHNRRNLSAAWIDYKKAYDSVPHTWLMRVLNLYKINTNLCNFLGSCMGQWTTVLRYPGGTVPPDCDEPIRIKRGIFQGDSLSPLWFCMALNPLSTLLLDSGLGYRLRRGSEPISHLLYMDDLKLFASKQTELIELLKITERFSNSINMDFGVDKCAVIHVKRGEVAVSDDILVSETVRLRSLSVTETYKYLGMPEALGIMGADVKRSLKERFFSRLTKVLNSFLSGGNKIRAFNGWVMPVLIYSFGILKWTQTELDALDRKVRTLLTAHRMHHPRSSVMRLYIPRRCGGRGILNAKDLHNREVCNLRDYFLHSDVDMHRVVVMVDKGFTPLSLAIENWRKPLVVGIKDREDIWKSKELHGRFYRALHGPDVDRLASVSWLRFGNLFGETEGFVFAIMDEVIKTNNYRKYILKDGTVDICRACHRPGESIRHVISGCSYLANGEYLHRHNLVTKIIHQQIALRYGLVTPEVPYYQYVPQPVLENGHATLYWDRSIITDRTILANKPDIVIIDRLARRAILVDVTIPHDDNLVKAEKDKMSKYLDLAHEVTDMWDVDSTIIVPIVVSAHGLIPKSLDQHLQRLSIGVWVRSQIQKAVLLDTARIVRRFLTLGS

SEQ ID NO: 27044 - protein, 946 aa, Laothoe populi
MGALDSMLPEYMESSRDLVDTHAILYCAAIAACRVANVRFPNDYRAARDATHVPAWQRRIEERLDRTRTLISKLICFKAGNNRPKVMRFVTQAFLGSSIRPQDYRFCVTERIDLLKQKVYAWANRIRRYKKRWNRFQQNRAFQSDQKRVYRCWEHSQQGVGDGRLPDVRDMRTYWANIWSSPVSHTEGAWIGVVERACEAISPMETISISPDDVLRAVRPTQNWKSSGPDGLHNFWLKWFVTSHSRLAAQFQSALESGSLPTFMTTGVTHLLFKSGSTTDPKNYRPITCLPTIYKLFTSIIRFKIAYHIDNNNILFSAQTGCKIGSRGTKELLLIDMAICQQVRHNRRNLSAAWIDYKKAYDSVPHTWLMRVLDLYKIHSNLRTLLGACMRQWTTVLKYPGGAGPLDCDEPIKIDRGIFQGDSLSPLWFCLALNPLSTLLLDSGLGYRLRRGSVPISHLLYMHDLKLFAPKKSDLIELLKITKSFSNSISMEFGVDKCAVIHVGRGAVRVSDDVYLSETERLRSLSESETYKYLGMSEALGIMGADMKQSLKERFFCRLTKVLNSFLSGGNKIRAFNGWVMPVLMYSFGILKWTQTELDALDRRVRTLMTAHRMHHPRSSVMRLYIPRRCGGRGLLNAKDLHNREVRNLRDYFLHSDVDVHREVVKVDKGFTPLSLANENWRVPVVMSTGDRKGVWKSKELHGRFYRALNGPDVDQLASVSWLRFGDIFGETEGFVFAIMDEVVKTNNYRKYILKDGTVDICRACHRPGESIRHVISGCSYLANGEYLHRHNLVAKIIHQQLALRYHLVISEVPYYQYVPQPVLENGHTTLYWDRSIITDRTIVANKPDIVVIDRLARRAILVDVTIPHDDNLVKAEKDKMSKYLDLAHEVVDMWNVDSAIIVPIVVTANGLIPKSLDQHLQRLSIGRWAKKARYKRQYYWIRHAL

SEQ ID NO: 27045 - protein, 1111 aa, Dendrolimus punctatus
MRWTQELNECVMRAYYEATEGGTNLTSYRGRLLSLFQTLQPASAVTAQRLSDQVRAIQRLHLLDESTLDRLRNAVRINRENTDTPQPTSPTTPADSQGTVNFTIDDVSDSIAVGNVSIQINEQLRRTLEHSIQEFRDQPILNRPRVPKLPLHRNNLLLMGALDCLLAPYFGSSADLVDTHSILYCGAVAVCRVAGVKFPNTQPTRPASGKPAWQIRIERRIDRARVLIAKLICFRAGNCRPRVVRFVAQAFTGTDVSPSEYMARATERIDFWKQKVYAWANRIRRYKERADRYFLNRTFQSEEKRVYRGWEKSRDSVADRQIPNIDAMTSFWRSIWSMPVSHTEGDWIELVKQSCDQVPDMEPITIEPLDVGNAIRSAHNWKSPGPDGLHNFWIKWFKSSHSCLANQFQEAVDRGSLPTFMTTGVTHLLFKSGCTTEPKNYRPITCLPTIYKLLTSILGKKLSNYFYNDNILAITQNGCKAGSRGTKELLLIDTTVSQQARRNRRNLSVAWIDYKKAYDSVPHTWLMRVLELYKVDATLRTFLQACMRQWVTHLKLPGGRGPSLPEGAINIERGIFQGDSLSPLWFCLALNPLSTLLESSKLGYRFRRGGEIMSHLLYMDDLKLFASNEPDLIELLKTTERFSKSINMEFGIEKCAVMHVRRGKVVNSPNLQLSENMSLKSLSETETYKYLGMSESLGIADADVKQTVKDRFFCRLRKVFTSLLSGGNKVRAFNSWVMPVLAYSFGILRWTQTELDALDRRVRCLLTKHRMHHPRSSVMRLYISRRCGGRGFLNAKDLHNREVNNLRTYFLKMDVGLHKDVVAVDKGLTTLSLANENWCNLAVLSASDRINVWKSKALHGRFYRALTGPDVDLLASVNWLRFGNLFGETEGFVFAIMDEVIKTNNYRKYILKDGTLDICRACHRPGESLRHIVSGCSHLSNGEYLHRHNLVARIIHQQLALRYGLVETEVPYYQYSPEPVLENSRVTLYWDRSIITDRTIVANKPDIVIIDRSARRAILVDISIPHDDNLVKKEKEKLSKYLDLAHEVTAMWRLESTSIVPIVVTVNGLIAKSLDRHLERLSLGSWVKGQIQKAALLDTARIVRRFLSLEP

SEQ ID NO: 27046 - protein, 1097 aa, Hyles vespertilio
MRAYFGATKGGINLTAYRAKMLSLFQALEPTVDVSSQRLSDQVRFIQRRKLLDDDTLERLRTDLCFVQDDHVSPVSGDQAAGPTPTPVADFELTDNLDDNVSPQAKQQLRGALECAILEFSSLSASCRPRLPRLPTHRRNLALMGALDSMLTTYLESSRDLVDTHSILYCAAVAACRVANIKFPNEYKATRGVVIVPAWQRRIEDRINRARTLIGKLISFKEGNSRPKIMRFVTQAFSGTNTSPRNYRLCVTERIDFFKQKVYAWANRIRRYRRRWDRFQQNRKFQTDQKTVYRCWENPPQGVVDGRLPSAHEMREYWTNIWSSPVSHTEASWFSVVDRACEAIPAMETILISPEDVLTAIRQTQNWKSPGPDGLHNFWLKWFPSSHARLAAQFQNALERGSLPTFMTTGVTHLLFKSGCTTEPKNYRPITCLPTIYKVLTSIIRSKITDHINSNQILFSGQTGCMNGSRGTKELLLINMTICQQARHNRRNLSAAWIDYKKAYDSVPHTWLMRVLNLYKINTNLCNFLGSCMGQWTTVLRYPGGTVPPDCDEPIRIKRGIFQGDSLSPLWFCMALNPLSTLLLDSGLGYRLRRGSEPISHLLYMDDLKLFASKQTELIELLKITERFSNSINMDFGVDKCAVIHVKRGEVAVSDDILVSETVRLRSLSVTETYKYLGMPEALGIMGADVKRSLKERFFSRLTKVLNSFLSGGNKIRAFNGWVMPVLIYSFGILKWTQTELDALDRKVRTLLTAHRMHHPRSSVMRLYIPRRCGGRGILNAKDLHNREVCNLRDYFLHSDVDMHRVVVMVDKGFTPLSLAIENWRKPLVVGIKDREDIWKSKELHGRFYRALHGPDVDRLASVSWLRFGNLFGETEGFVFAIMDEVIKTNNYRKYILKDGTVDICRACHRPGESIRHVISGCSYLANGEYLHRHNLVAKIIHQQIALRYGLVTPEVPYYQYVPQPVLENGHATLYWDRSIITDRTILANKPDIVIIDRLARRAILVDVTIPHDDNLVKAEKDKMSKYLDLAHEVTDMWDVDSTIIVPIVVSAHGLIPKSLDQHLQRLSIGCWVRSQIQKAVLLDTARIVRRFLTLGS

SEQ ID NO: 27047 - protein, 954 aa, Hyles vespertilio
MGALDSMLTTYLESSRDLVDTHSILYCAAVAACRVANIKFPNEYKATRGVVIVPAWQRRIEDRINRARTLIGKLISFKEGNSRPKIMRFVTHAFSGTNTSPRNYRLCVTERIDFFKQKVYAWANRIRRYRRRWDRFQQNRKFQTDQKSVYRCWENPPQGVVDGRLPSAHEMREYWTNIWSSPVSHTEASWFSVVDRACEAIPAMETILISPEDVLTAIRQTQNWKSPGPDGLHNFWLKWFPSSHARLAAQFQNALERGSLPTFMTTGVTHLLFKSGCTTEPKNYRPITCLPTIYKVLTSIIRSKITDHINSNQILFSGQTGCMNGSRGTKELLLINMTICQQARHNRRNLSAAWIDYKKAYDSVPHTWLMRVLNLYKINTNLCNFLGSCMGQWTTVLRYPGGTVPPDCDEPIRIKRGIFQGDSLSPLWFCMALNPLSTLLLDSGLGYRLRRGSEPISHLLYMDDLKLFASKQTELIELLKITERFSNSINMDFGVDKCAVIHVKRGEVAVSDDILVSETVRLRSLSVTETYKYLGMPEALGIMGADVKRSLKERFFSRLTKVLNSFLSGGNKIRAFNGWVMPVLIYSFGILKWTQTELDALDRKVRTLLTAHRMHHPRSSVMRLYIPRRCGGRGILNAKDLHNREVCNLRDYFLHSDMDMHRVVVMVDKGFTPLSLAIENWRKPLVVGIKDREDIWKSKELHGRFYRALHGPDVDRLASVSWLRFGNLFGETEGFVFAIMDEVIKTNNYRKYILKDGTVDICRACHRPGESIRHVISGCSYLANGEYLHRHNLVAKIIHQQIALRYGLVTPEVPYYQYVPQPVLENGHATLYWDRSIITDRTILANKPDIVIIDRLARRAILVDVTIPHDDNLVKAEKDKMSKYLDLAHEVTDMWDVDSTIIVPIVVSAHGLIPKSLDQHLQRLSIGCWVRSQIQKAVLLDTARIVRRFLTLGS

SEQ ID NO: 27048 - protein, 954 aa, Hyles vespertilio
MGTLDSMLTTYLESSRDLVDTHSILYCAAVAACRVANIKFPNEYKATRGVVIVPAWQRRIEDRINRARTLIGKLISFKEGNSRPKIMRFVTHAFSGTNTSPRNYRLCVTERIDFFKQKVYAWANRIRRYRRRWDRFQQNRKFQTDQKSVYRCWENPPQGVVDGRLPSAHEMREYWTNIWSSPVSHTEASWFSVVDRACEAIPAMETILISPEDVLTAIRQTQNWKSPGPDGLHNFWLKWFPSSHARLAAQFQNALERGSLPTFMTTGVTHLLFKSGCTTEPKNYRPITCLPTIYKVLTSIIRSKITDHINSNQILFSGQTGCMNGSRGTKELLLINMTICQQARHNRRNLSAAWIDYKKAYDSVPHTWLMRVLNLYKINTNLCNFLGSCMGQWTTVLRYPGGTVPPDCDEPIRIKRGIFQGDSLSPLWFCMALNPLSTLLLDSGLGYRLRRGSEPISHLVYMDDLKLFASKQTELIELLKITERFSNSINMDFGVDKCAVIHVKRGEVAVSDDILVSETVRLRSLSVTETYKYLGMPEALGIIGADVKRSLKERFFSRLTKVLNSFLSGGNKIRAFNGWVMPVLIYSFGILKWTQTELDALDRKVRTLLTAHRMHHPRSSVMRLYIPRRCGGRGILNAKDLHNREVCNLRDYFLHSDVDMHRVVVMVDKGFTPLSLAIENWRKPLVVGIKDREDIWKSKELHGRFYRALHGPDVDRLASVSWLRFGNLFGETEGFVFAIMDEVIKTNNYRKYILKDGTVDICRACHRPGESIRHVISGCSYLANGEYLHRHNLVAKIIHQQIALRYGLVTPEVPYYQYVPQPVLENGHATLYWDRSIITDRTILANKPDIVIIDRLARRAILVDVTIPHDDNLVKAEKDKMSKYLDLAHEVTDMWDVDSTIIVPIVVSAHGLIPKSLDQHLQRLSIGCWVRSQIQKAVLLDTARIVRRFLTLGS

SEQ ID NO: 27049 - protein, 1194 aa, Hyles vespertilio
MTTRASRRNAQMRSPSSSSSASWASASDVFEVTPDIDVSSQRDELQSSPPPPRPARRRGRPPPAVGLGPTGPSVPPTVLATGGVVRRMRWTHQMNENVMRAYFRATKGGTNLTAYRAQMLSMFQVLEPTVNVSSQRLSDQVRFIQRRKLLDDEALERLRTEACVALDVITPITQRAAETPSIPATDIELVDNLDNTVSPQDQQRLRRTLESAILEYKSIPASCRPRVPRLPTHRRNLALMGALDSIVSTYMESSRDLVDTHSILYCAAVAACRVANVKFPINNVTTTRDVATVPAWQRRIEDRINRARTLIGKLIAFRNGNNRQRVMRFVAQAFSGTNISPRDYGLWVTERIDYYKQKMYAWANRIRRYRKRWDRFQQNRTFQSDQKRVYRCWERSPQCVVDGRLPSVHDMRTYWTNIWSSSISHTEADWFGVVERACESIPIMEAISISPEDVLVAIRPTQNWKSPGPDGLHNFWLKWLPCSHARLAAQFQDALDGGSLPTFMTTGVTHLLYKSGSTTDPKNYRPITCLPTTYKLFTSILRAKIANHFTSNNILFPGQTGCKSGSRGTKELLLIDMTICQQARQNRRNLSAAWIDYKKAFDSVPHTWLMRVLSLYKIDTNLCTFLGSCMGQWTTVLRYPGGMVSPDCDEPIRIKRGIFQGDSLSPLWFCMALNPLSTLLVDSGLGYRLRRGTEPISHLLYMDDLKLFASKQTELIELLKITEKFSNSINMEFCVDKCAIIHVKRGEVAVSDGVQISDAVRLGALSETETYKYLGIPEALGILSADVKQSVKERFFGRLAKVLNSLLSGGNKIRAFNGWVMPVLMYSFGILRWTQTELDALDRKVRTLLTAHRMHHPRSSVMRLYIPRRCGGRGILNAKDLHNREVCNLRDYFLHSDVDMHRVVVKIDKGLTPLSLANENWRKPLVMSTKDREEVWKSKELHGRFYRALHGPDVDRPASVSWLRFGNLFGETEGFVFAIMDEVIKTNNYRKYILKDGTVDICRACHHPGESIRHVISGCSYLANGEYLHRHNLVAKIIHQQIALRYGLVTLEMPYYQYVPQPVLENGHATLYWDRSIITDRTIVANKPDIVIIDRLARRAILVDVTIPHDVNLVKAEKDKLSKYLDLAHEVTDMWDVDSTVIVPIVVSAHGLMPKSFDQHLQRLSIGRWVKSQIQKAVLLDTARIVRRFLTLDP

SEQ ID NO: 27050 - protein, 1111 aa, Dendrolimus kikuchii
MRWTQELNECVMRAYFEATEGGTNLTSYRGRLLSLFQTLQPASTVTAQRLSDQVRAIQRLHLLDESTLDRLRNTVRINRESTDTPQPTSPAPPADSQWPVNSTMDDVSEGLAVGNVSIQTNEQLRRTLEHSIQEFRDQPILNRPRLPKLPLHRNNLVLMGTLDCLLAPYFRSSADLVDTHSILYCGAVAVCRVAGVKFPNTQPTRPASGKPAWQIRIERRIDRARVLIAKLICFRAGNCRPRVMRFMAQAFAGTNVSPSEYMARATERIDFWKQKVYAWANRIRRYKERADRYFLNRTFQSEEKRVYRGWEKCSDSVTDRQMPNIDAMASFWRNIWSMPVSHTEGDWIELVKQSCEQVPDMEPIIIEPLDVGNAIRSAHNWKSPGLDGLHNFWIKWFKSSHGCLANQFQEAVDRGSLPTFMTTGVTHLLFKSGCTTEPKNYRPITCLPTIYKLLTSILGKKISNYFYDNNILAITQNGCKAGSRGTKELLLIDTTVSQQARRNKRNLSVAWIDYKKAYDSVPHTWLMRVLELYKVDATLRTFLQACMRQWVTHLRLPGGGGASLPEGAINIERGIFQGDSLSPLWFCLALNPLSTLLESSKLGYRFRRGGEIMSHLLYMDDLKLFASNEPDLIELLKTTERFSKSINMEFGIEKCAVMHVRRGKVVNSPNVQLSENISLKSLSETETYKYLGMSESLGIADADVKQTVKDRFFCRLRKVLTSLLSGGNKVRAFNSWVMPVLAYSFGILRWTQTELDALDRRVRCLLTKYRMHHPRSSVMRLYISRRCGGRGFLNAKDLHNREVNNLRAYFLKMDVGLHKDVVAVDKGLTMLSLAKENWCNLAVLSASDRINVWKSKELHGRFYRALTGPDVDLSASVNWLRFGNLFGETEGFVFAIMDEVIKTNNYRKYILKDGTLDICRACHRPGESLRHIVSGCSHLSNGEYLHRHNLVARIIHQQLALRYGLVETEVPYYQYSPEPVLENSRATLYWDRSVITDRTIVANKPDIVIIDRSARRAILVDISIPHDDNLVKKEKEKLSKYLDLAHEVTAMWRLESTSIVPIVVTVNGLIAKSLDCHLERLSLGGWVKGQIQKAALLDTARIVRRFLSLEP

SEQ ID NO: 27051 - protein, 868 aa, Dendrolimus kikuchii
MRFVAQAFAGTNISPSEHMARATERIDFWKQKVYAWANRIRRYKERADRYFLNRTFQSEEKRVYRGWEKSSDSVADRQIPNTDAMASFWRSIWSVPVSHTEGDWIEVIKQSCEQVPDMEPITIEPLDVGNAIRSAHNWKSPGPDGLHNFWIKWFKSSHGCLANQFQEAVDRGSLPTFMTTGVTHLLFKSGCTTEPKNYRPITCLPTIYKLLTSILEKKLSNYFYNNNILAITQNGCKAGSRGTKELLLIDTTVSQQARRNRRNLSVAWIDYKKAYDSVPHTWLMRVLELYKVDATLRTFLQACMRQWVTYLRVPGGGGVPLPEGEINIERGIFQGDSLSPLWFCLALNPLSTLLESSKLGYRFRRGGEIVSHLLYMDDLKLFASNEPDLIELLKTTEHFSKSINMEFGIEKCAVMHVRRGKVVNSPNLQLSENMSLKSLSETETYKYLGMSESLGIADADVKQTVKDRFFCRLRKVLTSLLSGGNKVRAFNSWVMPVLAYSFGILRWTQTELDALDRRVRCLLTKHRMHHPRSSVMRLYISRRCGGRGFLNAKDLHNREVNNLRAYFLKMNVGLHKDVVAVDKGLTTLALAKENWCNLAVLSTSDRINVWKSKELHGRFYRALTGPDVDLSASVNWLRFGNLFGETEGFVFAIMDEVIKTNNYRKYILKDGTLDICRACHRPGESLRHIVSGCSHLSNGEYLHRHNLVARIIHQQLALRYGLVETEVPYYQYSPEPVLENSRATLYWDRSVITDRTIVANKPDIVIIDRSARRAILVDISIPHDDNLVKKEKEKLSKYLDLAHEVTAMWRLESTSIVPIVVTVNGLIAKSLDRHLERLSLGSWVKGQIQKAALLDTARIVRRFLSLEP

SEQ ID NO: 27052 - protein, 1193 aa, Laothoe populi
MTTRNRVRCARLPSPSSSSSSASWASASEAPEPLPVTDASSHCDGLQSSPPTLTPARRRGRQHPPPVGLGPVGPCAPPLAPAAGGVVRRMRWTHSINENVMRAYFGATEGGTKLTAYRPKMLALFQDLEPTIDVSAQRLSDQVRYIQRRKLLDDAALDRLRANLCVVQDVVQRTVDTPSVPTDDVNIELVDDLDNNVSSHDIQCLRGALESAILEFKLVPACLRPRLPRLPTHKRNLALMGALDSMLPEYMESSRDLVDTHAILYCAAIAACRVANVRFPNDYRAARDATHVPAWQRRIEERIDRTRTLISKLICFKAGNNRPKIMRFVTQAFLGSSIRPQDYRFYVTERIDLLKQKVYAWANRIRRYKKRWNRFQQNRAFQSDQKRVYRCWEHSQQGVADGRLPDVCDMRTYWANIWSSPVSHTEGAWISVVERACEAISPMETISISPDDVLRAVRLTQNWKSPGPDGIHNFWLKWFVTSHSRLAAQFQSALESGSLPTFMTTGVTHLLFKSGSTTDPKNYRPITCLPTIYKLFTSIIRFKIAYHIDNNNILFSAQTGCKIGSRGTKELLLIDMAICQQVRHNRRNLSAAWIDYKKAYDSVPHTWLMRVLDLYKIHSNLRTLLGACMRQWTTVLKYPGGAGPLDCDEPIKIDRGIFQGDSLSPLWFCLALNPLSTLLLDSGLGYRLRRGSVPISHLLYMDDLKLFAPKKSDLIELLKITKSFSNSISMEFGVDKCAVIHVGRGAVRVSDDVYLSETERLRSLSESETYKYLGMSEALGIMGADMKQSLKERFFCRLTKVLNSFLSGGNKIRAFNGWVMPVLLYSFGILKWTQTELDALDRRVRTLMTAHRMHHPRSSVMRLYIPRRCGGRGLLNAKDLHNREVRNLRDYFLHSDVDVHREVVKVDKGFTPLSLANENWRVPVVMSTGDRRGVWKSKELHGRFYRALNGPDVDQLASVSWLRFGDLFGETEGFVFAIMDEVVKTNNYRKYILKDGTVDICRACHRPGESIRHVISGCSYLANGEYLHRHNLVAKIIHQQLALRYHLVISEVPYYQYVPQPVLENGHTTLYWDRSVITDRTIVANKPDIVVIDRLARRAILVDVTIPHDDNLVKAEKDKMSKYLDLAHEVVDMWNVDSAIIVPIVVTANGLIPKSLDQHLQRLSIGRWVKSQIQKAVLLDTARIVRRFLTLGS

SEQ ID NO: 27053 - protein, 948 aa, Deilephila porcellus
MLPTYLESSRDLVDTHSILYCAAVAACRVANITFPNEYRATRGVATVPAWQRRIEDRINRARTLIGKLVSFREGNNRPRVMRFVTQAFSGTNTSPRDYRLCVTERIDFFKQKVYAWANRIRRYRKRWDRFQQNRMFQSDQKRVYRCWESSPQSVMDGRLPSAREMREYWANIWASPVSHTEAAWFSVVNQACEALPTMETISISPEDVLAAIRPTQNWKSPGPDGLHNFWLKWFPSSHARLAIQFQDALERGSLPTFMTTGVTHLLFKSGCTTDPKNYRPITCLPTIYKILTSIIRSKITCHITTNKILFSGQTGCKSGSRGTKELLLIDMTICQQVRHNRRNLSAAWIDYKKAYDSVPHTWLMRVLNLYKIDTKLCTFLEVCMGQWTTVLKYPGATSPSDCDEPIAIRRGIFQGDSLSPLWFCMALNPLSTLLLDSGLGYRLRRGTEPISHLLYMDDLKLFASKQSELIELLKITEIFSKSINMEFGVNKCAVIHVKRGEVAVSDDIQVSETVRLRSLSEMETYKYLGMPEALGIMGVDVKQSLKERFFSRLTKVLNSFLSGGNKIRAFNGWVMPALMYSFGILRWTQTELDALDRKVRTLLTAHRMHHPRSSVMRLYIPRRCGGRGMLNAKDLHNREVCNLRDYFLNSDVDMHGVVVMVDKGFTPLSLANENWRKPLVMGIKDREEIWKGKELHGRFYRALHGPDVDRLASVSWLRFGNLFGETEGFVFAIMDEVIKTNNYRKYILKDGTVDICRACHRPGESIRHVISGCSYLANGEYLHRHNLVAKIIHQQIALRYGLVTPEVPYYQYVPQPVLENGHATLYWDRSVITDRTIVANKPDIVIIDRLARRAILVDVTIPHDDNLVKAEKDKLTKYLDLAHEVTELWDVDSTIIVPIVVSAHGLIPKSLDQHLQRLSMGRWVMSQIQKAVLLDTARIVRRFLTLGS

SEQ ID NO: 27054 - protein, 1111 aa, Dendrolimus punctatus
MRWTQELNECVMRAYYEATEGGTNLTSYRGRLLSLFQTLQPASAVTAQRLSDQVRAIQRLHLLDESTLDRLRNAVRINRESTDTPQPTSPAMPADSQGTVNFTIDDVSDSIAVGNVSIQINEQLRRTLEHSIQEFRDQPILNRPRVPKLPLHRNNLLLMGALDCLLAPYFGSSANLVDTHSILYCGAVAVCRVAGVKFPNTQPTRPASGKPAWQIRIERRIDRARVLIAKLICFRAGNCRPRVVRFVAQAFTGTNVSPSEYMARATERIDFWKQKVYAWANRIRRYKERADRYFLNRTFQSEEKRVYRGWEKSRDSVADRQIPNIDAMASFWRSIWSMPVSHTEGDWIELVKQSCDQVPDMEPITIEPLDVGNAIRSAHNWKSPGPDGLHNFWIKWFKSSHSCLANQFQEAVDRGSLPTFMTTGVTHLLFKSGCTTEPKNYRPITCLPTIYKLLTSILGKKLSNYFYNNNILAITQNGCKAGSRGTKELLLIDTTVSQQARRNRRNLSVAWIDYKKAYDSVPHTWLMRVLELYKVDATLRTFLQACMRQWVTHLKLPGGRGPSLPEGAINIERGIFQGDSLSPLWFCLALNPLSTLLESSKLGYRFRRGGEIMSHLLYMDDLKLFASNEPDLIELLKTTERFSKSINMEFGIEKCAVMHVRRGKVLNSPNLQLSENMSLKSLSETETYKYLGMSESLGIADADVKQTVKDRFFCRLRKVLTSLLSGGNKVRAFNSWVMPVLAYSFGVLRWTQTELDALDRRVRCLLTKYRMHHPRSSVMRLYISRRCGGRGFLNAKDLHNREVNNLRTYFLKMDVGLHKDVVAVDKGLTTLSLANENWCNLAVLSASDRINVWKSKALHGRFYRALTGPDIDLSASVNWLRFGNLFGETEGFVFAIMDEVIKTNNYRKYILKDGTLDICRACHRPGESLRHIVSGCSHLSNGEYLHRHNLVARIIHQQLALRYGLVETEVPYYQYSPEPVLENSRATLYWDRSIITDRNIVANKPDIVIIDRSARRAILVDISIPHDDNLVKKEKEKLSKYLDLAHEVTAMWRLESTSIVPIVVTVNGLIAKSLDRHLERLSLGSWVKGQIQKAALLDTARIVRRFLSLEP

SEQ ID NO: 27055 - protein, 1194 aa, Hemaris fuciformis
MNKNAKKTHARKTSPSSSSSSASWASASEIFEPSPGNDVSSQIDGLQSSPPPLRPARRGGRRPPPACLGPVGPRVLPTAPATGGVVRRMRWTTSINENVMRAYFGATEGGTKLTAYRSKMLALFQALEPTIDVSAQRLSDQVRYIQRRKALGDEVLDRLRADLRVVQENFDPAPTQQIVDPSPPPDTSCDINNLDNIVSSDDNQRLRRALEDAISEFAPVPASSRPCLPRLPTHRRNLALMGTLDSILPSYLESSRDLIDTHSMLYCAAVAACRVANVKFLNQVRTTPKVVTVPAWQRRIEHRIDWARTLISKLICFKEGNNRPKIMRFVTQAFSGTNIQPGDYRLCVTERIDFFKQKLYAWANRIRRYKKRSDRFRINRAFQSDQKRVYRCWEHFQQSVEDGRLPSASNMHTYWKSIWSSSVSHTEGSWISVVNQACKDISTMETILISPNDVSVAIRSTQNWKSPGADGLQNFWLKWFPSVHALLAAQFQEAINIGSLPTFMTTGITHLLYKSGTTTDPKNYRPITCLPTIYKLLTSIIRNKISIHIKNNSILFSGQTGCKLGSRGTKELLLIDMTICQQARQNRKNLSVAWIDYKKAYDSVPHTWLKRVFNLYKLDTTLCNFLEACMGQWTTVLKYPGTTCSSDCLEPIRIERGIFQGDSLSPLWFCLALNPLSTLLLDSGLGYCLRRGTEPISHLLYMDDLKLFASKSTELIELLKITQRFSNSINMEFGVDKCAVMHVKRGEIVVSDDIQVSETVRLRSLSEAETYKYLGMSESLGILSSDVKLSLKERFFSRLRKVLNSLLSGGNKIRAFNGWVMPVLMYSFGVLKWTQTELDALDRKIRTLLTAHRMHHPRSSVMRLYIPRRCGGRGLLNAKDLHNREICNLRDYFLHSDESMHGVVVMTDKGFTPLSLANENWRRPMVLGVSERREIWKSKELHGRFFRALNGSDVDQLASVTWLRFGNLFGETEGFVFAIMDEVIKTNNYRKYIMKDGTVDICRACHRPGESIRHVISGCSYLANGEYLHRHNLVAKIIHQQLALRYHLVTDEVPYYQYVPHPVLENSHATLYWDRSVITDRTIVANKPDIVIVDRLARRAMLVDVTIPHDDNLVKAEKDKMSKYLDLAHEVTDMWDVDSTVIVPIVVTANGLIPKSLDQHLRRLSIGCWVKTQIQKAVLLDTARIVRRFLTLEP

SEQ ID NO: 27056 - protein, 1197 aa, Hyles vespertilio
MINNKARKKRNARLTSPSSSSSASWASASDVFEVTSDNDASSQHGELQSSPPPPRPARRRGRPPPAVGLGPVGPSVPPTVPATGGVVRRMRWTREINENVMRAYFGATKGGINLTAYRAKMLSLFQALEPTVDVSSQRLSDQVRFIQRRKLLDDDTLERLRTDLCFVQDDHVSPVSGDQAAGPTPTPVADFELTDNLDDNVSPQAKQQLRGALECAILEFASLSASCRPRLPRLPTHRRNLALMGTLDSMLTTYLESSRDLVDTHSILYCAAVAACRVANIKFPNEYKATRGVVIVPAWQRRIEDRINRARTLIGKLISFKEGNSRPKIMRFVTHAFSGTNTSPRNYRLCVTERIDFFKQKVYAWANRIRRYRRRWDRFQQNRKFQTDQKSVYRCWENPPQGVVDGRLPSAHEMREYWTNIWSSPVSHTEASWFSVVDRACEAIPAMETILISPEDVLTAIRQTQNWKSPGPDGLHNFWLKWFPSSHARLAAQFQNALERGSLPTFMTTGVTHLLFKSGCTTEPKNYRPITCLPTIYKVLTSIIRSKITDHINSNQILFSGQTGCMNGSRGTKELLLINMTICQQARHNRRNLSAAWIDYKKAYDSVPHTWLMRVLNLYKINTNLCNFLGSCMGQWTTVLRYPGGTVPPDCDEPIRIKRGIFQGDSLSPLWFCMALNPLSTLLLDSGLGYRLRRGSEPISHLVYMDDLKLFASKQTELIELLKITERFSNSINMDFGVDKCAVIHVKRGEVAVSDDILVSETVRLRSLSVTETYKYLGMPEALGIIGADVKRSLKERFFSRLTKVLNSFLSGGNKIRAFNGWVMPVLIYSFGILKWTQTELDALDRKVRTLLTAHRMHHPRSSVMRLYIPRRCGGRGILNAKDLHNREVCNLRDYFLHSDVDMHRVVVMVDKGFTPLSLAIENWRKPLVVGIKDREDIWKSKELHGRFYRALHGPDVDRLASVSWLRFGNLFGETEGFVFAIMDEVIKTNNYRKYILKDGTVDICRACHRPGESIRHVISGCSYLANGEYLHRHNLVAKIIHQQIALRYGLVTPEVPYYQYVPQPVLENGHATLYWDRSIITDRTILANKPDIVIIDRLARRAILVDVTIPHDDNLVKAEKDKMSKYLDLAHEVTDMWDVDSTIIVPIVVSAHGLIPKSLDQHLQRLSIGCWVRSQIQKAVLLDTARIVRRFLTLGS

SEQ ID NO: 27057 - protein, 955 aa, Hyles vespertilio
MGALDSIVSTYMESSRDLVDTHSILYCAAVAACRVANVKFPINNVTTTRDVATVPAWQRRIEDRINRARTLIGKLIAFRNGNNRQRVMRFVAQAFSGTNISPRDYGLWVTERIDYYKQKVYAWANRIRRYRKRWDRFQQNRTFQSDQKRVYRCWERSPQCVVDGRLPSVHDMRTYWTNIWSSSISHTEADWFGVVERACESIPIMEAISISPEDVLVAIRPTQNWKSPGPDGLHNFWLKWLPCSHARLAAQFQDALDGGSLPTFMTTGVTHLLYKSGSATDPKNYRPITCLPTTYKLFTSILRAKIANHFTSNNILFPGQTGYKSGSRGTKELLLIDMTICQQARQNRRNLSAAWIDYKKAFDSVPHTWLMRVLSLYKIDTNLCTFLGSCMGQWTTVLRYPGGMVSPDCDEPIRIKRGIFQGDSLSPLWFCMALNPLSTLLVDSGLGYRLRRGTEPISHLLYMDDLKLFASKQTELIELLKITEKFSNSINMKFCVDKCAIIHVKRGEVAVSDGVQISDAVRLRALSETETYKYLGMPEALGILSADVKQSVKERFFGRLAKVLNSLLSGGNKIRAFNGWVMPVLMYSFGILRWTQTELDALDRKVRTLLTAHRMHHPRSSVMRLYIPRRCGGRGILNAKDLHNREVCNLRDYFLHSDVDMHRVVVKIDKGLTPLSLANENWRKPLVMSTKDREEVWKSKELHGRFYRALHGPDVDRPASVSWLRFGNLFGETEGFVFAIMDEVIKTNNYRKYILKDGTVDICRACHRPGESIRHVISGCSYLANGEYLHRHNLVAKIIHQQIALRYGLVTLEMPYYQYVPQPVLENGHATLYWDRSIITDRTIVANKPDIVIIDRLARRAILVDVTIPHDVNLVKAEKDKLSKYLDLAHEVTDMWDVDSTVIVPIVVSAHGLMPKSFDQHLQRLSIGRWVKSQIQKAVLLDTARIVRRFLTLDP

SEQ ID NO: 27058 - protein, 1067 aa, Hyles vespertilio
MVDVSSQRLSNQVRFIQRRKLLDDDTLERLRTDLCVVQDDDISPVSGDQAASPTPTPVSDFELTDNLDDNVSPQDKQHLRGALERAISEFVSLSASCRPRLPRLPTHRRNLALMGALDSMLPTYLESSRDLVDTHSILYCAAVAACRVANVQFPKEYRATRGVVTVPAWQLRIEDRINRARTFIGKLISFSEGNSRPRIMRFVTQAFSGTNISPQNYRLCVTERIDFYKQKVYAWANRIRRYRRRWDRFQQNRMFQSDQKRVYRCWENSSQGVVDGRLPGAHEMREYWTNIWSSPVSHTEASWFSVVDRACEAIPAMETILISLEDVQTAIRRTQNWKSPGPDGLHNFWLKWFPSSHVRLAAQFQDALEAESLPAFMTTGVTHLLFKSGCTTEPKNYRPITCLPTIYKILTSIIRSKITDHITSNQILFPGQTGCMNGSRGTKELLLINMTICQQARHNRRNLSAAWIDYKKAYDSVPHTWLMRVLNLYKINTNLCNFLGSCMGQWTTVLRYPGSTAPPDCDEPIRIKRGIFQGDCLSPLWFCMALNPLSTLLLDSGLGYRLRRGSEPISHLLYMDDLKLFASKQTELVELLKITERFSNSINMEFGVDKCAVIHVKRGEVAVSDDIQVSETVRLRHLSVTETYKYLGMPEALGIMGADVKQSLKERFFSRLAKVLKSFLSGGNKIRAFNGWVMPVLMYSFGILKWTQTELDALDRKVRTLLTAHRMHHPRSSVMRLYIPRRCGGRGILNAKDLHNREVCNLRDYFLHSDVDMHRVVVMVDKGFTPLSLAIENWRKPLVMGIRDREDIWKSKELHGRFYRALHGPDVDRLASVSWLRFGNLFGETEGFVFAIMDEVIKTNNYRKYILKDGTVDICRACHRPGESIRHVISGCSYLANGEYLHRHNLVAKIIHQQITLRYGLVTNGVPYYQYVPQPVLENGHATLYWDRSIITDRTILANKPDIVIIDRLARRAILVDVTIPHDDNLVKAEKDKMSKYLDLAHEVTDMWDVDSTIIVPIVVSAHGLIPKSLDQHLQRLSIGCWVRSQIQKAVLLDTARIVRRFLTLGS

SEQ ID NO: 27059 - protein, 1108 aa, Hyles vespertilio
MRWTREINENVMRAYFGATKGGINLTAYRAKMLSLFQALEPTVDVSSQRLSDQVRFIQRRKLLDDDTLERLRTDLCFVQDDHVSPVSGDQAAGPTPTPVADFELTDNLDDNVSPQAKQQLRGALECAILEFASLSASCRPRLPRLPTHRRNLALMGALDSMLTTYLESSRDLVDTHSILYCAAVAACRVANIKFPNEYKATRGVVIVPAWQRRIEDRINRARTLIGKLISFKEGNSRPKIMRFVTQAFSGTNTSPRNYRLCVTERIDFFKQKVYAWANRIRRYRRRWDRFQQNRKFQTDQKSVYRCWENPPQGVVDGRLPSAHEMREYWTNIWSSPVSHTEASWFSVVDRACEAIPAMETILISPEDVLTAIRQTQNWKSPGPDGLHNFWLKWFPSSHARLAAQFQNALERGSLPTFMTTGVTHLLFKSGCTTEPKNYRPITCLPTIYKVLTSIIRSKITDHINSNQILFSGQTGCMNGSRGTKELLLINMTICQQARHNRRNLSAAWIDYKKAYDSVPHTWLMRVLNLYKINTNLCNFLGSCMGQWTTVLRYPGGTVPPDCDEPIRIKRGIFQGDSLSPLWFCMALNPLSTLLLDSGLGYRLRRGSEPISHLLYMDDLKLFASKQTELIELLKITERFSNSINMDFGVDKCAVIHVKRGELAVSDDILVSETVRLRSLSVTETYKYLGMPEALGIMGADVKRSLKERFFSRLTKVLNSFLSGGNKIRAFNGWVMPVLIYSFGILKWTQTELDALDRKVRTLLTAHRMHHPRSSVMRLYIPRRCGGRGILNAKDLHNREVCNLRDYFLHSDVDMHRVVVMVDKGFTPLSLAIENWRKPLVVGIKDREDIWKSKELHGRFYRALHGPDVDRLASVSWLRFGNLFGETEGFVFAIMDEVIKTNNYRKYILKDGTVDICRACHRPGESIRHVISGCSYLANGEYLHRHNLVAKIIHQQIALRYGLVTPEVPYYQYVPQPVLENGHAALYWDRSIITDRTILANKPDIVIIDRLARRAILVDVTIPHDDNLVKAEKDKMSKYLDLAHEVTDMWDVNSTIIVPIVVSAHGLIPKSLDQHLQRLSIGCWVRSQIQKAVLLDTARIVRRFLTLGS

SEQ ID NO: 27060 - protein, 1107 aa, Hyles vespertilio
MRWTHQMNENVMRAYFRATKGGTNLTAYRAQMLSMFQVLEPTVNVSSQRLSDQVRFIQRRKLLDDEALERLRTEACVALDVITPITQRAAETPSIPAADIELVDNLDNTVSPQDQQRLRRTLESAILEYKSIPASCRPRVPRLPTHRRNLALMGALDSIVSTYMESSRDLVDTHSILYCAAVAACRVANVKFPINNVTTTRDVATVPAWQRRIEDRINRARTLIGKLIAFRNGNNRQRVMRFVAQAFSGTNISPRDYGLWVTERIDYYKQKVYAWANRIRRYRKRWDRFQQNRTFQSDQKRVYRCWERSPQCVVDGRLPSVHDMRTYWTNIWSSSISHTEADWFGVVERACESIPIMEAISISPEDVLVAIRPTQNWKSPGPDGLHNFWLKWLPCSHARLAAQFQDALDGGSLPTFMTTGVTHLLYKSGSATDPKNYRPITCLPTTYKLFTSILRAKIANHFTSNNILFPGQTGCKSGSRGTKELLLIDMTICQQARQNRRNLSAAWIDYKKAFDSVPHTWLMRVLSLYKIDTNLCTFLGSCMGQWTTVLRYPGGMVSPDCDEPIRIKRGIFQGDSLSPLWFCMALNPLSTLLVDSGLGYRLRRGTEPISHLLYMDDLKLFASKQTELIELLKITEKFSNSINMEFCVDKCAIIHVKRGEVAVSDGVQISDAVRLRALSETETYKYLGMPEALGILSADVKQSVKERFFGRLAKVLNSLLSGGNKIRAFNGWVMPVLMYSFGILRWTQTELDALDRKVRTLLTAHRMHHPRSSVMRLYIPRRCGGRGILNAKDLHNREVCNLRDYFLHSDVDMHRVVVKIDKGLTPLSLANENWRKPLVMSTKDREEVWKSKELHGRFYRALHGPDVDRPASVSWLRFGNLFGETEGFVFAIMDEVIKTNNYRKYILKDGTVDICRACHRPGESIRHVISGCSYLANGEYLHRHNLVAKIIHQQIALRYGLVTLEMPYYQYVPQPVLENGHATLYWDRSIITDRTIVANKPDIVIIDRLARRAILVDVTIPHDVNLVKAEKDKLSKYLDLAHEVTDMWDVDSTVIVPIVVSAHGLMPKSFDQHLQRLSIGRWVKSQIQKAVLLDTARIVRRFLTLDP

SEQ ID NO: 27061 - protein, 1194 aa, Hyles vespertilio
MTTRASRRNAQMRSPSSSSSASWASASDVFEVTPDIDVSSQRDELQSSPPPPRPARRRGRPPPAVGLGPTGPSVPPTVLATGGVVRRMRWTHQMNENVMRAYFRATKGGTNLTAYRAQMLSMFQVLEPTVNVSSQRLSDQVRFIQRRKLLDDEALERLRTEACVALDVITPITQRAAETPSIPAADIELVDNLDNTVSPQDQQRLRRTLESAILEYKSIPASCRPRVPRLPTHRRNLALMGALDSIVSTYMESSRDLVDTHSILYCAAVAACRVANVKFPINNVTTTRDVATVPAWQRRIEDRINRARTLIGKLIAFRNGNNRQRVMRFVAQAFSGTNISPRDYGLWVTERIDYYKQKVYAWANRIRRYRKRWDRFQQNRTFQSDQKRVYRCWERSPQCVVDGRLPSVHDMRTYWTNIWSSSISHTEADWFGVVERACESIPIMEAISISPEDVLVAIRPTQNWKSPGPDGLHNFWLKWLPCSHARLAAQFQDALDGGSLPTFMTTGVTHLLYKSGSATDPKNYRPITCLPTTYKLFTSILRAKIANHFTSNNILFPGQTGCKSGSRGTKELLLIDMTICQQARQNRRNLSAAWIDYKKAFDSVPHTWLMRVLSLYKIDTNLCTFLGSCMGQWTTVLRYPGGMVSPDCDEPIRIKRGIFQGDSLSPLWFCMALNPLSTLLVDSGLGYRLRRGTEPISHLLYMDDLKLFASKQTELIELLKITEKFSNSINMEFCVDKCAIIHVKRGEVAVSDGVQISDAVRLRALSETETYKYLGIPEALGILSADVKQSVKERFFGRLAKVLNSLLSGGNKIRAFNGWVMPVLMYSFGILRWTQTELDALDRKVRTLLTAHRMHHPRSSVMRLYIPRRCGGRGILNAKDLHNREVCNLRDYFLHSDVDMHRVVVKIDKGLTPLSLANENWRKPLVMSTKDREEVWKSKELHGRFYRALHGPDVDRPASVSWLRFGNLFGETEGFVFAIMDEVIKTNNYRKYILKDGTVDICRACHRPGESIRHVISGCSYLANGEYLHRHNLVAKIIHQQIALRYGLVTLEMPYYQYVPQPVLENGHATLYWDRSIITDRTIVANKPDIVIIDRLARRAILVDVTIPHDVNLVKAEKDKLSKYLDLAHEVTDMWDVDSTVIVPIVVSAHGLMPKSFDQHLQRLSIGRWVKSQIQKAVLLDTARIVRRFLTLDP

SEQ ID NO: 27062 - protein, 1111 aa, Dendrolimus kikuchii
MRWTQELNECVMRAYFEATEGGTNLTSYRGRLLSLFQTLQPASTVTAQRLSDQVRAIQRLHLLDESTLDRLRNTVRINRESTDTPQPTSPAPPADSQWPVNSTMDDVSEGLAVGNVSIQTNEQLRRTLEHSIQEFRDQPILNRPRLPKLPLHRNNLVLMGTLDCLLAPYFRSSADLVDTHSILYCGAVAVCRVAGVKFPNTQPTRPASGKPAWQIRIERRIDRARVLIAKLICFRAGNCRPRVMRFMAQAFAGTNVSPSEYMARATERIDFWKQKVYAWANRIRRYKERADRYFLNRTFQSEEKRVYRGWEKCSDSVTDRQMPNIDAMASFWRNIWSMPVSHTEGDWIELVKQSCEQVPDMEPIIIEPLDVGNAIRSAHNWKSPGLDGLHNFWIKWFKSSHGCLANQFQEAVDRGLLPTFMTTGVTHLLFKSGCTTEPKNYRPITCLPTIYKLLTSILGKKISNYFYDNNILAITQNGCKAGSRGTKELLLIDTTVSQQARRNKRNLSVAWIDYKKAYDSVPHTWLMRVLELYKVDATLRTFLQACMRQWVTHLRLPGGGGASLPEGAINIERGIFQGDSLSPLWFCLALNPLSTLLESSKLGYRFRRGGEIMSHLLYMDDLKLFASNEPDLIELLKTTERFSKSINMEFGIEKCAVMHVRRGKVVNSPNVQLSENISLKSLSETETYKYLGMSESLGIADADVKQTVKDRFFCRLRKVLTSLLSGGNKVRAFNSWVMPVLAYSFGILRWTQTELDALDRRVRCLLTKYRMHHPRSSVMRLYISRRCGGRGFLNAKDLHNREVNNLRAYFLKMDVGLHKDVVAVDKGLTMLSLAKENWCNLAVLSASDRINVWKSKELHGRFYRALTGPDVDLSASVNWLRFGNLFGETEGFVFAIMDEVIKTNNYRKYILKDGTLDICRACHRPGESLRHIVSGCSHLSNGEYLHRHNLVARIIHQQLALRYGLVETEVPYYQYSPEPVLENSRATLYWDRSVITDRTIVANKPDIVIIDRSARRAILVDISIPHDDNLVKKEKEKLSKYLDLAHEVTAMWRLESTSIVPIVVTVNGLIAKSLDCHLERLSLGGWVKGQIQKAALLDTARIVRRFLSLEP

SEQ ID NO: 27063 - protein, 1193 aa, Laothoe populi
MTTRNRVRCARLPSPSSSSSSASWASASEAPEPLPVTDASSQCDGLQSSPPTLTPARRRGRQHPPPVGLGPVGSCAPPMAPAAGGVVRRMRWTHSINENVMRAYFGATEGGTKLTAYRPKMLALFQDLEPTIDVSAQRLSDQVRYIQRRKLLDYAALDRLRANLCVVQDVVQRTVDTPSVPTDDVNIELVDDLDNNVSSHNIQCLRGALESAILEFKLVPACLRPRLPRLPTHKRNLALMGALDSMLPEYMESSRDLVDTHAILYCAAIAACRVANVRFPNDYRAARDATHVPAWQRSIEERIDRTRTLISKLICFKAGNNRPKVMRFVTQAFLGSSIRPQDYRFYVTERIDLLKQKVYAWANRIRRYKKRWNRFQQNRAFQSDQKRVYRCWEHSQQGVGDGRLPAVRDMRTYWANIWSSPVTHTEGAWIGVVERACEAISPMETISISPDDVLRAVRPTQNWKSPGPDGLHNFWLKWFVTSHSRLAAQFQSALESGSLPTFMTTDVTHLLFKSGSTTDPKNYRPITCLPTIYKLFTSIIRFKIAYHIDNNNILFSAQTGCKIGSRGTKELLLIDMAICQQVRHNRRNLSAAWIDYKKAYDSVPHTWLMRVLDLYKIHSNLRTLLGACMRQWTTVLKYPGGAGPLDCDEPIKIDRGIFQGDSLSPLWFCLALNPLSTLLLDSGLGYRLRRGSVPISHLLYMDNLKLFAPKKSDLIELLKITKSFSNSISMEFGVDKCAVIHVGRGAVRVSDDVYFSETERLRSLSESETYKYLGMSEALGIMGADMKQSLKERFFCRLTKVLNSFLSGGNKIRAFNGWVMPVLMYSFGILKWTQTELDALDRRVRTLMTAHRMHHPRSSVMRLYIPRRCGGRGLLNAKDLHNREVRNLRDYFLHSDVDVHREVVKVDKGFTPLSLAHENWRVPVVMSTGDRRGVWKSKELHGRFYRALNGPDVDQLASVSWLRFGDLFGETEGFAFAIMDEVVKTNNYRKYILKDGTVDICRACHRPGESIRHVISGCSYLANGEYLHRHNLVAKIIHQQLALRYHLVISEVPYYQYVPQPVLENGHTTLYWDRSVITDRTIVANKPDIVVIDRLARRAILVDVTIPHDDNLVKAEKDKMSKYLDLAHEVVDMWNVDSAIIVPIVVTANGLIPKSLDQHLQRLSIGRWVKSQIQKAVLLDTARIVRRFLTLGS

SEQ ID NO: 27064 - protein, 1193 aa, Deilephila porcellus
MMKRTRSKHARPTSTSSSSSASWASASDVFEVTPDIDASSQRDELQSSPPPPRPARRRGRPPPVVGLGPVGPSVPPTVPATGGVVRRMRWTQQINENVMRAYFGATKGGTHLTAFCAQMLSVFQVLEPTINVSSQRLSDQVRFIQRRKLLDDEVLERLRTEACVVLDVVTPTTQRAADSPPSPAADIEVVDNLDNTVSPHEEQRLRRTLESAILEYKSIPASCRPRVPRLPTHRRNLALMGALDSMLATYMESSRDLVDTHSILYCAAVAACRVANVKFPNNFTTTRDVTTVPAWQRRIEDRINWARTLIGKLTAFQNGNNRPRVMRFVTQAFSGTNISSRDYRLWVTERIDYYKQKIYAWANRIRRYRRRWDRFQQNRAFQRDEKRVYRCWERSPQSVVDGRLPSVHDMRSYWENIWSSSVSHTETDWFGVVERACECIPTMGAISISPEDVLFAIRPAQNWKSPGPDGLHNFWLKWFPSSHVRLAAQFQDALDGGSLPTFMTTGVTHLLYKSGSTTDPKNYRPITCLPTIYKLFTSILRAKLSDHFTLNNILFSGQTGCKNGSRGTKELLIIDMTICQQARHNRRNLSAAWIDYKKAFDSVPHTWLRRVLNLYKIDTNLCTFLGSCMGQWTTVLRYPGGTVPPDCDEPIRIKRGIFQGDSLSPLWFCMALNPLSTLLLHSGLGYRLRRGSEPISHLLYMDDLKLFASKQSELIELLKITEKFSNSINMEFGVDKCAVIHVKRGKVTVSDDIQVSETVRLRSLSETETYKYLGMSESLGILSADVKQSLKERFFSRLTKVINSFLSGGNKIRAFNGWVMPVLMYSFGILRWTQTELDALDRKVRTLLTAHRMHHPRSSVMRLYIPRRCGGRGILNAKVLHNREVCNLRDYFLHSDVGMHRAVVSVDKRLTPLSLANENWRKPLVMSVRDREEIWRSKELHGRFYRALHGPDVDRPASVSWLRFGNLFGETEGFIFAIMDEVIKTNNYRKYILKDGTVDICRACHRPGESIRHVISGCSYLANGEYLHRHNLVAKIIHQQIALRYKLVTPEVPYYQYVPQPVLKNGHATLYWDRSVITDRTIVANKPDIVIIDRCARRAILVDVTVPHDDNLVKAEKDKLSKYSDLAHEVTDMWDVDSTIIVPIVVSAHGLIAKSLDQHLQRLSIGRWVKSQIQKAVLLDTARIVRRFLTLDP

SEQ ID NO: 27065 - protein, 1194 aa, Hyles vespertilio
MTTRASRRNAQMRSPSSSSSASWASASDVFEVTPDIDVSSQRDELQSSPPPPRPARRRGRPPPAVGLGPTGPSVPPTVLATGGVVRRMRWTHQMNENVMRAYFRATKGGTNLTAYRAQMLSMFQVLEPTVNVSSQRLSDQVRFIQRRKLLDDEALERLRTEACVALDVITPITQRAAETPSIPAADIELVDNLDNTVSPQDQQRLRRTLESAILEYKSIPASCRPRVPRLPTHRRNLALMGALDSIVSTYMESSRDLVDTHSILYCAAVAACRVANVKFPINNVTTTRDVATVPAWQRRIEDRINRARTLIGKLIAFRNGNNRQRVMRFVAQAFSGTNISPRDYGLWVTERIDYYKQKVYAWANRIRRYRKRWDRFQQNRTFQSDQKRVYRCWERSPQCVVDGRLPSVHDMRTYWTNIWSSSISHTEADWFGVVERACESIPIMEAISISPEDVLVAIRPTQNWKSPGPDGLHNFWLKWLPCSHARLAAQFQDALDGGSLPTFMTTGVTHLLYKSGSATDPKNYRPITCLPTTYKLFTSILRAKIANHFTSNNILFPGQTGCKSGSRGTKELLLIDMTICQQARQNRRNLSAAWIDYKKAFDSVPHTWLMRVLSLYKIDTNLCTFLGSCMGQWTTVLRYPGGMVSPDCDEPIRIKRGIFQGDSLSPLWFCMALNPLSTLLVDSGLGYRLRRGTEPISHLLYMDDLKLFASKQTELIELLKITEKFSNSINMKFCVDKCAIIHVKRGEVAVSDGVQISDAVRLRALSETETYKYLGMPEALGILSADVKQSVKERFFGRLAKVLNSLLSGGNKIRAFNGWVMPVLMYSFGILRWTQTELDALDRKVRTLLTAHRMHHPRSSVMRLYIPRRCGGRGILNAKDLHNREVCNLRDYFLHSDVDMHRVVVKIDKGLTPLSLANENWRKPLVMSTKDREEVWKSKELHGRFYRALHGPDVDRPASVSWLRFGNLFGETEGFVFAIMDEVIKTNNYRKYILKDGTVDICRACHRPGESIRHVISGCSYLANGEYLHRHNLVAKIIHQQIALRYGLVTLEMPYYQYVPQPVLENGHATLYWDRSIITDRTIVANKPDIVIIDRLARRAILVDVTIPHDVNLVKAEKDKLSKYLDLAHEVTDMWDVDSTVIVPIVVSAHGLMPKSFDQHLQRLSIGRWVKSQIQKAVLLDTARIVRRFLTLDP

SEQ ID NO: 27066 - protein, 1197 aa, Hyles vespertilio
MFHNKARKKRNAHLTSPSSSSSASWASASDVFEVTPDNDASSQHGELQSSPPPPRPAQRRGRPPPAVGLGPVGPSVPPTVPATGGVVRRMRWTREINENVMRAYFGATNGGINLTAYRVKMLSLFQALESTVDVSSQRLSDQVRFIQRRKLLDDDTLERLRTDLCFVQEDHVSPVSGDQAAGPTPTPVADFELTDNLDDNVSPQDKQQLRGALECAILEFASLSASCRPRLPRLPTHRRNLALMGALDSMLPTYLESSRDLVDTHSILYCAAVAACRVANVQFPKEYRATRGVVTVPAWQRRIEDRINRARTLIGKLISFKEGNSRPKIMRFVTQAFSGTNTSPRNYRLCVTERIDFFKQKVYAWANRIRRYRRRWDRFQQNRKFQTDQKRVYRCWENPPQGVVDGRLPSAHEMREYWTNIWSSPVSHTEASWFSVVDRACEAIPAMETILINPEDVLTAIRQTQNWNSPGPDGLHNFWLKWFPSSHARLAVQFQDALERGSLPAFMTTGVTHLLFKSGCTTEPKNYRPITCLPTIYKVLTSIIRSKITDHINSNQILFSGQTGCMNGSRGTKELLLINMTICQQARHNRRNLSAAWIDYKKAYDSVPHTWLMRVLNLYKINTNLCNFLGSCMGQWTTVLRYPGGTVPPDCDEPIRIKRGIFQGDSLSPLWFCMALNPLSTLLLDSGLGYRLRRGSEPISHLLYMDDLKLFASKQTELIELLKITDIFSKSINMDFGVDKCAVIHVKRGEVAVSDDILVSETVRLRSLSVTETYKYLGMPEALGIMGADVKRSLKERFFSRLTKVLNSFLSGGNKIRAFNGWVMPVLMYSFGILKWTQTELDALDRKVRTLLTAHRMHHPRSSVMRLYIPRRCGGRGILNAKDLHNREVCNLRDYFLHSDVDMHRVVVMVDKGFTPLYLAIENWRKPLVVGIKDREDIWKSKELHGRFYRALHGPDVDRLASVSWLRFGNLFGETEGFVFAIMDEVIKTNNYRKYILKDGTVDICRACHRPGESIRHVISSCSYLANGEYLHRHNLVAKIIHQQIALRYGLVTPEVPYYQYVPQPVLENGHATLYWDRSITTDRTIPANKPDIVIIDRLARRAILVDVTIPHDDNLVKAEKDKMSKYLDLAHEVADMWDVDSTIIVPIVVSAHGLIPKSLDQHLQRLSIGCWVRSQIQKAVLLDTARIVRRFLTLGS

SEQ ID NO: 27067 - protein, 1197 aa, Hyles vespertilio
MFHNKARKKRNAHLTSPSSSSSASWASASDVFEVTPDNDASSQHGELQSSPPPPRPAQRRGRPPPAVGLGPVGPSVPPTVPATGGVVRRMRWTREINENVMRAYFGATNGGINLTAYRVKMLSLFQALEPTVDVSSQRLSDQVRFIQRRKLLDDDTLERLRTDLCFVQEDHVSPVSGDQAAGPTPTPVADFELTDNLDDNVSPQDKQQLRGALECVILEFASLSASCRPRLPRLPTHRRNLALMGALDSMLPTYLESSRDLVDTHSILYCAAVAACRVANVQFPKEYRATRGVVTVPAWQRRIEDRINRARTLIGKLISFKEGNSRPKIMRFVTQAFSGTNTSPRNYRLCVTERIDFFKQKVYAWANRIRRYRRRWDRFQQNRKFQTDQKRVYRCWENPPQGVVDGRLPSAHEMREYWTNIWSSPVSHTEASWFSVVDRACEAIPAMETILINPEDVLTAIRQTQNWKSPGPDGLHNFWLKWFPSSHARLAVQFQDALERGSLPAFMTTGVTHLLFKSGCTTEPKNYRPITCLPTIYKVLTSIIRSKITDHINSNQILFFGQTGCMNGSRGTKELLLINMTICQQARHNRRNLSAAWIDYKKAYDSVPHTWLMRVLNLYKINTNLCNFLGSCMGQWTTVLRYPGGTVPPDCDEPIRIKRGIFQGDSLSPLWFCMALNPLSTLLLDSGLGYRLRRGSEPISHLLYMDDLKLFASKQTELIELLKITDIFSKSINMDFGVDKCAVIHVKREEVAVSDDILVSETVRLRSLSVTETYKYLGMPEALGIMGADVKRSLKERFFSRLTKVLNSFLSGGNKIRAFNGWVMPVLMYSFGILKWTQTELDALDRKVRTLLTAHRMHHPRSSVMRLYIPRRCGGRGILNAKDLHNREVCNLRDYFLHSDVDMHRVVVMVDKGFTPLYLAVENWRKPLVVGIKDREDIWKSKELHGRFYRALHGPDVDRLASVSWLRFGNLFGETEGFVFAIMDEVIKTNNYRKYILKDGTVDICRACHRPGESIRHVISSCSYLANGEYLHRHNLVAKIIHQQIALRYGLVTPEVPYYQYMPQPVLENGHATLYWDRSIITDRTIPANKPDIVIIDRLARRAILVDVTIPHDDNLVKAEKDKMSKYLDLTHEVADMWDVDSTIIVPIVVSAHGLIPKSLDQHLQRLSIGCWVRSQIQKAVLLDTARIVRRFLTLGS

SEQ ID NO: 27068 - protein, 868 aa, Hyles vespertilio
MRFVTHAFSGTNTSPRNYRLCVTERIDFFKQKVYAWANRIRRYRRRWDRFQQNRKFQTDQKSVYRCWENPPQGVVDGRLPSAHEMREYWTNIWSSPVSHTEASWFSVVDRACEAIPAMETILISPEDVLTAIRQTQNWKSPGPDGLHNFWLKWFPSSHARLAAQFQNALERGSLPTFMTTGVTHLLFKSGCTTEPKNYRPITCLPTIYKVLTSIIRSKITDHINSNQILFSGQTGCMNGSRGTKELLLINMTICQQARHNRRNLSAAWIDYKKAYDSVPHTWLMRVLNLYKINTNLCNFLGSCMGQWTTVLRYPGGTVPPDCDEPIRIKRGIFQGDSLSPLWFCMALNPLSTLLLDSGLGYRLRRGSEPISHLLYMDDLKLFASKQTELIELLKITERFSNSINMDFGVDKCAVIHVKRGEVAVSDDILVSETVRLRSLSVTETYKYLGMPEALGIMGADVKRSLKERFFSRLTKVLNSFLSGGNKIRAFNGWVMPVLIYSFGILKWTQTELDALDRKVRTLLTAHRMHHPRSSVMRLYIPRRCGGRGILNAKDLHNREVCNLRDYFLHSDVDMHRVVVMVDKGFTPLSLAIENWRKPLVVGIKDREDIWKSKELHGRFYRALHGPDVDRLASVSWLRFGNLFGETEGFVFAIMDEVIKTNNYRKYILKDGTVDICRACHRPGESIRHVISGCSYLANGEYLHRHNLVAKIIHQQIALRYGLVTPEVPYYQYVPQPVLENGHATLYWDRSIITDRTILANKPDIVIIDRLARRAILVDVTIPHDDNLVKAEKDKMSKYLDLAHEVTDMWDVDSTIIVPIVVSAHGLIPKSLDQHLQRLSIGCWVRSQIQKAVLLDTARIVRRFLTLGS

SEQ ID NO: 27069 - protein, 1192 aa, Eilema sororculum
MLTRAQANRNRSAPTTSPDSSLSSAAQPPAVEPAASSSSSSDEFFSPPTSPTPVRRPGRGRPPTYLGPRRPPASNRAPATGGNVHRMRWTNSINENVMRAYFAATEGGTNLSAYRTRMLPLFQALEPTINTSAQRLSDQVRVIQRNRMLNETVLETLRLECLRNICVTPAPAPAPASTAGINDVTYVAPDDTPIPVSIQYNEEIKEALECALREYRSMPVHVRPRLPRLPIHRRNIALVSALDSLLPRYLENSENLGDTHSILYCTAVAACRIAGAKFPIKHPAIRPKPVIPAWQCRIERRVAEARVLIGKLICFRSGNTRPRVMRYVTRAFAGTDISPQDYTSRVTERIDFLKQKVYAWANRIRRYKKRVDRYTINCMFQRDQRWVYRSWERTEESVDDVRRPDAEATNAFWRSIWSVPVSHTEGDWMREVERACETIPEMEDINIDAIDVDCAVRSLSNWKSPGPDGLHNFWLKWLRSSHVVLASQFQSAIESGTLPAFMTTGVTHLLHKTGSTLEPNNYRPITCLPTVYKLLTSILRAKINNHINNNSIMCASQNGCRNGARGTKELLLIDMTISQQARRNRKDLAACWIDYKKAFDSVPHTWLLRVLELYKVNTTLCTFLRSCMGQWRTVLFYPGCRQALGSGVPITIERGIFQGDSLSPLWFCLALNPLSTLLVNSGLGYRLRREGQMVSHLFYMDDLKLFAHTNPQLIALLKITETFSNSIKMAFGVDKCAVIHVKRGRVVESEGIQLSDSTNLRSLLVTETYKYLGMSQALCINEAGMKQMLQDRFFGRLKKVLNSLLSGGNKVRACNSWVMPLLMYSFGILKWTQTELDTIDRKVRAQLTAFRMHHPRSSVMRLYIPRKCGGRGFLNAKTLHNREVCNLRDYFLKSNVDMHRDVVNVDTGLTPLGLAKENWRRPTIVGTDSRREVWQSKELHGRFYRALHRPEVDLLASVSWLRFSDLFGETEGFVCAIADEVIKTNNYRKYIMRDGTIDICRACHQPGESLRHITSGCSRLANGEYLHRHNQVARIIHQRLALKYNLVEVEVPYYRYVPEPVLENSHITLYWDRSIITDRTVVANKPDIVVIDRSERRALIVDVTIPHDENLVKAEKDKQVKYLDLAHEIVDMWNVDSAIIVPIVVSVNGLIAKSLDQHLKRLGLDGWVKGQMQKAVLLDTARIVRKFLSLEP

SEQ ID NO: 27070 - protein, 954 aa, Laothoe populi
MGALDSMLPEYMESSRDLVDTHAILYCAAIAACRVANVRFPNDYRAARDATHVPAWQRRIEERIDRTRTLISKLICFKAGNNRPKVMRFVTQAFLGSSIRPQDYRFCVTERIDLLKQKVYAWANRIRRYKKRWNRFQQNRAFQSDQKRVYRCWEHSQQGVGDGRLPDVRDMRTYWANIWSSPVSHTEGAWIGVVERACEAISPMETISISPDDVLRAVRPTQNWKSPGPDGLHNFWLKWFVTSHSRLAAQFQSALESGSLPTFMTTGVTHLLFKSGSTTDPKNYRPITCLPTIYKLFTSIIRFKIAYHIDNNNILFSAQTGCKIGSRGTKELLLIDMAICQQVRHNRRNLSAAWIDYKKAYDSVPHTWLMRVLDLYKIHSNLRTLLGACMRQWTTVLKYPGGAGPLDCDEPIKIDRSIFQGDSLSPLWFCLALNPLSTLLLDSGLGYRLRRGSVPISHLLYMDDLKLFAPKKSDLIELLKITKSFSNSISMEFGVDKCAVIHVGRGAVRVSDDVYLSETERLRSLSESETYKYLGMSEALGIMGADMKQSLKERFFCRLTKVLNSFLSGGNKIRAFNGWVMPVLMYSFGILKWTQTELDALVRRVRTLMTAHRMHHPRSSVMRLYIPRRCGGRGLLNAKDLHNREVRNLRDYFLHSDVDVHREVVKVDKGFTPLSLANENWRVPVVMSTGDRKGVWKSKELHGRFYRALNGPDVDQLASVSWLRFGDLFGETEGFVFAIMDEVVKTNNYRKYILKDGTVDICRACHRPGESIRHVISGCSYLANGEYLHRHNLVAKIIHQQLALRYHLVISEVPYYQYVPQPVLENGHTTLYWDRSIITDRTIVANKPDIVVIDRLARRAILVDFTIPHDDNLVKAEKDKMSKYLDLAHEVVDMWNVDSAIIVPIVVTANGLIPKSLDQHLQRLSIGRWVKSQIQKAVLLDTARIVRRFLTLGS

SEQ ID NO: 27071 - protein, 1111 aa, Dendrolimus punctatus
MRWTQELNECVMRAYYEATEGGTNLTSYRGRLLSLFQTLQPASAVTAQRLSDQVRAIQRLHLLDESTLDRLRNAVRINRENTDTPQPTSPTTPADSQGTVNFTIDDVSDSIAVGNVSIQINEQLRRTLEHSIQEFRDQPILNRPRVPKLPLHRNNLLLMGALDCLLAPYFGSSADLVDTHSILYCGAVAVCRVAGVKFPNTQPTRPASGKPAWQIRIERRIDRARVLIAKLICFRAGNCRPRVVRFVAQAFTGTDVSPSEYMARATERIDFWKQKVYAWANRIRRYKERADRYFLNRTFQSEEKRVYRGWEKSRDSVADRQIPNIDAMASFWRSIWSMPVSHTEGDWIELVKQSCDQVPDMEPITIEPLDVGNATRSAHNWKSPGPDGLHNFWIKWFKSSHSCLANQFQEAVDRGSLPTFMTTGVTHLLFKSGCTTEPKNYRPITCLPTIYKLLTSILGKKLSNYFYNNNILAITQNGCKAGSRGTKELLLIDTTVSQQARRNRRNLSVAWIDYKKAYDSVPHTWLMRVLELYKVDATLRTFLQACMRQWVTHLKLPGGRGPSLPEGAINIERGIFQGDSLSPLWFCLALNPLSTLLESSKLGYRFRRGGEIMSHLLYMDDLKLFASNEPDLIELLKTTERFSKSINMEFGIEKCAVMHVRRGKVVNSPNLQLSENMSLKSLSETETYKYLGMSESLGIADADVKQTVKDRFFCRLRKVFTSLLSGGNKVRAFNSWVMPVLAYSFGILRWTQTELDALDRRVRCLLTKHRMHHSRSSVMRLYISRRCGGRGFLNAKDLHNREVNNLRTYFLKMDVGLHKDVVAVDKGLTTLSLANENWCNLAVLSASDRINVWKSKALHGRFYRALTGPDVDLSASVNWLRFGNLFGETEGFVFAIMDEVIKTNNYRKYILKDGTLDICRACHRPGESLRHIVSGCSHLSNGEYLHRHNLVARIIHQQLALRYGLVETEVPYYQYSPEPVLENSRATLYWDRSITTDRTIVANKPDIVIIDRSARRAILVDISIPHDDNLVKKEKEKLSKYLDLAHEVTAIWRLESTSIVPIVVTVNGLIAKSLDRHLERLSLGSWVKGQIQKAALLDTARIVRRFLSLEP

SEQ ID NO: 27072 - protein, 1111 aa, Dendrolimus punctatus
MRWTQELNECVMRAYYEATEGGTNLTSYRGRLLSLFQTLQPASAVTAQRLSDQVRAIQRLHLLDESTLDRIRNAVRINRESTDTPQPTSPATPADSQGAVNFTIDDVSDSIAVGNVSIQINEQLRRTLEHSIQEFRDQPILNRPRVPKLPLHRNNLLLMGALDCLLAPYFGSSADLVDTHSILYCGAVAVCRVAGVKFPNTQPTRPASGKPAWQIRIERRIDRARVLIAKLICFRAGNCRPRVVRFVAQAFTGTNVSPSEYMARATERIDFWKQKVYAWANRIRRYKERADRYFLNRTFQSEEKRVYRGWEKSRDSVADRQMPNIDAMASFWRSIWSMPVSHTEGDWIELVKQSCDQVPDMEPITIEPLDVGNAIRSAHNWKSPGPDGLHNFWIKWFKSSHSCLANQFQEAVDRGSLPTFMTTGVTHLLFKSGCTTEPKNYRPITCLPTIYKLLTSILGKKLSNYFYNNNILAITQNGCKAGSRGTKELLLIDTTVSQQARRNRRNLSVAWIDYKKAYDSVPHTWLMRVLELYKVDATLRTFLQTCMRQWVTHLKLPGGRGPSLPEGAINIERGIFQGDSLSPLWFCLALNPLSTLLESLKLGYRFRRGGEIMSHLLYMDDLKLFASNEPDLIELLKTTERFSKSINMEFGIEKCAVMHVRRGKVVNSPNLQLSENMSLKSLSETETYKYLGMSESLGIADADVKQTVKDRFFCRLRKVLTSLLSGGNKVRAFNSWVMPVLAYSFGILRWTQTELDALDRRVRCLLTKHRMLHPRSSVMRLYISRRCGGRGFLNAKDLHNREVNNLRTYFLKMDVGLHKDVVAVDKGLTTLSLANENWCNLAVLSASERINVWKSKALHGRFYRALTGPDVDLSASVNWLRFGNLFGETEGFVFAIMDEVIKTNNYRKYILKDGTLDICRACHRPGESLRHIVSGCSHLSNGEYLHRHNLVARIIHQQLALRYGLVETEVPYYQYSPEPVLENSCATLYWDRSIITDRTIVANKPDIVIIDRSARRAILVDISIPHDDNLVKKEKEKLSKYLDLAHEVTAMWRLESTSIVPIVVTVNGLIAKSLDRHLERLSLGSWVKGLIQKAALLDTARIVRRFLSLEP

SEQ ID NO: 27073 - protein, 1194 aa, Hemaris fuciformis
MNKNAKKTHARKTSPSSSSSSASWASASEIFEPSPGNDASSQIDGLQSSPPPLRPARRGGRRPPPACLGPVGPRVLPTAPATGGVVRRMRWTTSINENVMRAYFGATEGGTKLTAYRSKMLALFQALEPTIDVSAQRLSDQVRYIQRRKALGDEVLDRLRADLRVVQENFDPAPTQQIVDPSPPPDTSCDINNLDNIVSSDDNQRLRRALEDAISEFAPVPASSRPCLPRLPTHRRNLALMGTLDSILPSYLESSRDLIDTHSMLYCAAVAACRVANVKFLNQVRTTPKVVTVPAWQRRIEHRIDWARTLISKLICFKEGNNRPKIMRFVTQAFSGTNIQPGDYRLCVTERIDFFKQKLYAWANRIRRYKKRSDRFRINRAFQSDQKRVYRCWEHSQQSVEDGRLPGASNMHTYWKSIWSSSVSHTEGSWISVVNQACKDISTMETILISPNDVSVAIRSTQNWKSPGADGLQNFWLKWFPSVHALLAAQFQEAINIGSLPTFMTTGITHLLYKSGTTTDPKNYRPITCLPTIYKLLTSIIRNKISIHIKNNSILFSGQTGCKLGSRGTKELLLIDMTICQQARQNRKNLSVAWIDYKKAYDSVPHTWLKRVFNLYKLDTTLCNFLEACMGQWTTVLKYPGTTCSSDCLEPIRIERGIFQGDSLSPLWFCLALNPLSTLLLDSRLGYCLRRGTEPISHLLYMDDLKLFASKSTELIELLKITQRFSNSINMEFGVDKCAVMHVKRGEIVVSDDIQVSETVRLRSLSEAETYKYLGMSESLGILSSDVKLSLKERFFSRLRKVLNSLLSGGNKIRAFNGWVMPVLMYSFGVLKWTQTELDALDRKIRTLLTAHRMHHPRSSVMRLYIPRRCGGRGLLNAKDLHNREICNLRDYFLHSDESMHGVVVMTDKGFTPLSLANENWRRPMVLGVSERREIWKRKELHGRFFRALNGSDVDQLASVTWLRFGNLFGETEGFVFAIMDEVIKTNNYRKYIMKDGTVDICRACHRPGESIRHVISGCSYLANGEYLHRHNLVAKIIHQQLALRYHLVTDEVPYYQYVPHPVLENSHATLYWDRSVITDRTIVANKPDIVIVDRLARRAMLVDVTIPHDDNLVKAEKDKMSKYLDLAHEVTDMWDVDSTVIVPIVVTANGLIPKSLDQHLRRLSIGCWVKTQIQKAVLLDTARIVRRFLTLEP

SEQ ID NO: 27074 - protein, 1106 aa, Hemaris fuciformis
MRWTTSINENVMRAYFGATEGGTKLTAYRSKMLALFQALEPTIDVSAQRLSDQVRYIQRRKALGDEVLDRLRADLRVVQENFDPAPTQQIVDPSPPPDTSCDINNLDNIVSSDDNQRLRRALEDAISEFAPVPASSRPCLPRLPTHRRNLALMGTLDSILPSYLESSRDLIDTHSMLYCAAVAACRVANVKFLNQVRTTPKVVTVPAWQRRIEHRINWARTLISKLICFKEGNNRPKIMRFVTQAFSGTNIQPGDYRLCVTERIDFFKQKLYAWANRIRRYKKRSDRFRINRAFQSDQKRVYRCWEHSQQSVEDGRLPSASNMHTYWKSIWSSSVSHTEGPWINVVNQACKDISTMETILISPNDVSVAIRSTQNWKSPGADGLQNFWLKWFPSVHALLAAQFQEALNIGSLPTFMTTGITHLLYKSGTTTDPKNYRPITCLPTIYKLLTSIIRNKISIHIKNNSILFSGQTGCKLGSRGTKELLLIDMTICQQARQNRKNLSVAWIDYKKAYDSVPHAWLKRVFNLYKIDTTLCNFLEACMGQWTTVLKYPGTTCSSDCLEPIRIERGIFQGDSLSPLWFCLALNPLSTLLLDSGLGYCLRRGTEPISHLLYMDDLKLFASKSTELIELLKITQNFSNSINMEFGVDKCAVMHVKRGEIVVSDDIQVSETVRLRSLSEAETYKYLGMSESLGILSSDVKLSLKERFFSRLRKVLNSLLSGGNKIRAFNGWVMPVLMYSFGVLKWTQTELDALDRKIRTLLTAHRMHHPRSSVMRLYIPRRCGGRGLLNAKDLHNREICNLRDYFLHSDESMHGVVVMTDKGFTPLSLANENWRRPMVLGVSERREIWKSKELHGRFFRALNGSDVDQLASVTWLRFGNLFGETEGFVFAIMDEVIKTNNYRKYIMKDGTVDICRACHRPGESIRHVISGCSYLANGEYLHRHNLVAKIIHQQLALRYHLVTDEVPYYQYVPHPVLENSHATLYWDRSVITDRTIVANKPDIVIVDRLARRAMLVDVTIPHDDNLVKAEKDKISKYLDLAHEVTDMWDVDSTVIVPIVVTANGLIPKSLDQHLRRLSIGCWVKTQIQKAVLLDTARIVRRFLTLEP

SEQ ID NO: 27075 - protein, 1143 aa, Hyles vespertilio
MASCSRPRRHQDLRGEEDDPLQRWAWDLWGRVSRRMRWTQELNENVMRAYFGATKGGTKLTAYRAKMLSLIQALEPTVDVSSQRLSDQVRFIQRRKLLDDQVLERLRTDLCVIQDVNVPSVTVDQAADTPPTPAANIDLTDDMNSNVSLQDEQRLRGALERAISEFVSLPASCRPRLPRLPTHRRNLMLVGALDSMLPTYLESSRDLVDVHSILFCAAVAACRVANVKFPSDFKATRDVVTVPAWQRRIEDRINRARILIGKLISFREGNSRPKIMRFVTQAFSGTNTSPRNYRLCVTERIDFYKQKIYAWANRIRRYRKRWDRFQQNRMFQSNQKRVYRCWENSQQGVGDGRLPSAHEMREYWANIWSSPVSHTEAPWFGVVDRACEAIPAMETILISPKDVLAAIRPTQNWKSPGPDGLHNFWLKWFLSSHARLATQFQDALERGSLPTFMTTGVTHLLFKSGVTTEPKNYRPITCLPTIYKVLTSIIRSKITDHISSNQILYFGQTGCMNGSRGTKELLLIDMTICQQARHHGRNLSAAWIDYKKAYDSVPHTWLMRVLNLYKIDTNLCNFLGSCMGQWTTVLRYPGGTAPPDCDEPIRIKRGIFQGDSLSPLWFCMALNPLSTLLLDSGLGYRLRRGSEPISHLLYIDDLKLFASKQSELIELLKITETFSNSINMEFGVDKCAVIHVKRGEVAVSDDIQVSETVSLRSLSVTETYKYLGMPEALGIMGADLKQSMKERFFSRLTKVLNSFLSGGNKIRAFNGWVMPVLMYSFGILKSTQTELDALDRKVRTLLTAHRMHHPRSSVMRLYIPRRCGGRGILNAKDLHNREVCNLRDYFLHSDVDMHRVVVMVDKGFTPLSLAIENWRKPLVVGIRDREDIWKSKELHGRFYRAFHGPDVDRLASVSWLRFGNLFGETEGFVFAIMDEVIKTNNYRKYILKDGTVDICRACHRPGESIRHVISGCSYLANGEYLHRHNLVAKIIHQQIALRYGLVTSEVPYYQYVPQPVLENGHAKLYWDRSVITDRTIVANKPDIVIIDRLARRAILVDVAIPHDDNLVKAEKDKMSKYFDLAHEVADMWDVDSTIIVPIVVSAHGLIPKSLDQHLQRLSIGCWVKSQIQKAVLLDTARIVRRFLTLSP

SEQ ID NO: 27076 - protein, 1039 aa, Hyles vespertilio
MRLRTEACVALDVITPITQRAAETPSIPAADIQLVDNLDNTVSPQDQQRLRRTLESAILEYKSIPASCRPRVPRLPTHRRNLALMGALDSIVSTYMESSRDLVDTHSILCCAAVAACRVANVKFPINNVTTTRDVATVPAWQRRIEDRINRARTLIGKLIAFRNGNNRQSVMRFVAQAFSGTNISPRDYGLWVTERIDYYKQKVYAWANRIRRYRKRWGRFQQNRTFQSDQKRVYRCWERSPQCVVDGRLPSVHDMRNYWANIWSSSISHTEADWFGVIERACESIPIMEAISISPEDVLVAIRPTQNWKSPGPDGLHNFWLKWLPCSHARLAAQFQDALDGGSLPTFMTTGVTHLLYKSGSTTDPKNYRPITCLPTTYKLFTSILRAKIANHLTSNNILFPGQTGCKSGSRGTKELLLIDMTICQQARQNRRNLSAAWIDYKKAFDSVPHTWLMRVLSLYKIDTNLCTFLGYCMEQWTTVLRYPGGMVSPDCDEPIRIKRGIFQGDSLSPLWFCMALNPLSTLLVDSGLGYRLRRGTEPISHLLYMDDLKLFTSKQTELIELLKITEKFCSSIKMEFGVDKCAIIHVKRGEVAVSDGVQVSDALRLRSLSETETYKYLGMPEALGILSADVKQSVKERFFGRLAKVLNSLLSGGNKIRAFNGWVMPVLMYSFGILRWTQTELDALDRKVRTLLTAHRMHHPRSSVMRLYIPRRCGGRGILNAKDLHNREVCNLRDYFLHSDVDMHRVVVKIDKGLTPLSLANENWRKPLVMSTKDREEVWKSKELHGRFYRALHGPDVDRPASVSWLRFGNLFGETEGFFFAIMDEVIKTNNYRKYILKDGTVDICRACQRPGESIRHVISGCSYLANGEYLHRHNLVAKIIHQQIALRYGLVTLEMPYYQYVPQPVLENGHATLYWDRSIITDRTILANKPDIVIIDRLARRAILVDVTIPHDDNLVKAEKDKMSKYLDLAHEVTDMWDVDSTVIVPIVVSAHGLMPKSFDQHLQRLSIGRWVKSQIQKAVLLDRARIVRRFLTLDP

SEQ ID NO: 27077 - protein, 1197 aa, Hyles vespertilio
MINNKARKKRNAHLTSSSSSSSGSWASASDVFEVTPDNDASSQHGELQSSPPPPRPARRRGRPPPAVGLGPMGPSVPPTVPATGGVVRRMRWTREINENVMRAYFGATKGGINLIAYRAKMLSLFQALEPTVDVSSQRLSDQVRFIQRRKLLDDDTLERLRTDLCFVQDDHVSPVSGDQAAGPTPTPVANFELTDNLDDNVSPQVKQQLRGALERAILEFTSLSASCKPRLPRLPTHRRNFALMGALDSMLTTYLESSRDLVDTHSILYCAAVAACRVANIKFPNEYKATRGVVIVPAWQRRIEDRINRARTLIGKLISFKEGNSRPKIMRFVTQAFSGTNTSPRNYRLCVTERIDFFKQKVYAWANRIRRYRRRWDRFQQNRKFQTDQKRVYRCWENPPQGVVDGRLPSAHEMREYWTNIWSLPVSHTEASWFSVVDRACEAIPAMETILISPEDVLTAIRQTQNWKSPGPDGLHNFWLKWFPSSHARLAAQFQDALERGSLPTFMTTGDTHLLFKSGCTTEPKNYRPITCRPTIYKVLTSIIRSKITDHINSNQILFSGQTSCMNGSRGTKELLLINMTICQQVRHNRRNLSAAWIDYKKAYDSVPHAWLMRVLNLYKINTNLCNFLGSCMGQWTTVLRYPGGTVPPDCDEPIRIKRGIFQGDSLSPLWFCMALNPLSTLLLDSGLGYRLRRGSEPISHLLYMDDLKLFASKQTELIELLKITERFSNSINMDFGVDKCAVIHVKRGEVAVSDDILVSETVRLRSLSVTETYKYLGMPEALGIMGADVKRSLKERFFSRLTKVLNSFLSGGNKIRAFNGWVMPVLIYSFGILKWTQTELDALDRKVRTLLTAHRMHHPRSSAMRLYIPRRCGGRGILNAKDLHNREVCNLRDYFLHSDVDMHRIVVMVDKGFTPLSLAIENWRKPLVVGIKDREDIWKSKELHGRFYRALHGPDVDRLASVSWLRFGNLFGETEGFVFAIMDEVIKTNSYRKYILKDGTVDICRACHRPGESIRHVISGCSYLANGEYLHIHNLVAKIIHQQIALRYGLVTPEVPYYQYVPQPVLENGHATLYWDRSIITDRTILANKPDIVIIDRLARRAILVEVTIPHDDNLVKAEKDKMSKYLDLTHEVTDMWDVDSTIIVPIVVSAHGLIPKSLDQHLQRLSIGCWVRSQIQKAVLLDTARIVRRFLTLGS

SEQ ID NO: 27078 - protein, 1195 aa, Hyles vespertilio
MITRARRRIARSRSPSSSSSASWASASDVFELTPNFDVSSQHGELQSSPPPPRPARRRGRPPSAVGLGPVGPSVPPTVPATGGVVRRMRWTQELNENVMRAYFGATKGGTKLTAYRAKMLSLFQALEPTVDVSSQRLSDQVRFIQRRKLLDDQVLERLRTDLCVVQDVNVPSVTVDQAADTPPTPAANIDLTDDMNSNVSPQDEQRLRGAFERAISEFVSLPASCRPRLPRLPTHRRNLMLVGALDSMLPTYLESSRDLVDTHSILFCAAVAACRVANVKFPSDFKATRDVVTVPAWQRRIEDRINRARILIGKLISFREGNSRPKIMRFVTQAFSGTNTSPRNYRHCVTERIDFYKQKVYAWANRIRRYRKRWDRFQQNRMFQSDQKRVYRCWENSQQGVGDGRLPSAHEMREYWANIWSSPVSHTEAPWFGVVDRACEAIPAMETILISPEDVLAAIRPTQNWKSPGPDGLHNLWLKWFPRSHARLATQFQDALERGSLPTFMTTGVTHLLFKSGVTTEPKNYRPITCLPTIYKVLTSIIRSKITDHISSNQILYFGQTGCMNGSRGTKELLLIDMTICQQAHHHRRNLSAAWIDYKKVYDSVPHTWLMRVLNLYKIDTNFCNFLGSCMGQWTTVLRYPGGTAPPDCDEPIRIKRGIFQGDSLSPLWFCMALNPLSTLLLDSGLGYRLRRGSEPISHLLYMDDLKLFASKQSELIELLKITETFSNSINMEFGVDKCAVIHVKRGEVAVSDDIQVSETVSLRSLSVTETYKYLGMPEALGIMGADVKQSMKERFFSRLTKVLNSFLSGGNKIRAFNGWVMPVLMYSFGILKWTQTELDALDRKVRNLLTAHRMHHPRSSVMRLYIPRRCGGRGILNAKDLHNREVCNLRDYFLHSDVDMHRVVVMVDKGFTPLSLAIENWRKPLVVGIRDREDIWKSKELHGRFYRALHGPDVDRLASVSWLCFGNLFGETEGFVFAIMDEVIKTNNYRKYILKDGTVDICRACHRPGESIRHVISGCSYLANGEYLHRHNLVAKIIHQQIALRYGLVTSEVPYYQYVPQPVLENGHATLYWDRSVITDRTIVANKPDIVIIDRLARRAILVDVAIPHDDNFVKAEKDKMSKYLDLAHEVADMWDVDSTIIVPIVVSAHGLIPKSLDQHLQRLSIGCWVKSQIQKAVLLDTARIVRRFLTLSP

SEQ ID NO: 27079 - protein, 1100 aa, Hyles vespertilio
MPVAIDQIITISKNNIFTDGNNKGITLFQALEPTVDVSSQRLSDQVRFIQRRKLLDDDTLERLRTDLCFVQDDHVSPVSGDQAAGPTPTPVADFELTDNLDDNVSPQAKQQLRGALECAILEFSSLSASCRPRLPRLPTHRRNLALMGALDSMLTTYLESSRDLVDTHSILYCAAVAACRVANIKFPNEYKATRGVVIVPAWQRRIEDRINRARTLIGKLISFKEGNSRPKIMRFVTQAFSGTNTSPRNYRLCVTERIDFFKQKVYAWANRIRRYRRRWDRFQQNRKFQTDQKSVYRCWENPPQGVVDGRLPSAHEMREYWTNIWSSPVSHTEASWFSVVDRACEAIPAMETILISPEDVLTAIRQTQNWKSPGPDGLHNFWLKWFPSSHARLAAQFQNALERGSLPTFMTTGVTHLLFKSGCTTEPKNYRPITCLPTIYKVLTSIIRSKITDHINSNQILFSGQTGCMNGSRGTKELLLINMTICQQARHNRRNLSAAWIDYKKAYDSVPHTWLMRVLNLYKINTNLCNFLGSCMGQWTTVLRYPGGTVPPDCDEPIRIKRGIFQGDSLSPLWFCMALNPLSTLLLDSGLGYRLRRGSEPISHLLYMDDLKLFASKQTELIELLKITERFSNSINIDFGVDKCAVIHVKRGEVAVSDDILVSETVRLRSLSVTETYKYLGMPEALGIMGADVKRSLKERFFSRLTKVLNSFLSGGNKIRAFNGWVMPVLIYSFGILKWTQTELDALDRKVRTLLTAHRMHHPRSSVMRLYIPRRCGGRGILNAKDLHNREVCNLRDYFLHSDVDMHRVVVMVDKGFTPLSLAIENWRKPLVVGIKDREDIWKSKELHGRFYRALHGPDVDRLASVSWLRFGNLFGETEGFVFAIMDEVIKTNNYRKYILKDGTVDICRACHRPGESIRHVISGCSYLANGEYLHRHNLAAKIIHQQIALRYGLVTPEVPYYQYVPQPVLENGHATLYWDRSIITDRTILANKPDIVIIDRLARRAILVDVTIPYDDNLVKAEKDKMSKYLDLAYEVTDMWDVDSTIIVPIVVSAHGLIPKSLDQHLQRLSIGCWVRSQIQKAVLLDTARIVRRFLTLGS

SEQ ID NO: 27080 - protein, 1194 aa, Hyles vespertilio
MTTRASRRNAQMRSPSSSSSASWASASDVFEVTPDIDVSSQRDELQSSPPPPRPARRRGRPPPAVGLGPTGPSVPPTVLATGGVVRRMRWTHQMNENVMRAYFRATKGGTNLTAYRAQMLSMFQVLEPTVNVSSQRLSDQVRFIQRRKLLDDEALERLRTEACVALDVITPITQRAAETPSIPVADIELVDNLDNTVSPQDQQRLRRTLESAILEYKSIPASCRPRVPRLPTHRRNLALMGALDSIVSTYMESSRDLVDTHSILYCAAVAACRVANVKFPINNVTTTRDVATVPAWQRRIEDRINRARTLIGKLIAFRNGNNRQRVMRFVAQAFSGTNISPRDYGLWVTERIDYYKQKVYAWANRIRRYRKRWDRFQQNRTFQSDQKRVYRCWERSPQCVVDGRLPSVHDMRTYWTNIWSSSISHTEADWFGVVERACESIPIMEAISISPEDVLVAIRPTQNWKSPGPDGLHNFWLKWLPCSHARLAAQFQDALDGGSLPTFMTTGVTHLLYKSGSATDPKNYRPITCLPTTYKLFTSILRAKIANHFTSNNILFPGQTGCKSGSRGTKELLLIDMTICQQARQNRRNLSAAWIDYKKAFDSVPHTWLMRVLSLYKIDTNLCTFLGSCMGQWTTVLRYPGGMVSPDCDEPIRIKRGIFQGDSLSPLWFCMALNPLSTLLVDSGLGYRLRRGTEPISHLLYMDDLKLFASKQTELIELLKITEKFSNSINMEFCVDKCAIIHVKRGEVAVSDGVQISDAVRLRALSETETYKYLGMPEALGILSADVKQSVKERFFGRLAKVLNSLLSGGNKIRAFNGWVMPVLMYSFGILRWTQTELDALDRKVRTLLTAHRMHHPRSSVMRLYIPRRCGGRGILNAKDLHNREVCNLRDYFLHSDVDMHRVVVKIDKGLTPLSLANENWRKPLVMSTKDREEVWKSKELHGRFYRALHGPDVDRPASVSWLRFGNLFGETEGFVFAIMDEVIKTNNYRKYILKDGTVDICRACHRPGESIRHVISGCSYLANGEYLHRHNLVAKIIHQQIALRYGLVTLEMPYYQYVPQPVLENGHATLYWDRSIITDRTIVANKPDIVIIDRLARRAILVDVTIPHDVNLVKAEKDKLSKYLDLAHEVTDMWDVDSTVIVPIVVSAHGLMPKSFDQHLQRLSIGRWVKSQIQKAVLLDTARIVRRFLTLDP

SEQ ID NO: 27081 - protein, 1194 aa, Ephestia elutella
MITRSARLRSARPTSPPASSSSTSSEEQYATPPTSAVSSDEDGPPTPPPPRPPVRRGRPPLPARLGPAAGPTGGVVRRTTWTTSINENVMRAYFGATEGGSNLSAYRARMLPLFQALEPTVNVSAQRLSDQVRAIQRCQMLDMPTLERLRQEAQPVPTIIVANSQTRREPVVMSNTQNSSSLQVDDEPAQNDCGNTNVSTQNNEQLRSALDDAIHLYRSVPASQRPRLPRLPIHKKNILLMGALDRLLDPYLESSQDLVDTHSILYCAAIAACRVAQVKFPDSNRSPRQVTETPAWQLRIERRITTARTLIAKLICFRSGNNRPRVMRFVTQAFVGTNIQPRDYMLWVTERIDFLKQKIYAWANRIRRFRERVDRYRQNRIFQCDQRKVYREWESPANSVVDRQLPSDQNIIHFWQSIWSVPVDHTEDAWIDVVGGACDSMDTMEPVIISADDVSCAIRSAHNWKTPGPDGLHNFWLKWFHRSHAVLATQFQNSIEAGSLPAFMTTGITFLLYKNGSTTEAKNYRPITCLPTLYKLLTSILTSKINQHVDNNNIMAIVQNGCRVGSRGTKELLLIDKTICQQVRRNRKNLSVAWIDYKKAYDSVPHSWLRRVLELYKLDTTLCTFLNTCMGQWTKVLCRPGGGVSSCLTDPIRIQRGIFQGDSLSPLWFCLALNPLSTLLKDSGLGIRLRRGGETISHLLYMDDLKLFAPKKPDLLRMLKITENFSTSIGMEFGVDKCAVMHVERGRVVNSDGLQLSEMMTLRSLSEVETYKYLGMPESLGISDGDIKQSVRERFFGRLKKVLKSVLSGGNKVRAFNGWVMPLLIYTFGILKWTQTELDALDVKVRKLLTTYRMYHPRSSVMRLYIPRKCGGRGFLNAKNLHNREVCNLREYFLSRESGLHRDVVTVDNGFTPLSMANRNWRKPQVLTTQSRIDVWKSKELHGRFYRVLHGPDVDLLASVAWLRFGDLFGETEGFACAIMDEVIKTNNYRKYILKDGTVDICRACHRPGESLRHIVSGCSHLANGEYLHRHNQVARIIHQQLALKYGLVGSEVPYYKYAPAPVLENGHVTLYWDRSIITDRTIVANRPDIVIIDRVTSRAILVDVTIPHDENLVKAEKEKLSKYLDLAHEVTAMWRVGSTIIVPIVVSVNGLIAKSLDRHLERLSLGSWVKSQIQKAVLLDTARIVRRFLSLEP

SEQ ID NO: 27082 - protein, 1193 aa, Laothoe populi
MTTRNRVRCARLPSPSSSSSSASWASASEAPEPLPVTDASSQRDGLQSSPPTLTPARRRGRRHPPPVGLGPVGPCAPPMAPAAGGVVRRMRWTHSINENVMRAYFGATEGGTKLTAYRPKMLALFQDLEPTIDVSAQRLSDQVRYIQRRKLLDDAALDRLRANLCVVRDVVQRTVDTPSVPTDDVNIELVDDLDNNVSSHDIQCLRGALESAILEFKLVPACLRPRLPRLPTHKRNLALMGALDSMLPEYMESSRDLVDTHAILYCAAIAACRVANVRFPNDYRAARDATHVPAWQRRIEERIDRTRTLISKLICFKAGNNRPKVMRFVTQAFLGSSIRPQDYRFYVTERIDLLKQKVYAWANRIRRYKKRWNRFQQNRAFQSDQKRVYRCWEHSQQGVGDGRLPDVQDMRTYWANIWSSPVSHTEGAWIGIVERACEAISPMETISISPDDVLRAVRPTQNWKSPGPDGLHNFWLKWFVTSHSRLAAQFQSALESGSLPTFMTTGVTHLLFKSGSTTDPKNYRPITCLPTIYKLFTSIIRFKIAYHIDNNNILFSAQTGCKIGSRGTKELLLIDMAICQQVRHNRRNLSAAWIDYKKAYDSVPHTWLMRVLDLYKIHSNLRTLLGACMRQWTTVLKYPGGAGPLVCDEPIKIDRGIFQGDSLSPLWFCLALNPLSTLLLDSGLGYRLRRGSVPISHLLYMDDLKLFAPKKSDLIELLKITKSFSNSISMEFGVDKCAVIHVGRGAVRVSDDVYLSETERLRSLSESETYKYLGMSEALGIMGADMKQSLKERFFCRLTKVLNSFLSGGNKIRAFNGWVMPVLMYSFGILKWTQTELDALDRRVRTLMTAHRMHHPRSSVMRLYIPRRCGGRGLLNAKDLHNREVRNLRDYFLHSDVDVHREVVKVDKGFTPLSLANENWRVPVVMSTGDRRGVWKSKELHGRFYRALNGPDVDQLASVSWLRFGDLFGETEGFVFAIMDEVVKTNNYRKYILKDGTVDICRACHRPGESIRHVISGCSYLANGEYLHRHNLVAKIIHQQLALRYHLVISEVPYYQYVPQPVLENGHTTLYWDRSVITDRTIVANKPDIVVIDRLARRAILVDVTIPHDDNLVKAEKDKMTKYLDLAHEVVDMWNVDSAIIVPIVVTANGLIPKSLDQHLQRLSIGRWVKSQIQKAVLLDTARIVRRFLTLGS

SEQ ID NO: 27083 - protein, 1038 aa, Hyles vespertilio
MRWTQELNENVMRAYFGATKGGTKLTAYRSKMLSLFQALEPTVDVSSQRLSDQVRFIQRRKLLDDQVLERLRTDLCVVQDVNVPSVTVDQAADTPPIPAADIDQTDNMNSNVSPQDEQRLRGALERAISEFVSLPASCRPRLPRLPTHRRNLMLVGALDSMLPTYLESSRDLVDTHSILFCAAVAACRVANVKFPSDFKATRGVVTVPAWQRRIEDRINRARILIGKLISFREGNSRPKIMRFVTQAFAGTNTSPRNYRLCVTERIDFYKQKVYAWANRIRRYRKRWDRFQQNRMFQSDQKRVYRCWENSQQGVGDGRLPSAHEMREYWANIWSSPVSHTEAPWFGVVDRACEAIPAMETILISPEDVLAAIRPTQNWKSPGPDGLHNFWLKWFPSSHARLATQFQDALERGSLPTFMTTGVTHLLFKSGVTTEPKNYRPITCLPTIYKVLTSIIRSKITDHISSNQILFSGQTGCMNGSRGTKELLLIDMTICQQARHNRRNLSAAWIDYKKAYDSVPHTWLKRVLNLYKIDTNLCNFLGSCMGRWATVLRYPGGTGPSDCDEPIRIKRGIFQGDSLSPLWFCMALNPLSTLLLDSGLGYRLRRGSEPISHLLYMDDLKLFASKQSELIELLKITERFSNSINMEFGVDKCAVIHVKRGEVAVSDDIQVSETVSLRSLSVTETYKYLGMPEALGIMGADVKQSMKERFFNRLTKVLNSFLSGGNKIRAFNGWVMPVLMYSFGILKWTQTELDALDRKVRTLLTAHRMHHPRSSVMRLYIPRRCGGRGILNAKDLHNRKLCNLRDYFLHSNVDMHRVVVMVDKGFTPLSLAIENWRKPLVVGIRDREDIWKSKELHGRFYRALHGPDVDRLASVSWLRFGNLFGETEGFVFAIMDEVIKTNNYRKYILKDGTVDICRACHRPGESIRHVISGCSYLANGEYLHRHNLVAKIIHQQIALRYGLVTSEVPYYQYVPQPVLENGHATLYWDRSIITDRTIVANKPDVVIIDRLARRAILVDVTIPHDDNLVKAEIDKCLNT

SEQ ID NO: 27084 - protein, 1127 aa, Hyles vespertilio
MINNKARKKRNARLTSPSSSSSASWASASDVFEVTSDNDASSQHGELQSSPPPPRPARRRGRPPPAVGLGPVGPSVPPTVPATGGVVRRMRWTREINENVMRAYFGATKGGINLTAYRAKMLSLFQALEPTVDVSSQRLSDQVRFIQRRKLLDDDTLERLRTDLCLVQDDHVSPVSGDQAAGPTPTPVADFELTDNLDGNVSPQAKQQLRGALECAILEFASLSASCRPRLPRLPTHRRNLALMGALDSMLTTYLESSRDLVDTHSILYCAAVAACRVANIKFPNEYKATRGVVIVPAWQRRIEDRINRARTLIGKLISFKEGNSRPKIMRFVTHAFSGTNTSPRNYRLCVTERIDFFKQKVYAWANRIRRYRRRWDRFQQNRKFQTDQKSVYRCWENPPQGVVDGRLPSAHEMREYWTNIWSSPVSHTEASWFSVVDRACEAIPAMETILISPEDVLTAIRQTQNWKSPGPDGLHNFWLKWFPSSHARLAAQFQNALERGSLPTFMTTGVTHLLFKSGCTTEPKNYRPITCLPTIYKVLTSIIRSKITDHINSNQILFSGQTGCMNGSRGTKELLLINMTICQQARHNRRNLSAAWIDYKKAYDSVPHTWLMRVLNLYKIYTNLCNFLGSCMGQWTTVLRYPGGTVPPDCDEPIRIKRGIFQGDSLSPLWFCMALNPLSTLLLDSGLGYRLRRGSEPISHLLYMDDLKLFASKQTELIELLKITERFSNSINMDFGVDKCAVIHVKRGEVAVSDDILVSETVRLRSLSVTETYKYLGMPEALGIMGADVKRSLKERFFSRLTKVLNSFLSGGNKIRAFNGWVMPVLIYSFGILKWTQTELDALDRKVRTLLTAHRMHHPRSSVMRLYIPRRCGGRGILNAKDLHNREVCNLRDYFLHSDVDMHRVVVMVDKGFTPLSLAIENWRKPLVVGIKDREDIWKSKELHGRFYRALHGPDVDRLASVSWLRFGNLFGETEGFVFAIMDEVIKTNNYRKYILKDGTVDICRACHRPGESIRHVISGCSYLANGEYLHRHNLVAKIIHQQIALRYGLVTPEVPYYQYVPQPVLENGHATLYWDRSIITDRTILANKPDIVIIDRLARRAILVDVTIPHDDNLVKLKKTKCLNI

SEQ ID NO: 27085 - protein, 1197 aa, Hyles vespertilio
MFHNKARKKRNAHLTSPSSSSSASWASASDVFEVTPDNDASSQHGELQSSPPPPRPAQRRGRPPPAVGLGPVGPSVPPTVPATGGVVRRMRWTREINENVMRAYFGATNGGINLTAYRVKMLSLFQALEPTVDVSSQRLSDQVRFIQRRKLLDDDTLERLRTDLCFVQEDHVSPVSGDQAAGPTPTPVADFELTDNLDDNVSPQDKQQLRGALECAILEFASLSASCRPRLPRLPTHRRNLALMGALDSMLPTYLESSRDLVDTHSILYCAAVAACRVANVQFPKEYRATRGVVTVPAWQRRIEDRINRARTLIGKLISFKEGNSRPKIMRFVTQAFSGTNTSPRNYRLCVTERIDFFKQKVYAWANRIRRYRRRWDRFQQNRKFQTDQKRVYRCWENPPQGVVDGRLPSAHEMREYWTNIWSSPVSHTEASWFSVVDRACEAIPAMETILINPEDVLTAIRQTQNWKSPGPDGLHNFWLKWFPSSHARLAVQFQDALERGSLPAFMTTGVTHLLFKSGCTTEPKNYRPITCLPTIYKVLTSIIRSKITDHINSNQILFSGQTGCMNGSRGTKELLLINMTICQQARHNRRNLSAAWIDYKKAYDSVPHTWLMRVLNLYKINTNLCNFLGSCMGQWTTVLRYPGGTVPPDCDEPIRIKRGIFQGDSLSPLWFCMALNPLSTLLLDSGLGYRLRRGSEPISHLLYMDDLKLFASKQTELIELLKITERFSNSINMDFGVDKCAVIHVKRGEVAVSDDILVSETVRLRSLSVTETYKYLGMPEALGIMGADVKRSLKERFFSRLTKVLNSFLSGGNKIRAFNGWVMPVLIYSFGILKWTQTELDALDRKVRTLLTAHRMHHPRSSVMRLYIPRRCGGRGILNAKDLHNREVCNLRDYFLHSDVDMHRVVVMVDKGFTPLSLAIENWRKPLVVGIKDREDIWKSKELHGRFYRALHGPDVDRLASVSWLRFGNLFGETEGFVFAIMDEVIKTNNYRKYILKDGTVDICRACHRPGESIRHVISGCSYLANGEYLHRHNLVTKIIHQQIALRYGLVTPEVPYYQYVPQPVLENGHATLYWDRSIITDRTILANKPDIVIIDRLARRAILVDVTIPHDDNLVKAEKDKMSKYLDLAHEVTDMWDVDSTIIVPIVVSAHGLIPKSLDQHLQRLSIGVWVRSQIQKAVLLDTARIVRRFLTLGS

SEQ ID NO: 27086 - protein, 868 aa, Hyles vespertilio
MRFVTQAFSGTNTSPRNYRLCVTERIDFFKQKVYAWANRIRRYRRRWDRFQQNRKFQIDQKSVYRCWENPPQGVVDGRLPSAHEMREYWTNIWSSPVSHTEASWFSVVDRACEAIPAMETILISPEDVLTAIRQTQNWKSPGPDGLHNFWLKWFPSSHARLAAQFQNALERGSLPTFMTTGVTHLLFKSGCTTEPKNYRPITCLPTIYKVLTSIIRSKITDHINSNQILFSGQTGCMNGSRGTKELLLINMTICQQARHNRRNLSAAWIDYKKAYDSVPHTWLMRVLNLYKINTNLCNFLGFCMGQWTTVLRYPGGTVPPDCDEPIRIKRGIFQGDSLSPLWFCMALNPLSTLLLDPGLGYRLRRGTEPISHLLYMDDLKLFASKQTELIELLKITERFSNSINMDFGVDKCAVIHVKRGEVAVSDDILVSETVRLRSLSVTETYKYLGMPEALGIMGADVKRSLKERFFSRLTKVLNSFLSGGNKIRAFNGWVMPVLIYSFGILKWTQTELDALDRKVRTLLTAHRMHHPRSSVMRLYIPRRCGGRGILNAKDLHNREVCNLRDYFLHSDVDMHRVVVMVDKGFTPLSLAIENWRKPLVVGIKDREDIWKSKELHGRFYRALHGPDVDRLASVSWLRFGNLFGETEGFVFAIMDEVIKTNNYRKYILKDGTVDICRACHRPGESIRHVISGCSYLANGEYLHRHNLVAKIIHQQIALRYGLVTPEVPYYQYVPQPVLENGHATLYWDRSIITDRTIVANKPDIVIIDRLARRAILVDVTIPHDVNLVKAEKDKLSKYLDLTHEVTDMWDVDSTVIVPIVVSAHGLMPKSFDQHLQRLSIGCWVRSQIQKAVLLDTARIVRRFLTLGS

SEQ ID NO: 27087 - protein, 1194 aa, Hyles vespertilio
MISRARRRIARSRSPSSSSSASWASASEVFESAPNFDVSSQHGELQSSPPPPRPARRRGRPPPAVGLGPVGPSVPPTVPATGGVVCRMRWTQELNENVMRAYFGATKGGTKLTAYRSKMLSLFQTLEPTVDVSSQRLSDQVRFIQRRKLLDDQVLERLRTDLCVVQDVNVPSVTVDQAADTPPTPAADIDQTDNMNCNVSPQDEQRLRGALERAISEFVSLPASCRPRLPRLPTHRRNLMLVGALDSMLPTYLESSRDLVDTHSILFCAAVAACRVANVKFPSDFKATRGVVTVPAWQRRIEDCINRARILIGKLISFREGNSRPKMRFVTQAFSGTNTSPRNYRLCVTERIDFYKQKVYAWANRIRRYRKRWDRFQQNRMFQSDQKRVYRCWQNSQQGVGDGRLPSAHEMREYWANIWSSPVSHTEAPWFGVVDRVCEAIPAMETILISPEDILAAIRPTQNWKSPGPDGLHNFWLKWFPSSHARLATQFQDALERGSLPTFMTTGVTHLLFKSGVTTVPKNYRPITCLPTIYKILTSIIRSKITDHISSNQILFSGETGCMNGSRGTKELLLIDMTICQQARHNRRNLSAAWIDYKKAYDSVPHTWLKRVLNLYKIDTNLCNFLGSCMGQWTTVLRYPGGTGPSDCDEPIRIKRGIFQGDSLSPLWFCMALNPLSTLLLDSGLGYRLRRGSEPISHLLYMDDLKLFASKQSELIELLKITERFSNSINMEFGVDKCAVIHVKRGEVAVSDDIQVSETVSLRSLSVTETYKDLGMPEALGIMGADVKQSIKERFFNRLTKVLNSFLSGGNKIRAFNGWVMPVLMYSFGILKWTQTELDALDRKVRTLLTAHRMHHPRSSVMRLYIPRRCGGRGILNAKDLHNREMCNLRDYFLHSNVDMHRVVVMVDKGFTPLSLAIENWRKPLVVGIRDREDIWKSKELHGRFYRALHGPDVDRLASVSWLRFGNLFGETEGFVFAIMDEVIKTNNYRKYILKDGTVDICRACHRPGESIRHVISGCSYLANGEYLHRHNLVAKIIHQQIALRYGLVTSEVPYYQYVLQPVLENGHATLYWDRSIITDRTIVANKPDIVIIDRLARRAILVDVAIQHDDNLVKAEKDKMSKYLDLAHEVTDMWDVDSTIIVPIVVSAHGLIPKSLDQHLQRLSIDCWVKGQIQKAVLLDTARIVRRFLTLSP

SEQ ID NO: 27088 - protein, 1111 aa, Dendrolimus kikuchii
MRWTQELNECVMRAYYEATEGETNLTSYRGRLLSLFQTLQPASTVTAQRLSDQVRAIQRLHLLDESTLDRLRNAVRINREVTDTPQPTSPAPPADSQRPVNFTMDDVSDGLAVGDVSIQINEQLRRTLEHSIQEFRDQPILNRPRVPKLPMHRNNLLLMGTLDCLLAPYFRSSTDLADTHSILYCGAVAVCRVAGVKFPNTQPTRPASGKPAWQIRIERRIDRARVLIAKLICFRAGNCRPRVMRFVAQAFAGTNISPSEHMARATERIDFWKQKVYAWANRIRRYKERADRYFLNRTFQSEEKRVYRGWEKSSDSVADRQIPNTDAMASFWRSIWSVPVSHTEGDWIEVIKQSCEQVPDMEPITIEPLDVGNAIRSAHNWKSPGPDGLHNFWIKWFKSSHGCLANQFQEAVDRGSLPTFMTTGVTHLLFKSGCTTEPKNYRPITCLPTIYKLLTSILEKKLSNYFYNNNILAITQNGCKAGSRGTKELLLIDTTVSQQARRNRRNLSVAWIDYKKAYDSVPHTWLMRVLELYKVDATLRTFLQACMRQWVTYLRVPGGGGVPLPEGEINIERGIFQGDSLSPLWFCLALNPLSTLLESSKLGYRFRRGGEIVSHLLYMDDLKLFASNEPDLIELLKTTEHFSKSINMEFGIEKCAVMHVRRGKVVNSPNLQLSENMSLKSLSETETYKYLGMSESLGIADADVKQTVKDRFFCRLRKVLTSLLSGGNKVRAFNSWVMPVLAYSFGILRWTQTELDALDRRVRCLLTKHRMHHPRSSVMRLYISRRCGGRGFLNAKDLHNREVNNLRAYFLKMNVGLHKDVVAVDKGLTTLALAKENWCNLAVLSTSDRINVWKSKELHGRFYRALTGPDVDLSASVNWLRFGNLFGETEGFVFAIMDEVIKTNNYRKYILKDGTLDICRACHRPGESLRHIVSGCSHLSNGEYLHRHNLVARIIHQQLALRYGLVETEVPYYQYSPEPVLENSRATLYWDRSVITDRTIVANKPDIVIIDRSARRAILVDISIPHDDNLVKKEKEKLSKYLDLAHEVTAMWRLESTSIVPIVVTVNGLIAKSLDRHLERLSLGSWVKGQIQKAALLDTARIVRRFLSLEP

SEQ ID NO: 27089 - protein, 975 aa, Eilema sororculum
MPIHVRPRLPRLPIHRRNIALVSALDSLLPKYLENSENLGDTHSILYCTAVAACRMAGAKFPIKDPAIRPKPAIPAWQCRIERRVAEARVLIGKLICFRSGNTRPRVMRYVTRAFAGTNISPQDYTSRVTERIDFLKQKVCAWANRIRRYKKRVDRYTVNRMFQRDQRWVYRSWERTDESVDDLRRPDAEATNAFWRSIWSVPVSHTEGDWMREVERACETIPEMEEIYIDATDVDCAVRSLSNWKSPGPDGLHNFWLKWLRSSHVVLASQFQSAIESGTLPAFMTTGVTHLLHKTGSTLEPNNYRPITCLPTVYKLLTSILRAKINNHINNNSIMCTSQNGCRNGARGTKELLLIDMTISQQARRNRKDLVACWIDYKKAFDSVPHTWLLRVLELYKVNTTLCTFVRSCMGQWRTVLLYPRCRQALGSGEPITIERGIFQGDSLSPLWFCLALNPLSTLLVNSGLGYRLRREGQMVSHLFYMDDLKLFAQTNPQLIALLKVTETFSNSIKMAFGVDKCAVIHVKRGQVVESEGIQLSDSTNLRSLLVTETYKYLGMSQALCINEVGMKQMLQERFFGRLKKVLNSLLSGGNKVRACNSWVMPLLMYSFGILKWTQTELDTIDRKVRTQLTAFRMHHPRSSVMRLYIPRKCGGRGFLNVKTLHNREVCNLRDYFLKSNVDMHRDVVNVDTGLTPLGLAKENWRRPTIVGTDSRREVWQSKELHGRFYRALHRPEVDLLASVSWLRFSDLFGETEGFVCAIADEVIKTNNYRKYIMRDGTIDICRACHQPGESLRHITSGCSRLANGEYLHRHNQVARIIHQRLALKYNLVEVEVPYYRYVPEPVLENSHITLYWDRSIITDRTVVANKPDIVVIDRSERRALIVDVAIPHDENLVKAEKDKQVKYLDLAHEVVDMWNVDSAIIVPIVVSVNGLIAKSLDQHLKRLGLDGWVKGQMQKAVLLDTARIVRKFLSLEP

SEQ ID NO: 27090 - protein, 1192 aa, Eilema sororculum
MLTRAQAKRNRSAPTTSPDSSLSSAAQPPAVEPAASSSSSSDEFFSPPTSPTPVRRPGRGRPPTCLGPRRPPASNRAPATGGNVHRMRWTNSINENVMRAYFAATEGGTNLSAYRTRMLPLFQALEPTINTSAQRLSDQVRVIQRNRMLNETVLETLRLECLRNICVTPAPAPAPASTAGINDVTYVAPDDTPIPVSIQYNEEIKEALECALREYRSMPVHVRPRLPRLPIHRRNIALVSALDSLLPRYLENSENLGDTHSILYCTAVAACRMAGAKFPIKHPAIRPKPVIPAWQCRIERRVAEARVLIGKLICFRSGNTRPRVMRYVTRAFAGTDISPQDYTSRVTERIDFLKQKVYAWANRIRRYKKRVDRYTINCMFQRDQRWVYRSWERTEESVDDVRRPDAEATNAFWRSIWSVPVSHTEGDWMREVERACETIPEMEEINIDAIDVDCAVRSLSNWKSPGPDGLHNFWLKWLRSSHVVLASQFQSAIESGTLPAFMTTGVTHLLHKTGSTLEPNNYRPITCLPTVYKLLTSILRAKINNHINNNSIICASQNGCRNGARGTKELLLIDMTISQQARRNRKDLAACWIDYKKAFDSVPHTWLLRVLELYKVNTTLCTFLRSCMGQWRTVLFYPGCRQALGSGVPITIERGIFQGDSLSPLWFCLALNPLSTLLVNSGLGYRLRREGQMVSHLFYMDDLKLFAHTNPQLIALLKITETFSNSIKMAFGVDKCAVIHVKRGRVVESEGIQLSDSTNLRSLLVTETYKYLGMSQALCINEAGMKQMLQDRFFGRLKKVLNSLLSGGNKVRACNSWVMPLLMYSFGILKWTQTELDTIDRKVRAQLTAFRMHHPRSSVMRLYIPRKCGGRGFLNAKTLHNREVCNLRDYFLKSNVDMHRDVVNVDTGLTPLGLAKENWRRPTIVGTDSRREVWQSKELHGRFYRALHRPEVDLLASVSWLRFSDLFGETEGFVCAIADEVIKTNNYRKYIMRDGTIDICRACHQPGESLRHITSGCSRLANGEYLHRHNQVARIIHQRLALKYNLVEVEVPYYRYVPEPVLENSHITLYWDRSIITDRTVVANKPDIVVIDRSERRALIVDVTIPHDENLVKAEKDKQVKYLDLAHEIVDMWNVDSAIIVPIVVSVNGLIAKSLDQHLKRLGLDGWVKGQMQKAVLLDTARIVRKFLSLEP

SEQ ID NO: 27091 - protein, 1195 aa, Eilema sororculum
MITRAKTKLLQDAHLTPTDSSCSSASQAPEITSPRPTPAEASSSDEYFSPPTSPTPVRRPGRGRPPTCLGPQRPPASNRAPATGGDVHRMRWTNSINENVMRAYFAATEGGTNLSAYRSRILPLFQALEPSVNTSAQRLSDQVRVIQRNRMLNETVLETLRLECLRNTCVTPAPAPAPASTTAINEESYVTRDDTPIPVSIQYNEEIKEALECALREYRSMPIHVRPRLPRLPIHRRNIALVSALDSLLPKYLENSENLGDTHSILYCTAVVACRMAGAKFPIKDPAIRPKPAIPAWQCRIERRVAEARVLIGKLICFRSGNTRPRVMRYVTRAFAGTNISPQDYTSRVTERIDFLKQKVCAWANRIRRYKKRVDRYTVNRMFQRDQRWVYRSWERTDESVDDVRRPDAEATNAFWRSIWSVPVSHTEGDWMREVERACETIPAMEEIYIDATDVDCAVRSLSNWKSPGPDGLHNFWLKWLRSSHVVLASQFQSAVESGTLPTFMTTGVTHLLHKTGSTLEPNNYRPITCLPTVYKLLTSILRAKINNHINNNSIMCASQNGCRNGARGTKELLLIDMTISQQARRNRKDLAACWIDYKKAFDSVPHTWLLRVLELYKVNTTLCTFLRSCMGQWRTVLFYPGCRQALGSDEPITKERGIFQGDSLSPLWFCLALNPLSTLLVNSGLGYRLRREGQMVSHLFYMDDLKLFAHTNPQLIALLKVTETFSNSIKMAFGVDKCAVIHVKRGRVVESEGIQLSDSTNLRSLLVTETYKYLGMSQALCINEADMKQMLQDRFFGRLKKVLNSLLSGGNKVRACNSWVMPLLMYSFGILKWTQTELDTIDRKVRAQLTAFRMHHPRSSVMRLYIPRKCGGRGFLNAKTLHNREVCNLRDYFLKSNVDMHRDVVNVDTGLTPLGLAKENWRRPTIVSTDSRREVWQSKELHGRFYRALHRPEVDLLASVSWLRFSDLFGETEGFVCAIADEVIKTNNYRKYIMRDGTIDICRACHQPGESLRHITSGCSRLANGEYLHRHNQVARIIHQRLALKYNLVDVEVPYYRYVPEPVLENSHITLYWDRSIITDRTVIANKPDIVVIDRSERRALIVDVTIPHDENLVKAEKDKQVKYLDLAHEVVDMWNVDSAIIVPIVVSVNGLIAKSLEQHLKRLGLDGWVKGQMQKAVLLDTARIVRKFLSLEP

SEQ ID NO: 27092 - protein, 954 aa, Laothoe populi
MGALDSMLPEYMESSRDLVDTHAILYCAAIAACRVANVRFPNDYRAARDATHVPAWQRRIEERIDRTRTLISKLICFKAGNNRPKVMRFVTHAFLGSSIRPQDYRFCDTERIDVLKQKVYAWANRIRRYKKRWNRFQQNRAFQSDQKRVYRCWEHSQQGVGDGRLPDVRDMRTYWANIWSSPVSHTEGAWIGVVERACEAISPMETISISPDDVLRAVRPTQNWKSPGPDGLHNFWLKWFVTSHSRLAAQFQSALESGSLPTFMTTGVTHLLFKSGSTTDPKNYRPITCLPTIYKLFTSIIRFKIAYHIDNNNILFSAQTGCKIGSRGTKELLLIDMAICQQVRHNQRNLSAAWIDYKKAYDSVPHTWLMRVLDLYKIHSNLRTLLRACMRQWTTVLKYPGGAGPLDCDEPIKIDRGIFQGDSLSPLWFCLALNSLSTLLLDSGLGYRLRRGSVPISHLLYMDDLKLFAPKKSDLIELLKITKSFSNLISMEFGVDKCAVIHVGRGAVRVSDDVYLSETERLRSLSESETYKYLGMSEALGIMGADMKQSLKERFFCRLTKVLNSFLSGGNKIRAFNGWVMPVLMYSFGILKWTQTELDALDRRVRTLMTAHRMHHPRSSVMRLYIRRRCGGRGLLNAKDLHNREVRNLRDYFLHSDVDVHREVVKVDKGFTPLSLANENWRVPVVMSTGDRKGVWKSKELHGRFYRALNGPDVDQLASVSWLRFGDLFGETEGFVFAIMDEVVKTNNYRKYILKDGTVDICRACYRPGESIRHVISGCSYLANGEYLHRHNLVAKIIHQQLALRYHLVISEVPYYQYVPQPVLENGYTTLYWDRSIITDRTIVANKPDIVVIDRLARRAILVDVTIPHDDNLVKAEKDKMSKYLDLAHEVVDMWNVDSAIIVPIVVTANGLIPKSLDQHLQRLSIGRWVKSQIQKAVLLDTARIVRRFLTLGS

SEQ ID NO: 27093 - protein, 1108 aa, Deilephila porcellus
MRWTHQINENVMRAYFGATRGGTHLTAYRAKMLSLFQALEPTVEVSSQRLSDQVRFIQRRKLLDDEALERLRTDLRVVQDNNVQPVNGDQAADPTPIPIAVIEVTDNLDDNVSPQDEQRLRGALERAISEFMPLSTSCRPRLPRLPTHRRNLALMGAMDSMLPIYLESSRDLVDTHSILYCAAVAACRVANVNFPNERRATRGVAAVPAWQRRIEERINRARTLIGKLISFKEGNSRPKIMRFVAQAFSGTNTSPRNYRLCVTERIDFYKQKVYAWANRIRRYRRRWDRFQQNRMFQSDQKRVYRCWENSPQSVVDGRLPSAHEMREYWTNIWSSPVSHTEAPWFSVVDRACKVIPAMEAILISPEDVLTAIRPTQNWKSPGPDGLHNFWLKWFPSSHARLATQFQDALEGGSLPTFMTTGVTHLLFKSGSTTEPKNYRPITCLPTIYKVLSSIIRSKIQCHITTNQILYSGQTGCKSGSRGTKELLLIDMAICQQARQNRRNLSAAWIDYKKAYDSVPHTWLMRVLNLYKVDTKLSTFLGACMGQWTTVLKYPGATNPSVNDEPIKIKRGIFQGDSLSPLWFCMALNPLSTLLLDSGLGYRLRRGSEPISHLLYMDDLKLFTSKQSELIELLKIAERFSNSINMEFGVDKCAVIHVKRGVVAVSDDIRVSETVRLRSLSPTETYKYLGMPEALGIMGADVKQSVRERFFSRLTKVLNSFLSGGNKIRAFNGWVMPVLMYSFGILRWTQTELDALDRKVRTLMTAHRMHHPRSSVMRLYIPRRCGGRGILNAKDLHNREVCNLRDYFLHSDVDMHGIVAMVDKGLTPLSLANENWRKPLVVSIRDRLDIWKSKELHGRFYRALHGPDVDRLASVSWLRFGNLFGETEGFVFAIMDEVIKTNNYRKYILKDGTVDICRACHRPGESIRHVISGCSYLANGEYLHRHNLVAKIIHQQIALRYGLVTPEVPYYQYVPQPVLENGHATLYWDRSVITDRTIVANKPDIVIIDRLARRAILVDVTIPHDDNLVKAEKDKMSKYLDLAHEVTDMWNVDSTIIVPIVVSAHGLIPKSLDQHLQRLSIGCWAKSQIQKAVLLDTARIVRKFLTLGS

SEQ ID NO: 27094 - protein, 955 aa, Hyles vespertilio
MMGALDSMLPTYLESSRDLVDTHSILYCAAVAACRVANVQFPKEYRATRGVVTVPAWQRRIEDRINRARTLIGKLISFKEGNSRPKIMRFVTQAFSGTNTSPRNYRLCVTERIDFFKQKVYAWANRIRRYRRRWDRFQQNRKFQTDQKRVYRCWENPPQGVVDGRLPSAHEMREYWTNIWSSPVSHTEASWFSVVDRACEAIPAMETILINPEDVLTAIRQTQNWKSPGPDGLHNFWLKWFPSSHARLAVQFQDALERGSLPAFMTTGVTHLLFKSGCTTEPKNYRPITCLPTIYKVLTSIIRSKITDHINSNQILFSGQTGCMNGSRGTKELLLINMTICQQARHNRRNLSAAWIDYKKAYDSVPHTWLMRVLNLYKINTNLCNFLGSCMGQWTIVLRYPGGTVPPDCNEPIRIKRGIFQGDSLSPLWFCMALNPLSTLLLDSGLGYRLRRGSEPISHLLYMDDLKLFASKQTELIELLKITERFSNSINMDFGVDKCAVIHVKRGEVAVSDDILVSETVRLRSLSVTETYKYLGMPEALGIMGADVKRSLKERFFSRLTKVLNSFLSGGNKIRAFNGWVMPVLIYSFGILKWTQTELDALDRKVRTLLTAHRMHHPRSSVMRLYIPRRCGGRGILNAKDLHNREVCNLRDYFLHSDVDMHRVVVMVDKGFTPLSLAIENWRKPLVVGIKDREDIWKSKELHGRFYRALHGPDVDRLASVSWLRFGNLFGETEGFVFAIMDEVIKTNNYRKYILKDGTVDICRACHRPGESIRHVISGCSYLANGEYLHRHNLVTKIIHQQIALRYGLVTPEVPYYQYVPQPVLENGHATLYWDRSIITDRTILANKPDIVIIDRLARRAILVDVTIPHDDNLVKAEKDKMSKYLDLAHEVTDMWDVDSTIIVPIVVSAHGLIPKSLDQHLQRLSIGVWVRSQIQKAVLLDTARIVRRFLTLGS

SEQ ID NO: 27095 - protein, 1197 aa, Hyles vespertilio
MFHNKARKKRNAHLTSPSSSSSASWASASDVFEVTPDNDASSQHGELQSSPPPPRPAQRRGRPPPAVGLGPVGPSVPPTVPATGGVVRRMRWTREINENVMRAYFGATNGGINLTAYRVKMLSLFQALEPTVDVSSQRLSDQVRFIQRRKLLDDDTLERLRTDLCFVQEDHVSPVSGDQAAGPTPTPVADFELTDNLDDNVSPQDKQQLRGALECAILEFASLSASCRPRLPRLPTHRRNLALMGALDSMLPTYLESSRDLVDTHSILYCAAVAACRVANVQFPKEYRATRGVVTVPAWQRRIEDRINRARTLIGKLISFKEGNSRPKIMRFVTQAFSGTNTSPRNYRLCVTERIDFFKQKVYAWANRIRRYRRRWDRFQQNRKFQTDQKRVYRCWENPPQGVVDGRLPSAHEMREYWTNIWSSPVSHTEASWFSVVDRACEAIPTMETILINPEDVLTAIRQTQNWKSPGPDGLHNFWLKWFPSSHARLAVQFQDALERGSLPAFMTTGVTHLLFKSGCTTEPKNYRPITCLPTIYKVLTSIIRSKITDHINSNQILFSGQTGCMNGSRGTKELLLINMTICQQARHNRRNLSAAWIDYKKAYDSVPHTWLMRVLNLYKINTNLCNFLGSCMGQWTTVLRYPGGTVPPDCDEPIRIKRGIFQGDSLSPLWFCMALNPLSTLLLDSGLGYRLRRGSVPISHLLYMDDLKLFASKQTELIELLKITDIFSKSINMDFGVDKCAVIHVKRGEVAVSDDILVSETVRLRSLSVTETYKYLGMPEALGIMGADVKRSLKERFFSRLTKVLNSFLSGGNKIRAFNGWVMPVLMYSFGILKWTQTELDALDRKVRTLLTAHRMHHPRSSVMRLYIPRRCGGRGILNAKDLHNREVCNLRDYFLHSDVDMHRVVVMVDKGFTPLYLAIENWRKPLVVGIKDREDIWKSKELHGRFYRALHGPDVDRLASVSWLRFGNLFGETEGFVFAIMDEVIKTNNYRKYILKDGTVDICRACHRPGESIRHVISSCSYLANGEYLHRHNLVAKIIHQQIALRYGLVTPEVPYYQYVPQPVLENGHATLYWDRSIITDRTIPANKPDIVIIDRLARRAILVDVTIPHDDNLVKAEKDKMSKYLDLAHEVADMWDVDSTIIVPIVVSAHGLIPKSLDQHLQRLSIGCWVRSQIQKAVLLDTARIVRRFLTLGS

SEQ ID NO: 27096 - protein, 1108 aa, Hyles vespertilio
MRWTREINENVMRAYFGATKGGINLTAYRAKMLSLFQALEPTVDVSSQRLSDQVRFIQRRKLLDDDTLERLRTDLCFVQDDHVSPVSGDQAAGPTPTPVADFELTDNLDDNVSPQAKQQLRGALECAILEFSSLSASCRPRLPRLPTHRRNLALMGALDSMLTTYLESSRDLVDTHSILYCAAVAACRVANIKFPNEYKATRGVVIVPAWQRRIEDRINRARTLIGKLISFKEGNSRPKIMRFVTQAFSGTNTSPRNYRLCVTERIDFFKQKVYAWANRIRRYRRRWDRFQQNRKFQTDQKSVYRCWENPPQGVVDGRLPSAHEMREYWTNIWSSPVSHTEASWFSVVDRACEAIPAMETILISPEDVLTAIRQTQNWKSPGPDGLHNFWLKWFPSSHARLAAQFQNALERGSLPTFMTTGVTHLLFKSGCTTEPKNYRPITCLPTIYKVLTSIIRSKITDHINSNQILFSGQTGCMNGSRGTKELLLINMTICQQARHNRRNLSAAWIDYKKAYDSVPHTWLMRVLNLYKINTNLCNFLGSCMGQWTTVLRYPGGTVPPDCDEPIRIKRGIFQGDSLSPLWFCMALNPLSTLLLDSGLGYRLRRGSEPISHLLYMDDLKLFASKQTELIELLKITERFSNSINMDFGVDKCAVIHVKRGEVAVSDDILVSETVRLRSLSVTETYKYLGMPEALGIMGADVKRSLKERFFSRLTKVLNSFLSGGNKIRAFNGWVMPVLIYSFGILKWTQTELDALDRKVRTLLTAHRMHHPRSSVMRLYIPRRCGGRGILNAKDLHNREVCNLRDYFLHSDVDMHRVVVMVDKGFTPLSLAIENWRKPLVVGIKDREDIWKSKELHGRFYRALHGPDVDRLASVSWLRFGNLFGETEGFVFAIMDEVIKTNNYRKYILKDGTVDICRACHRPGESIRHVISGCSYLANGEYLHRHNLVAKIIHQQIALRYGLVTPEVPYYQYVPQPVLENGHATLYWDRSIITDRTILANKPDIVIIDRLARRAILVDVTIPHDDNLVKAEKDKMSKYLDLAHEVTDMWDVDSTIIVPIVVSAHGLIPKSLDQHLQRLSIGCWVRSQIQKAVLLDTARIVRRFLTLGS

SEQ ID NO: 27097 - protein, 1194 aa, Hyles vespertilio
MTTRASRRNAQIRSPSSSSSASWASASDVFEVTPDIDVSSQRDELQSSPPPPRPARRRGRPPPAVGLGPTGPSVPPTVPATGGVVRRMRWTHQMNENVMRAYFGATKGGTNLTAYRAQMLSMFHVLEPTVNVSSQRLSDQVRFIQRRMLLDDEALERLRTEACVALDVITPITQRAAETPSIPAADIELVDNLDNTVSPQDQQRLRRTLESAILKYKSIPASCRPRVPRLPTHRRNLALMGALDSIVSTYMESSRDLVDTHSILYCAAVAACRVANVKFPINNVTTTRDVATVPAWQRRIEDRINRVRTLIGKLIAFRNGNNRQRVMRFVAQAFSGTNVSPRDYGLWVTERIDYYKQKVYAWANRIRRYRKRWGRFQQNRTFQSDQKRVYRCWERSRQSVVDGRLPSVRDMRNYWANIWSSSISHTEADWFGVVERVCESIPIMEAISISPEDVLVAIRPTQNWKSPGPDGLHNFWLKWLPCSYARLAAQFQDALDGGSLPTFMTTGVTHLLYKSGSTTDLKNYRPITCLPTTYKLFTSILRAKIANHLTSNNILFPGQTGCKSGSRGTKELLLIDMTICQQARQNRGNLSAAWIDYKKAFDSVPHTWLMRVLSLYKIDTNLCTFLGSCMEQWTTVLRYPGGIVSPDCDEPIRIKRGIFQGDSLSPLWFCMALNPLSTLLVDSGLGYRLRRGTEPISHLLYMDDLKLFTSKQTELIELLKITEKFSSSINMEFGVDKCAIIHVKRGDVAVSDGVQVSDALRLRSLSETETYKYLGMPEALGILSADVKQSVKERFFGRLAKVLNSLLSGGNKIRAFNGWVMPVLMYSFGILRWTQTELDALDRKVRTLLTAHRMHHPRSSVMRLYIPRRCGGRGILNAKDLHNREVCNLRDYFLHSDVDMHRVVVKIDKGLTPLSLANENWRKPLVMSTKDREEVWKSKELHGRFYRALHGPDVDRPASVSWLRFGNLFGETEGFVFAIMDEVIKTNNYRKYILKDGTVDICRACHRPGESIRHVISGCSYLANGEYLHRHNLVAKIIHQQIALRYGLVTLEMPYYQYVPQPVLENGHATLYWDRSIITDRTILANKPDIVIIDRLARRAILVDVTIPHDDNLVKAEKDKMSKYLDLAHEVTDMWDVDSTVIAPIVVSAHGLMPKSFDQHLQRLSIGRWVKGQIEKAVLMDTARIVRRFLTLDP

SEQ ID NO: 27098 - protein, 1197 aa, Hyles vespertilio
MINNKARKKRNARLTSPSSSSSASWASASDVFEVTSDNDASSQHGELQSSPPPPRPARRRGRPPPAVGLGPVGPSVPPTVPATGGVVRRMRWTREINENVMRAYFGATKGGINLTAYRAKMLSLFQALEPTVDVSSQRLSDQVRFIQRRKLLDDDTLERLRTDLCFVQDDHVSPVSGDQAAGPTPTPVADFELTDNLDDNVSPQAKQQLRGALECAILEFASLSASCRPRLPRLPTHRRNLALMGALDSMLTTYLESSRDLVDTHSILYCAAVAACRVANIKFPNEYKATRGVVIVPAWQRRIEDRINRARTLIGKLISFKEGNSRPKIMRFVTHAFSGTNTSPRNYRLCVTERIDFFKQKVYAWANRIRRYRRRWDRFQQNRKFQTDQKSVYRCWENPPQGVVDGRLPSAHEMREYWTNIWSSPVSHTEAPWFSVVDRACEAIPAMETILISPEDVLTAIRQTQNWKSPGPDGLHNFWLKWFPSSHARLAAQFQNALERGSLPTFMTTGVTHLLFKSGCTTEPKNYRPITCLPTIYKVLTSIIRSKITDHINSNQILFSGQTGCMNGSRGTKELLLINMTICQQARHNRRNLSAAWIDYKKAYDSVPHTWLMRVLNLYKINTNLCNFLGSCMGQWTTVLRYPGGTVPPDCDEPIRIKRGIFQGDSLSPLWFCMALNPLSTLLLDSGLGYRLRRGSEPISHLLYMDDLKLFASKQTELIELLKITERFSNSINMDFGVDKCAVIHVKRGEVAVSDDILVSETVRLRSLSVTETYKYLGMPEALGIMGADVKRSLKERFFSRLTKVLNSFLSGGNKIRAFNGWVMPVLIYSFGILKWTQTELDALDRKVRTLLTAHRMHHPRSSVMRLYIPRRCGGRGILNAKDLHNREVCNLRDYFLHSDVDMHRVVVMVDKGFTPLSLAIENWRKPLVVGIKDREDIWKSKELHGRFYRALHGPDVDRLASVSWLRFGNFFGETEGFVFAIMDEVIKTNNYRKYILKDGTVDICRACHRPGESIRHVISGCSYLANGEYLHRHNLVAKIIHQQIALRYGLVTPEVPYYQYVPQPVLENGHATLYWDRSIITDRTILANKPDIVIIDRLARRAILVDVTIPHDDNLVKAEKDKMSKYLDLAHEVTDMWDVDSTIIVPIVVSAHGLIPKSLDQHLQRLSIGCWVRSQIQKAVLLDTARIVRRFLTLGS

SEQ ID NO: 27099 - protein, 1197 aa, Hyles vespertilio
MFHNKARKKRNAHLTSPSSSSSASWASASDVFEVTPDNDASSQHGELQSSPPPPRPAQRRGRPPPAVGLGPVGPSVPPTVPATGGVVRRMRWTREINENVMRAYFGATNGGINLTAYRVKMLSLFQALEPTVDVSSQRLSDQVRFIQRRKLLDDDTLERLRTDLCFVQEDHVSPVSGDQAAGPTPTPVADFELTDNLDDNVSPQDKQQLRGALECAILEFASLSASCRPRLPRLPTHRRNLALMGALDSMLPTYLESSRDLVDTHSILYCAAVAACRVANVQFPKEYRATRGVVTVPAWQRRIEDRINRARTLIGKLISFKEGNSRPKIMRFVTQAFSGTNTSPRNYRLCVTERIDFFKQKVYAWANRIRRYRRRWDRFQQNRKFQTDQKRVYRCWENPPQGVVDGRLPSAHEMREYWTNIWSSPVSHTEASWFSVVDRACEAIPAMETILINPEDVLTAIRQTQNWKSPGPDGLHNFWLKWFPSSHARLAVQFQDALERGSLPAFMATGVTHLLFKSGCTTEPKNYRPITCLPTIYKVLTSIIRSKITDHINSNQILFSGQTGCMNGSRGTKELLLINMTICQQARHNRRNLSAAWIDYKKAYDSVPHTWLMRVLNLYKISTNLCNFLGSCMGQWTTVLRYPGGTVPPDCDEPIRIKRGIFQGDSLSPLWFCMALNPLSTLLLDSGLGYRLRRGSEPISHLLYMDDLKLFASKQTELIELLKITERFSNSINMDFGVDKCAVIHVKRGEVAVSDDILVSETVRLRSLSVTETYKYLGMPEALGIMGADVKRSLKERFFSRLTKVLNSFLSGGNKIRAFNGWVMPVLIYSFGILKWTQTELDALDRKVRTLLTAHRMHHPRSSVMRLYIPRRCGGQGILNAKDLHNREVCNLRDYFLHSDVDMHRVVVMVDKGFTPLSLAIENWRKPLVVGIKDREDIWKSKELHGRFYRALHGPDVDRLASVSWLRFGNLFGETEGFVFAIMDEVIKTNNYRKYILKDGTVDICRACHRPGESIRHVISGCSYLANGEYLHRHNLVTKIIHQQIALRYGLVTPEVPYYQYVPQPVLENGHATLYWDRSIITDRTILANKPDIVIIDRLARRAILVDVTIPHDDNLVKAEKDKMSKYLDLAHEVTDMWDVDSTIIVPIVVSAHGLIPKSLDQHLQRLSIGVWVRSQIQKAVLLDTARIVRRFLTLGS

SEQ ID NO: 27100 - protein, 1193 aa, Laothoe populi
MTTRNRVRCARLPSPSSSSSSASWASASEAPEPLPVTDASSQRDGLQSSPPTLTPARRRGRQHPPPVGLGPVGPCAPPMAPAAGGVVRRMRWTHSINENVMRAYFGATEGGTKLTAYRPKMLALFQDLEPTIDVSAQRLSDQVRYIQRRKLLDDAALDRLRANLCVVQDVVQRTVDRPSVPTDDVNIELVDDLDNYVSSHDIQCLRGALESAILEFKLVPACLRPRLPRLPTHKRNLALMGALDSMLPEYMESSRDLVDTHAILYCAAIAACRVANVRFPNDYRAARDATHVPAWQRRIEERIDRTRTLISKLICFKAGNNRPKVMRFVTQAFLGSSIRPQDYRFCVTERIDLLKQKVYAWANRIRRYKKRWNRFQQNRAFQSDQKRVYRCWEHSQQGVGDGRLPDVRDMRTYWANIWSSPVSHTEGAWIGVVERACEAISPMETISISPDDVLRAVRPTQNWKSPGPDGLHNFWLKWFVTSHSRLAAQFQSALESGSLPTFMTTGVTHLLFKSGSTTDPKNYRPITCLPTIYKLFTSIIRFKIAYHIDNNNILFSAQTGCKIGSRGTKELLLIDMAICQQVRHNRRNLSAAWIDYKKAYDSVPHTWLMRVLDLYKIHSNLRTLLGACMRQWTTVLKYPGGVGPLDCDEPIKIDRGIFQGDSLSPLWFCLALNPLSTLLLDSGLGYRLRRGSVPISHLLYMDDLKLFAPKKSDLIELLKITKSFSNSISMEFGVDKCAVIHVGRGAVRVSDDVYLSETERLRSLSESETYKYLGMSEALGIMGADMKQSLKERFFCRLTKVLNSFLSGGNKIRAFNGWVMPVLMYSFGILKWTQTELDALDRRVRTLMTAHRMHHPRSSVMRLYIPRRCGGRGLLNAKDLHNREVRNLRDYFLHSDVDVHREVVKVDKGFTPLSLANENWRVPVVMSTGDRKGVWKSKELHGRFYRALNGPDVDQLASVSWLRFGDLFGETEGFVFAIMDEVVKTNNYRKYILKDGTVDICRACHRPGESIRHVISGCSYLANGEYLHRHNLVAKIIHQQLALRYHLVISEVPYYQYVPQPVLENGHTTLYWDRSIITDRTIVANKPDIVVIDRLARRAILVDVTIPHDDNLVKAEKDKMSKYLDLAHEVVDMWNVDSAIIVPIVVTANGLIPKSLDQHLQRLSIGRWVKSQIQKAVLLDTARIVRRFLTLGS

SEQ ID NO: 27101 - protein, 1196 aa, Deilephila porcellus
MIRKTTRQRNARKTSPSSSSSASWASASDVFEVTPNIDASSQRDELQSSPPPLRPVRRRGRPPPAVGLGPVGQSVPSTVPATGGVVRRMRWTHQINENVMRAYFGATRGGTHLTAYRAKMLSLFQALEPTVEVSSQRLSDQVRFIQRRKLLDDEALERLRTDLRVVQDNNIQPVNGDQAADPTPIPIAVIEVTDNLDDNVSPQDEQRLRGALERAISEFMPLSASCRPRLPRLPTHRRNLALMGALDSMLPIYLESSRDLVDTHSILYCAAVAACRVANVNFPNERRATRGVAAVPAWQRRIEERINRARTLIGKLISFKEGNSRPKIMRFVAQAFSGTNTSPRNYRLCVTERIDFYKQKVYAWANRIRRYRRRWDRFQQNRMFQSDQKRVYRCWENSPQSVVDGRLPSAHEMREYWTNIWSSPVSHTEAPWFSVVDRACKVIPAMEAILISPDDVLTAIRPTQNWKSPGPDGLHNFWLKWFPSSHARLATQFQDALEGGSLPTFMTTGVTHLLFKSGSTTEPKNYRPITCLPTIYKVLSSIIRSKIQCHITTNKILYSGQTGCKSGSRGTKELLLIDMAICQQARQNRRNLSAAWIDYKKAYDSVPHTWLMRVLNLYKVDTKLSTFLGACMGQWTTVLKYPGATNPSVNDEPIKIKRGIFQGDSLSPLWFCMALNPLSTLLLDSGLGYRLRRGSEPISHLLYMDDLKLFTSKQSELIELLKIAERFSKSINMEFGVDKCAVIHVKRGVVAVSDDIRVSETVRLRSLSPTETYKYLGMPEALGIKGADVKQSIKERFFSRLTKVLNSFLSGGNKIRAFNGWVMPVLMYSFGILRWTQTELDALDRKVRTLLTAHRMHHPRSSVMRLYIPRRCGGRGMLNAKDLHNREVCNLRDYFLHSDVDMHGVVVMVDKGFTPLSLANENWRKPLVMGIKDREEIWKGKELHGRFYRALQGPDVDRLASVSWLRFGNLFGETEGFVFAIMDEVIKTNNYRKYILKDGTVDICRACHRPGESIRHVISGCSYLANGEYLHRHNLVAKIIHQQIALRYGLVTPEVPYYQYVPQPVLENGHATLYWDRSVITDRTIVANKPDIVIIDRLARRAILVDVTIPHDDNLVKAEKDKLSKYLDLAHEVTELWDVDSTIIVPIVVSAHGLIPKSLDQHLQRLSMGRWVMSQIQKAVLLDTARIVRRFLTLGS

SEQ ID NO: 27102 - protein, 953 aa, Dendrolimus punctatus
MGALDCLLAPYFGSSADLVDTHSILYCGAVAVCRVAGVKFPNTQPTRPASGKPAWQIRIEQRIDRARVLIAKLICFRAGNCRPRVVRFVAQAFTGTNVSPSEYMARATERIDFWKQKVYAWANRIRRYKERADRYFLNRTFQSEEKRVYRGWEKSRDSVADRQIPNIDAMASFWRSIWSMPVSHTEGDWIELVKQSCDQVPDMEPITIEPLDVGNAISSAHNWKSPGPDGLHNFWIKWFKSSHSCLANQFQEAVDRGSLPTFMTTGVTHLLFKSGCTTEPKNYRPITCLPTIYKLLTSILGKKLSNYFYNNNILAITQNGCRAGSRGTKELLLIDTTVSQQARRNRRNLSVAWIDYKKAYDSVPHTWLMRVLELYKVDATLRTFLQACMRQWVTHLKLPGGRGPSLPEGAINIERGIFQGDSLSPLWFCLALNPLSTLLESSKLGYRFRRGGEIMSHLLYMDDLKLFASNEPDLIELLKTTERFSKSINMEFGIEKCAVMHVRRGKVVNSPNLQLSENMSLKSLSETETYKYLGMSESLGIADADVKQTVKDRFFCRLRKVLTSLLSGGNKVRAFNSWVMPVLAYSFGILRWTQTELDALDRRVRCLLTKHRMHHPRSSVMRLYISRRCGGRGFLNAKDLHNREVNNLRTYFLKMDVGLHKDVVAVDKGLTTLSLANENWCNLAVLSASDRINVWKSKALHGRFYRALTGPDVDLSASVNWLRFGNLFGETEGFVFAIMDEVIKTNNYRKYILKDGTLDICRACHRPGESLRHIVSGCSHLSNGEYLHRHNLVARIIHQQLALRYGLVETEVPYYQYSPEPVLENSRATLYWDRSIITDRTIVANKPDIVIIDRSARRAILVDISIPHDDNLVKKEKEKLSKYLDLAHEVTAMWRLESTSIVPIVVTVNGLIAKSLDRHLERLSLGSWVKGQIQKAALLDTARIVRRFLSLEP

SEQ ID NO: 27103 - protein, 954 aa, Hyles vespertilio
MGALDSMLPTYLESSRDLVDTHSILYCAAVAACRVANVQFPKEYRATRGVVTVPAWQRRIEDRINRARTLIGKLISFKEGNSRPKIMRFVTQAFSGTNTSPRNYRLCVTERIDFFKQKVYAWANRIRRYRRRWDRFQQNRKFQTDQKRVYRCWENPPQGVVDGRLPSAHEMREYWTNIWSSPVSHTEASWFSVVDRACEAIPAMETILINPEDVLTAIRQTQNWKSPGPDGLHNFWLKWFPSSHARLAVQFQDALERGSLPAFMTTGVTHLLFKSGCTTEPKNYRPITCLPTIYKVLTSIIRSKITDHINSNQILFSGQTGCMNGSRGTKELLLINMTICQQARHNRRNLSAAWIDYKKAYDSVPHTWLMRVLNLYKINTNLCNFLGSCMGQWTTVLRYPGGTVPPDCDEPIRIKRGIFQGDSLSPLWFCMALNPLSTLLLDSGLGYRLRRGSEPISHLLYMDDLKLFASKQTELIELLKITDIFSKSINMDFGVDKCAVIHVKRGEVAVSDDILVSETVRLRSLSVTETYKYLGMPEALGIMGADVKRSLKERFFSRLTKVLNSFLSGGNKIRAFNGWVMPVLMYSFGILKWTQTELDALDRKVRTLLTAHRMHHPRSSVMRLYIPRRCGGRGILNAKDLHNREVCNLRDYFLHSDVDMHRVVVMVDKGFTPLYLAIENWRKPLVVGIKDREDIWKSKELHGRFYRALHGPDVDRLASVSWLRFGNLFGETEGFVFAIMDEVIKTNNYRKYILNDGTVDICRACHRPGESIRHIISSCSYLANGEYLHRHNLVAKIIHQQIALRYGLVTPEVPYYQYVPQPVLENGHATLYWDRSIITDRTIPANKPDIVIIDRLARRAILVDVTIPHDDNLVKAEKDKMSKYLDLAHEVADMWDVDSTIIVPIVVSAHGLIPKSLDQHLQRLSIGCWVRSQIQKAVLLDTARIVRRFLTLGS

SEQ ID NO: 27104 - protein, 1197 aa, Hyles vespertilio
MFHNKARKKRNAHLTSPSSSSSASWASASDVFEVTPDNDASSQHGELQSSPPPPRPAQRRGRPPPAVGLGPVGPSVPPTVPATGGVVRRMRWTREINENVMRAYFGATNGGINLTAYRVKMLSLFQALEPTVDVSSQRLSDQVRFIQRRKLLDDDTLERLRTDLCFVQEDHVSPVSGDQAAGPTPTPVADFELTDNLDDNVSPQDKQQLRGALECAILEFASLSASCRPRLPRLPTHRRNLALMGALDSMLPTYLESSRDLVDTHSILYCAAVAACRVANVQFPKEYRATRGVVTVPAWQRRIEDRINRARTLIGKLISFKEGNSRPKIMRFVTQAFSGTNTSPRNYRLCVTERIDFFKQKVYAWANRIRRYRRRWDRFQQNRKFQTDQKRVYRCWENPPQGVVDGRLPSAYEMREYWTNIWSSPVSHTEASWFSVVDRACEAIPAMETILINPEDVLTAIRQTQNWKSPGPDGLHNFWLKWFPSSHARLAVQFQDALERGSLPAFMTTGVTHLLFKSGCTTEPKNYRPITCLPTIYKVLTSIIRSKITDHINSNQILFSGQTGCMNGSRGTKELLLINMTICQQARHNRRNLSAAWIDYKKAYDSVPHTWLMRVLNLYKINTNLCNFLGSCMGQWTTVLRYPGGTVPPDCDEPIRIKRGIFQGDSLSPLWFCMALNPLSTLLLDSGLGYRLRRGSEPISHLLYMDDLKLFASKQTELIELLKITERFSNSINMDFGVDKCAVIHVKRGEVAVSDDILVSETVRLRSLSVTETYKYLGMPEALGIMGADVKRSLKERFFSRLTKVLNSFLSGGNKIRAFNGWVMPVLIYSFGILKWTQTELDALDRKVRTLLTAHRMHHPRSSVMRLYIPRRCGGRGILNAKDLHNREVCNLRDYFLHSDVDMHRVVVMVDKGFTPLSLAIENWRKPLVVGIKDREDIWKSKELHGRFYRALHGPDVDRLASVSWLRFGNLFGETEGFVFAIMDEVIKTNNYRKYILKDGTVDICRACHRPGESIRHVISGCSYLANGEYLHRHNLVTKIIHQQIALRYGLVTPEVPYYQYVPQPVLENGHATLYWDRSIITDRTILANKPDIVIIDRLARRAILVDVTIPHDDNLVKAEKDKMSKYLDLAHEVTDMWDVDSTIIVPIVVSAHGLIPKSLDQHLQRLSIGVWVRSQIQKAVLLDTARIVRRFLTLGS

SEQ ID NO: 27105 - protein, 1197 aa, Hyles vespertilio
MFHNKARKKRNAHLTSPSSSSSASWASASDVFEVTPDNDASSQHGELQSSPPPPRPAQRRGRPPPAVGLGPVGPSVPPTVPATGGVVRRMRWTREINENVMRAYFGATNGGINLTAYRVKMLSLFQALEPTVDVSSQRLSDQVRFIQRRKLLDDDTLERLRTDLCFVQEDHVSPVSGDQAAGPTPTPVADFELTDNLDDNVSPQDKQQLRGALECAILEFASLSASCRPRLPRLPTHRRNLALMGALDSMLPTYLESSRDLVDTHSILYCAAVAACRVANVQFPKEYRATRGVVTVPAWQRRIEDRINRARTLIGKLISFKEGNSRPKIMRFVTQAFSGTNTSPRNYRLCVTERIDFFKQKVYAWANRIRRYRRRWDRFQQNRKFQTDQKRVYRCWENPPQGVVDGRLPSAHEMREYWTNIWSSPVSHTEASWFSVVDRACEAIPAMETILINPEDVLTAIRQTQNWKSPGPDGLHNFWLKWFPSSHARLAVQFQDALERGSLPAFMTTGVTHLLFKSGCTTEPKNYRPITCLPTIYKVLTSIIRSKITDHINSNQILFSGQTGCMNGSRGTKELLLINMTICQQARHNRRNLSAAWIDYKKAYDSVPHTWLMRVLNLYKINTNLCNFLGSCMGQWTTVLRYPRGTVPPDCDEPIRIKRGIFQGDSLSPLWFCMALNPLSTLLLDSGLGYRLRRGSEPISHLLYMDDLKLFASKQTELIELLKITDIFSKSINMDFGVDKCAVIHVKRGEVAVSDDILVSETVRLRSLSVTETYKYLGMPEALGIMGADVKRSLKERFFSRLTKVLNSFLSGGNKIRAFNGWVMPVLMYSFGILKWTQTELDALDRKVRTLLTAHRMHHPRSSVMRLYIPRRCGGRGILNAKDLHNREVCNLRDYFLHSDVDMHRVVVMVDKGFTPLYLAIENWRKPLVVGIKDREDIWKSKELHGRFYRALHGPDVDRLASVSWLRFGNLFGETEGFVFAIMDEVIKTNNYRKYILKDGTVDICRACHRPGESIRHVISSCSYLANGEYLHRHNLVAKIIHQQIALRYGLVTPEVPYYQYVPQPVLENGHATLYWDRSIITDRTIPANKPDIVIIDRLARRAILVDVTIPHDDNLVKAEKDKMSKYLDLAHEVADMWDVDSTIIVPIVVSAHGLIPKSLDQHLQRLSIGCWVRSQIQKAVLLDTARIVRRFLTLGS

SEQ ID NO: 27106 - protein, 1077 aa, Hyles vespertilio
MLSLFQALEPTVDVSSQRLSDQVRFIQRRKLLDDDTLERLRTDLCFVQDDHVSPVSGDQSAGPTPTPVADFELTDNLDDNVSPQAKQQLRGALECAILEFSSLSASCRPRLPRLPTHRRNLALMGALDSMLTTYLESSRDLVDTHSILYCAAVAACRVANIKFPNEYKATRGVVIVPAWQRRIEDRINRARTLIGKLISFKEGNSRPKIMRFVTQAFSGTNTSPRNYRLCVTERIDFFKQKVYAWANRIRRYRRRWDRFQQNRKFQTDQKSVYRCWENPPQGVVDGRLPSAHEMREYWTNIWSSPVSHTEASWFSVVDRACEAIPAMETILISPEDVLTAIRQTQNWKSPGPDGLHNFWLKWFPSSHARLAAQFQNALERGSLPTFMTTGVTHLLFKSGCTTEPKNYRPITCLPTIYKVLTSIIRSKITDHINSNQILFSGQTGCMNGSRGTKELLLINMTICQQARHNRRNLSAAWIDYKKAYDSVPHTWLMRVLNLYKINTNLCNFLGSCMGQWTTVLRYPGGTVPPDCDEPIRIKRGIFQGDSLSPLWFCMALNPLSTLLLDSGLGYRLRRGSEPISHLLYMDDLKLFASKQTELIELLKITERFSNSINMDFGVDKCAVIHVKRGEVAVSDDILVSETVRLRSLSVTETYKYLGMPEALGIMGADVKRSLKERFFSRLTKVLNSFLSGGNKIRAFNGWVMPVLIYSFGILKWTQTELDALDRKVRTLLTAHRMHHPRSSVMRLYIPRRCGGRGILNAKDLHNREVCNLRDYFLHSDVDMHRVVVMVDKGFTPLSLAIENWRKPLVVGIKDREDIWKSKELHGRFYRALHGPDVDRLASVSWLRFGNLFGETEGFVFAIMDEVIKTNNYRKYILKDGTVDICRACHRPGESIRHVISGCSYLANGEYLHRHNLVAKIIHQQIALRYGLVTPEVPYYQYVPQPVLENGHATLYWDRSIITDRTILANKPDIVIIDRLARRAILVDVTIPHDDNLVKAEKDKMSKYLDLAHEVTDMWDVDSTIIVPIVVSAHGLIPKSLDQHLQRLSIGCWVRSQIQKAVLLDTARIVRRFLTLGS

SEQ ID NO: 27107 - protein, 1197 aa, Hyles vespertilio
MFHNKARKKRNAHLTSPSSSSSASWASASDVFEVTPDNDASSQHGELQSSPPPPRPAQRRGRPPPAVGLGPVGPSVPPTVPATGGVVRRMRWTREINENVMRAYFGATNGGINLTAYRVKMLSLFQALEPTVDVSSQRLSDQVRFIQRRKLLDDDTLERLRTDLCFVQEDHVSPVSGDQAAGPTPTPVADFELTDNLNDNVSPQDKQQLRGALECAILEFASLSASCRPRLPRLPTHRRNLALMGALDSMLPTYLESSRDLVDTHSILYCAAVAACRVANVQFPKEYRATRGVVTVPAWQRRIEDRINRARTLIGKLISFKEGNSRPKIMRFVTQAFSGTNTSPRNYRLCVTERIDFFKQKVYAWANRIRRYRRRWDRFQQNRKFQTDQKRVYRCWENPPQGVVDGRLPSAHEMREYWTNIWSSPVSHTEASWFSVVDRACEAIPAMETILINPEDVLTAIRQTQNWKSPGPDGLHNFWLKWFPSSHARLAVQFQDALERGSLPAFMTTGVTHLLFKSGCTTEPKNYRPITCLPTIYKVLTSIIRSKITDHINSNQILFSGQTGCMNGSRGTKELLLINMTICQQARHNRRNLSAAWIDYKKAYDSVPHTWLMRVLNLYKINTNLCNFLGSCMGQWTTVLRYPGGTVPPDCDEPIRIKRGIFQGDSLSPLWFCMALNPLSTLLLDSGLGYRLRRGSEPISHLLYMDDLKLFASKQTELIELLKITERFSNSINMDFGVDKCAVIHVKRGEVAVSDDILVSETVRLRSLSVTETYKYLGMPEALGIMGADVKRSLKERFFSRLTKVLNSFLSGGNKIRAFNGWVMPVLIYSFGILKWTQTELDALDRKVRTLLTAHRMHHPRSSVMRLYIPRRCGGRGILNAKDLHNREVCNLRDYFLHSDVDMHRVVVMVDKGFTPLSLAIENWRKPLVVGIKDREDIWKSKELHGRFYRALHGPDVDRLASVSWLRFGNLFGETEGFVFAIMDEVIKTNNYRKYILKDGTVDICRACHRPGESIRHVISGCSYLANGEYLHRHNLVTKIIHQQIALRYGLVTPEVPYYQYVPQPVLENGHATLYWDRSIITDRTILANKPDIVIIDRLARRAILVDVTIPHDDNLVKAEKDKMSKYLDLAHEVTDMWDVDSTIIVPIVVSAHGLIPKSLDQHLQRLSIGVWVRSQIQKAVLLDTARIVRRFLTLGS

SEQ ID NO: 27108 - protein, 1197 aa, Hyles vespertilio
MINNKARKKRNARLTSPSSSSSASWASASDVFEVTSDNDASSQHGELQSSPPPPRPARRRGRPPPAVGLGPVGPSVPPTVPATGGVVRRMRWTREINENVMRAYFGATKGGINLTAYRAKMLSLFQALEPTVDVSSQRLSDQVRFIQRRKLLDDDTLERLRTDLCFVQDDHVSPVSGDQAAGPTPTPVADFELTDNLDDNVSPQAKQQLRGALECAILEFASLSASCRPRLPRLPTHRRNLALMGALDSMLTTYLESSRDLVDTHSILYCAAVAACRVANIKFPNEYKATRGVVIVPAWQRRIEDRINRARTLIGKLISFKEGNSRPKIMRFVTHAFSGTNTSPRNYRLCVTERIDFFKQKVYAWANRIRRYRRRWDRFQQNRKFQTDQKSVYRCWENPPQGVVDERLPSAHEMREYWTNIWSSPVSHTEASWFSVVDRACEAIPAMETILISPEDVLTAIRQTQNWKSPGPDGLHNFWLKWFPSSHARLAAQFQNALERGSLPTFMTTGVTHLLFKSGCTTEPKNYRPITCLPTIYKVLTSIIRSKITDHINSNQILFSGQTGCMNGSRGTKELLLINMTICQQARHNRRNLSAAWIDYKKAYDSVPHTWLMRVLNLYKINTNLCNFLGSCMGQWTTVLRYPGGTVPPDCNEPIRIKRGIFQGDSLSPLWFCMALNPLSTLLLDSGLGYRLRRGSEPISHLLYMDDLKLFASKQTELIELLKITERFSNSINMDFGVDKCAVIHVKRGEVAVSDDILVSETVRLRSLSVTETYKYLGMPEALGIMGADVKRSLKERFFSRLTKVLNSFLSGGNKIRAFNGWVMPVLIYSFGILKWTQTELDALDRKVRTLLTAHRMHHPRSSVMRLYIPRRCGGRGILNAKDLHNREVCNLRDYFLHSDVDMHRVVVMVDKGFTPLSLAIENWRKPLVVGIKDREDIWKSKELHGRFYRALHGPDVDRLASVSWLRFGNLFGETEGFVFAIMDEVIKTNNYRKYILKDGTVDICRACHRPGESIRHVISGCSYLANGEYLHRHNLVAKIIHQQIALRYGLVTPEVPYYQYVPQPVLENGHATLYWDRSIITDRTILANKPDIVIIDRLARRAILVDVTIPHDDNLVKAEKDKMSKYLDLAHEVTDMWDVDSTIIVPIVVSAHGLIPKSLDQHLQRLSIGCWVRSQIQKAVLLDTARIVRRFLTLGS

SEQ ID NO: 27109 - protein, 1116 aa, Ephestia elutella
MTWTTSINENVMRAYFGATEGGSNLSAYRARMLPLFQALEPTVNVSAQRLSDQVRAIQRCRMLDMPTLERLRQEAQPVPTIIVANSQTRREPVVMSNTQNSSSLQVDDVPAQNDCGNTNVSTQNNEQLRSALDDAIHLYRSVPASQRPRLPRLPMHKKNILLMGALDRLLDPYLESSQDLADTHSILYCAAIAACRVAQVKFPDSNRSPRQVTETPAWQLRIERRITTARTLIAKLICFRSGNNRPRVMRFVTQAFVGTNIQPRDYMLWVTERIDFLKQKIYAWANRIRRFRERVDRYRQNRIFQCDQRKVYREWESPANSVVDRQLPSDQNIIHFWQSIWSVPVDHTEDAWIDVVGGACDSMDTMEPVIISADDVSCAIRSAHNWKTPGPDGLHNFWLKWFHRSHAVLATQFQNSIEAGSLPAFMTTGITFLLYKNGSTTEAKNYRPITCLPTLYKLLTSILTSKINQHVDNNNIMAIVQNGCRAGSRGTKELLLIDKTICQQVRRNRKNLSVAWVDYKKAYDSVPHSWLRRVLELYKLDTTLCTFLNTCMGQWTTVLCRPGGGVSSCLTDPIRIQRGIFQGDSLSPLWFCLALNPLSTLLKDSGLGIRLRRGGEIISHLLYMDDLKLFAPKKPDLLRMLKITENFSTSIGMEFGVDKCAVMHVERGRVVNSDGLQLSEMMTLRSLSEVETYKYLGMPESLGISDGDIKQSVRERFFGRLKKVLKSVLSGGNKVRAFNGWVMPLLIYTFGILKWTQTELDALDVKVRKLLTTYRMYHPRSSVMRLYIPRKCGGRGFLNAKNLHNREVCNLREYFLSRESGLHRDVVTVDNGFTPLSMANRNWRKPQVLTTQSRIDVWKSKELHGRFYRVLHGPDVDLLASVAWLRFGDLFGETEGFACAIMDEVIKTNNYRKYILKDGTVDICRACHHPGESLRHIVSGCSHLANGEYLHRHNQVARIIHQQLALKYGLVGSEVPYYKYAPAPVLENGHVTLYWDRSIITDRTIVANRPDIVIIDRETSRAILVDVTIPHDENLVKAEKEKLSKYLDLAHEVTAMWRVGSTIIVPIVVSVNGLIAKSLDRHLERLSLGSWVKSQIQKAVLLDTARIVRRFLSLEP

SEQ ID NO: 27110 - protein, 1195 aa, Eilema sororculum
MITRAKTKLLQDAHLTPTDSSCSSASQAPEITSPRPTPAEASSSDEYFSPPTSPTPVRRPGRGRPSTCLGPRRPPASNRAPATGGDVHRMRWTTSINENVMRAYFAATEGGTNLSAYRSRILPLFQALEPSVNTSAQRLSDQVRVIQRNRMLNETVLETLRLECLRNTCVTPAPAPAPASTTAINEESYVTRDDTPIPVSIQYNEEIKEALECALREYRSMPIHVRPRLPRLPIHRRNIALVSALDSLLPKYLENSENLGDTHSILYCTAVAACRMAGAKFPIKDPAIRPKPAIPAWQCRIERRVAEARVLIGKLICFRSGNTRPRVMRYVTRAFAGTNISPQDYTSRVTERIDFLKQKVCAWANRIRRYKKRVDRYTVNRMFQRDQRWVYRSWERTDESVDDVRRPDAEATNAFWRSIWSVPVSHTEGDWMREVERACETIPAMEEIYIDATDVDCAVRSLSNWKSPGPDGLHNFWLKWLRSSHVVLASQFQSAVESGTLPTFMTTGVTHLLHKTGSTLEPNNYRPITCLPTVYKLLTSILRAKINNHISNNSIMCASQNGCRNGARGTKELLLIDMTISQQARRNGKDLAACWIDYKKAFDSVPHTWLLRVLELYKVNTTLCTFLRSCMGQWRTVLFYPGCRQALGSDEPITIERGIFQGDSLSPLWFCLALNPLSTLLVNSGLGYKLRREGQMVSHLFYMDDLKLFAHTNPQLMALLKVTETFSNSIKMAFGVDKCAVIHVKRGRVVESEGIQLSDSTNLRSLLVTETYKYLGMSQALCINEADMKQMLQDRFFGRLKKVLNSLLSGGNKVRACNSWVMPLLMYSFGILKWTQTELDTIDRKVRAQLTAFRMHHPRSSVMRLYIPRKCGGRGFLNAKTLHNREVCNLRDYFLKSNVDMHREVVNVDTGLTPLGLAKENWRRPTIVSTDSRREVWQSKELHGRFYRALHRPEVDLLASVSWLRFSDLFGETEGFVCAIADEVIKTNNYRKYIMRDGTIDICRACHQPGESLRHITSGCSRLANGEYLHRHNQVARIIHQRLALKYNLVDVEVPYYRYVPEPVLENSHITLYWDRSIITDRTVIANKPDIVVIDRSERRALIVDVTIPHDENLVKAEKDKQVKYLDLAHEVVDMWNVDSAIIVPIVVSVNGLIAKSLEQHLKRLGLDGWVKGQMQKAVLLDTARIVRKFLSLEP

SEQ ID NO: 27111 - protein, 1193 aa, Laothoe populi
MTTRNRVRCARLPSPSSSSSSASWASASEAPEPLPVTDASSQRDGLQSSPPTLTPARRRGRQHPPPVGLGPVGPCAPPMAPAAGGVVRRMRWTHSINENVMRAYFGATEGGTKLTAYRPKMLALFQDLEPTIDVSAQRLSDQVRYIQRRKLLDDAALDRLRANLCVVQDVAQRTVDRPSVPTDDVNIELVDDLDNNVSSHDIQCLRGALESAILEFKLVPACLRPRLPRLPTHKRNLALMGVLDSMLPEYMESSRDLVDTHAILYCAAIAACRVANVRFPNDYRAARDATHVPAWQRRIEERIDRTRTLISKLICFKAGNNRPKVMRFVTQAFLGSSIRPQDYRFCVTERVDLLKQKVYAWANRIRRYKKRWNRFQQNRAFQSDQKRVYRCWEHSQQGVGDGRLPDVRDMRTYWANIWSSPVSHTEGTWIGVVERACEAISPMETISISPDDVLRAVRPTQNWKSPGPDGLHNFWLKWFVTSHSRLAAQFQSALESGSLPTFMTTGVTHLLFKSGSTTDPKNYRPITCLPTIYKLFTSIIRFKIAYHIDNNNILISAQTGCKIGSRGTKELLLIDMAICQQVRHNRRNLSAAWIDYKKAYDSVPHTWLMRVLDLYKIHSNLRTLLGACMRQWTTVLKYPGGAGPLDCDEPIKIDRGIFQGDSLSPLWFCLALNPLSTLLLDSGLGYRLRRGSVPISHLLYMDDLKLFAPKKSDLIELLKITKSFSNSISMEFGVDKCAVIHVGRGAVRVSDDVYLSETERLRSLSEAETYKYLGMSEALGIMGADMKQSLKERFFCRLTKVLNSFLSGGNKIRAFNGWVMPVLVYSFGILKWTQTELDALDRRVRTLMTAHRMHHPRSSVMRLYIPRRCGGRGLLNAKDLHNREVRNLRDYFLHSDVDVHREVVKVDKGFTPLSLANENWRVPVVMSTGDRKGVWKSKELHGRFYRALNGPDVDQLASVSWLRFGDLFGETEGFVFAIMDEVVKTNNYRKYILKDGTVDICRACHRPGESIRHVISGCSYLANGEYLHRHNLVAKIIHQQLALRYHLVISEVPYYQYVPQPVLENGHTTLYWDRSIITDRTIVANKPDIVVIDRLARRAILVDVTIPHDDNLVKAEKDKMSKYLDLAHEVDDMWNVDSAIIVPIVVTANGLIPKSLDQHLQRLSIGRWVKSQIQKAVLLDTARIVRRFLTLGS

SEQ ID NO: 27112 - protein, 1196 aa, Deilephila porcellus
MIRKTTRQRNARKTSPSSSSSASWASASDVFEVTPDIDASSQRDELQSSPPPPRPARRRGRPPPVVGLGPVGPSVPPTVPATGGVVRRMRWTHQINENVMRAYFGATRGGTHLTAYRAKMLSLFQALEPTVEVSSQRLSDQVRFIQRRKLLDDQALERLRTDLRVVQDNNVQPVNGDQAADPTPIPIAVIEVTDNLDDNVSPQDEQRLRGALERAISEFMPLSTSCRPRLPRLPTHRRNLALMGAMDSMLPIYLESSRDLVDTHSILYCAAVAACRVANVNFPNERRATRGVAAVPAWQRRIEERINRARTLIGKLISFKEGNSRPKIMRFVAQAFSGTNTSPRNYRLCVTERIDFYKQKVYAWANRIRRYRRRWDRFQQNRMFQSDQKRVYRCWENSPQSVVDGRLPSAHEMREYWTNIWSSPVSHTEAPWFSVVDRACKVIPAMEAILISPEDVLTAIRPTQNWKSPGPDGLHNFWLKWFPSSHARLATQFQDALEGGSLPTFMTTGVTHLLFKSGSTTEPKNYRPITCLPTIYKVLSSIIRSKIQCHITTNQILYSGQTGCKSGSRGTKELLLIDMAICQQARQNRRNLSAAWIDYKKAYDSVPHTWLMRVLNLYKVDTKLSTFLGACMGQWTTVLKYPGATNPSVNDEPIKIKRGIFQGDSLSPLWFCMALNPLSTLLLDSGLGYRLRRGSEPISHLLYMDDLKLFTSKQSELIELLKIAERFSNSINMEFGVDKCAVIHVKRGVVAVSDDIRVSETVRLRSLSPTETYKYLGMPEVLGIMGADVKQSIRERFFSRLTKVLNSFLSGGNKIRAFNGWVMPVLTYSFGILRWTQTELDALDRKVRTLMTAHRMHHPRSSVMRLYIPRRCGGRGILNAKDLHNREVCNLRDYFLHSDVDMHGIVAMVDKGLTPLSLANENWRKPLVVSIRDRLDIWKSKELHGRFYRALHGPDVDRLASVSWLRFGNLFGETEGFVFAIMDEVIKTNNYRKYILKDGTVDICRACHRPGESIRHVISGCSYLANGEYLHRHNLVAKIIHQQIALRYGLVTPEVPYYQYVPQPVLENGHATLYWDRSVITDRTIVANKPDIVIIDRLARRAILVDVTIPHDDNLVKAEKDKMSKYLDLAHEVTDMWNVDSTIIVPIVVSAHGLIPKSLDQHLQRLSIGCWAKSQIQKAVLLDTARIVRKFLTLGS

SEQ ID NO: 27113 - protein, 1115 aa, Dendrolimus punctatus
MRWTQELNECVMRAYYEATEGGTNLTSYRGRLLSLFQTLQPASAVTAQRLSDQVRAIQRLHLLDESTLDQVSTRLRNAVRINRENTDTPQPTSPTTPADSQGTVNFTIDDVSDSIAVGNVSIQINEQLRRTLEHSIQEFRDQPILNRPRVPKLPLHRNNLLLMGALDCLLAPYFGSSADLVDTHSILYCGAVAVCRVAGVKFPNTQPTRPASGKPAWQIRIERRIVRARVLIAKLICFRAGNCRPRVVRFVAQAFTGTDVSPSEYMARATERIDFWKQKVYAWANRIRRYKERADRYFLNRTFQSEEKRVYRGWEKSRDSVADRQIPNIDAMASFWRSIWSMPVSHTEGDWIELVKQSCDQVPDMEPITIEPLDVGNAIRSAHNWKSPGPDGLHNFWIKWFKSSHSCLANQFQEAVDRGSLPTFMTTGVTHLLFKSGCTTEPKNYRPITCLPTIYKLLTSILEKKISNYFYNNNILAITQNGCKAGSRDTKELLLIDTTVSQQARRNRRNLSVAWIDYKKAYDSVPHTWLMRVLELYKVDATLRTFLQACMRQWVTHLKLPGGRGPSLPEGAINIERGIFQGDSLSPLWFCLALNPLSTLLESSKLGYRFRRGGEIMSHLLYMDDLKLFASNEPDLIELLKTTERFSKSINMEFGIEKCAVMHVRRGKVVNSPNLQLSENMSLKSLSETETYKYLGMSESLGIADADVKQTVKDRFFCRLRKVFTSLLSGGNKVRAFNSWVMPVLAYSFGILRWTQTELDALDRRVRCLLTKHRMHHPRSSVMRLYISRRCGGRGFLNAKDLHNREVNNLRTYFLKMDVGLHKDVVAVDKGLTTLSLANENWCNLAVLSASDRINVWKSKALHGRFYRALTGPDVDLSASVNWLRFGNLFGETEGFVFAIMDEVIKTNNYRKYILKDGTLDICRACHRPGESLRHIVSGCSHLSNGEYLHRHNLVARIIHQQLALRYGLVETEVPYYQYSPEPVLENSRATLYWDRSIITDRTIVANKPDIVIIDRSARRAILVDISIPHDDNLVKKEKEKLSKYLDLAHEVTAMWRLESTSIVPIVVTVNGLIAKSLDRHLERLSLGSWVKGQIQKAALLDTARIVRRFLSLEP

SEQ ID NO: 27114 - protein, 1194 aa, Hyles vespertilio
MTTRASRRNAQMRSPSSSSSASWASASDVFEVTPDIDVSSQRDELQSSPPPPRPARRRGRPPPAVGLGPTGPSVPPTVLATGGVVRRMRWTHQMNENVMRAYFRATKGGTNLTAYRAQMLSMFQVLEPTVNVSSQRLSDQVRFIQRRKLLDDEALERLRTEACVALDVITPITQRAAETPSIPAADIELVDNLDNTVSPQDQQRLRRTLESAILEYKSIPASCRPRVPRLPTHRRNLALMGALDSIVSTYMESSRDLVDTHSILYCAAVAACRVANVKFPINNVTTTRDVATVPAWQRRIEDRINRARTLIGKLIAFRNGNNRQRVMRFVAQAFSGTNISPRDYGLWVTERIDYYKQKVYAWANRIRRYRKRWDRFQQNHTFQSDQKRVYRCWERSPQCVVDGRLPSVHDMRTYWTNIWSSSISHTEADWFGVVERACESIPIMEAISISPEDVLVAIRPTQNWKSPGPDGLHNFWLKWLPCSHARLAAQFQDALDGGSLPTFMTTGVTHLLYKSGSATDPKNYRPITCLPTTYKLFTSILRAKIANHFTSNNILFPGQTGCKSGSRGTKELLLIDMTICQQARQNRRNLSAAWIDYKKAFDSVPHTWLMRVLSLYKIDTNLCTFLGSCMGQWTTVLRYPGGMVSPDCDEPIRIKRGIFQGDSLSPLWFCMALNPLSTLLVDSGLGYRLRRGTEPISHLLYMDDLKLFASKQTELIELLKITEKFSNSINMEFCVDKCAIIHVKRGEVAVSDGVQISDAVRLRALSETETYKYLGMPEALGILSADVKQSVKERFFGRLAKVLNSLLSGGNKIRAFNGWVMPVLMYSFGILRWTQTELDALDRKVRTLLTAHRMHHPRSSVMRLYIPRRCGGRGILNAKDLHNREVCNLRDYFLHSDVDMHRVVVKIDKGLTPLSLANENWRKPLVMSTKDREEVWKSKELHGRFYRALHGPDVDRPASVSWLRFGNLFGETEGFVFAIMDEVIKTNNYRKYILKDGTVDICRACHRPGESIRHVISGCSYLANGEYLHRHNLVAKIIHQQIALRYGLVTLEMPYYQYVPQPVLENGHATLYWDRSIITDRTIVANKPDIVIIDRLARRAILVDVTIPHDVNLVKAEKDKLSKYLDLAHEVTDMWDVDSTVIVPIVVSAHGLMPKSFDQHLQRLSIGRWVKSQIQKAVLLDTARIVRRFLTLDP

SEQ ID NO: 27115 - protein, 955 aa, Hyles vespertilio
MGALDSIVSTYMESSRDLVDTHSILYCAAVAACRVANVKFPINNVTTTRDVATVPAWQRRIEDRINRARTLIGKLIAFRNGNNRQRVMRFVAQAFSGTNISPRDYGLWVTERIDYYKQKVYAWANRIRRYRKRWDRFQQNRTFQSDQKRVYRCWERSPQCVVDGRLPSVHNMRTYWTNIWSSSISHTEADWFGVVERACESIPIMEAISISPEDVLVAIRPTQNWKSPGPDGLHNFWLKWLPCSHARLAAQFQDALDGGSLPTFMTTGVTHLLYKSGSTTDPKNYRPITCLPTTYKLFTSILRAKIANHFTSNNILFPGQTGCKSGSRGTKELLLIDMTICQQARQNRRNLSAAWIDYKKAFDSVPHTWLMRVLSLYKIDTNLCTFLGSCMGQWTTVLRYPGGMVSPDCDEPIRIKRGIFQGDSLSPLWFCMALNPLSTLLMDSGLGYRLRRGTEPISHLLYMDDLKLFASKQTELIELLKITEKFSNSINMEFCVDKCAIIHVKRGEVAVSDGVQISDTVRLRALSETETYKYLGIPEALGILSADVKQSVKERFFGRLAKVLNSLLSGGNKIRAFNGWIMPVLMYSFGILRWTQTELDALDRKVRTLLTAHRMHHPRSSVMRLYIPRRCGGRGILNAKDLHNREVCNLRDYFLHSDVDMHRVVVKIDKGLTPLSLANENWRKPLVMSTKDREEVWKSKELHGRFYRALHGPDVDRPASVSWLRFGNLFGETEGFVFAIMDEVIKTNNYRKYILKDGTVDICRACHRPGESIRHVISGCSYLANGEYLHRHNLVAKIIHQQIALRYGLVTLEMPYYQYVPQPVLENGHATLYWDRSIITDRTIVANKPDIVIIDRLARRAILVDVTIPHDVNLVKAEKDKLSKYLDLAHEVTDMWDVDSTVIVPIVVSAHGLMPKSFDQHLQRLSIGRWVKSQIQKAVLLDTARIVRRFLTLDP

SEQ ID NO: 27116 - protein, 868 aa, Hyles vespertilio
MRFVTQAFSGTNTSPRNYRLCVTERIDYFKQKVYAWANRIRRYRRRWDRFQQNRKFQTDQKSVYRCWENPPQGVVDGRLPSAHEMREYWTNIWSSPVSHTEASWFSVVDRACEAIPAMETILISPEDVLTAIRQTQNWKSPGPDGLHNFWLKWFPSSHARLAAQFRDALERGSLPTFMTTGVTHLLFKSGCTTEPKNYRPITCLPTIYKVLTSIIRSKITDHINSNQILFSGQTGCMNGSRGTKELLLINMTICQQVRHNRRNLSAAWIDYKKAYDSVPHTWLMRVLNLYKINTNLCNFLGSCMGRWTTVLRYPGGTVPPDFDEPIRIKRGIFQGDSLSPLWFCMALNPLSTLLLDSGLGYRLRRGSEPISHLLYMDDLKLFASKQTELIELLKITERFSNSINMDFGVDKCAVIHVKRGEVAVPDDILVSETVRLRSLSVTETYKYLGMPEALGIMGADVKRSLKERFFSRLTKVLNSFLSGGNKIRAFNGWVMPVLIYSFGILKWTQTELDALDRKVRTLLTAHRMHHPRSSVMRLYIPRRCGGRGILNAKDLHNREVCNLRDYFLHSDVDMHRVVVMVDKGFTPLSLAIENWRKPLVVGIKDREDIWKSKELHGRFYRALHGPDVDRLASVSWLRFGNLFGETEGFVFAIMDEVIKTNNYRKYILKDGTVDICRACHRPGESIRHVISGCSYLANGEYLHRHNLVAKIIHQQIALRYGLVTPEVPYYQYVPQPVLENGYATLYWDRSIITERTILANKPDIVIIDRLARRAILVDVTIPHDDNLVKAEKDKMSKYLDLAHEVTDMWDVDSTIIVPIVVSAHGLIPKSLDQHLQRLSIGCWVRSQIQKAVLLDTARIVRRFLTLGS

SEQ ID NO: 27117 - protein, 1055 aa, Hyles vespertilio
MFVQDDHVSPVSGDQAAGPTPTPVADFDLTDNLDDNVSPQDKQQLRGALECAILEFASLSASCRPHLPRLPTHRRNLALMGALDSMLTTYLESSRDLVDTHSILYSAAVAACRVANIKFPNEYKATRGVVTVPAWQRRIEDRINRARTLIGKLISFKEGNSRPKIMRFVTQAFSGTNTSPRNYRLCVTERIDFFKQKVYAWANRIRHYRRRWDRFQQNRKFQTDQKRVYRCWENPPQGVMDGRLPSAHEMREYWTNIWSSPVSHTEASWFSVVDRACEAIPAMETILISPEDVLTAIRQTQNWKSPGPDSLHNFWLKWFPSSHARLAVRFQDALERGSLPAFMTTGVTHLLFKSGCTTEPKNYRPITCLPTIYKVLTSIIRSKITDHINSNQILFSGQTGCMNGSRGTKELLLINMTICQQARHNRRNLSAAWIDYKKAYDSVPHTWLMRVLNLYKINTNLCNFLGSCMGQWTTVLRYPGGTVPPDCDEPIRIKRGIFQGDSLSPLWFCMALNPLSTLLLDSGLGYRLRRGSEPISHLLYMDDLKLFTSKQTELIELLKITDRFSKSINMDFGVDKCAVIHVKRGEIAVSDDILVSETVRLRSLSVTETYKYLGMPEALGIMGADVKRSLKERFFSRLTKVLNSFLSGGNKIRAFNGWVMPVLMYSFGILKWTQTELDALDRKVRTLLTAHRMHHPRSSVMRLYIPRRCGGRGILNAKDLHNREVCNLRDYFLHSDVDMHRVVVMVDKGFTPLSLAIENWRKPLVVGIKDREDIWKSKELHGRFYRALHGPDVDRLASVSWLRLGNLFGETEGFVFAIMDEVIKTNNYRKYILKDGTVDICRACHRPGESIRHVISGCSYLANGEYLHRHNLVAKIIHQQIALRYGLVTPEVPYYQYVPQPVLENGHATLYWDRSIITDRTIPANKPDIVIIDRLARRAILVDVTIPHDDNLVKAEKDKMSKYLDLAHEVADMWDVDSTIIIPIVVSAHGLIPKSLDQHLQRLSIGCWVRSQLQKAVLLDTARMPTTWAPNHRWLGSRASPSLDNFLYFYMYFVF

SEQ ID NO: 27118 - protein, 1197 aa, Hyles vespertilio
MIKRKARTTQNARIRSPSSSSSASWASASDVFEVTPDNDALSQRDELQSSPPPPRPARRRGRPPPAVGLGPVGPSVPPTVPATGGVVRRMRWTCEINENVMRAYFGATKGGINLTAYRAKMLSLFQALEPTIDVSSQRLSDQVRFIQRRKLLDDDTLERLRTDLCVVQDDNVSPVSGDQAVGPTPTPVADFELTDNLDDNVSPQDKQHLRGALVRAISDFVSVSASCRPRLLRLPTHRRNLALMEALDSMLPTYLESSRDLVDTHSILYCAAVAACRVANVQFPKEHRATRGVAAVPAWQLRIEDRINRARTLIGKLISFSEGNSRPRIMRFVTQAFSGTNISPQNYRLCVTERIDFYKQKVYAWANRIRRYRRRWDRFQQNRMFQSDQKRVYRCWEDSSQGVVDGRLPGAHEMREYWTNIWSSPVSHTEASWFSVVDRACESIPAMETILISSEDVQTAIRRTQNWKSPGPDGLHNFWLKWFPSSHARLAAQFQDALEAGSLPAFMTKGVTHLLFKSGCTTEPKNYRPITCLPTIYKILTSIIRSKITDHITSNQILFPGQTGCMNGSRGTKELLLINMTICQQARHNRRNLSAAWIDYKKAYDSVPHTWLMRVLNLYKINTNLCNFLGSCMGQWTTVLRYPGGTAPPDCDEPIRIKRGIFQGDSLSPLWFCMALNPLSTLLLDSGLGYRLRRASEPISHLLYMDDLKLFASKQTELVELLKITERFSNSINMEFGVDKCAVIHVKRGEVAVSDDIQVSETVRLRPLSVTETYKYLGMPEALGIMGANVKQSLKERFFSRLTKVLNSFLSGGNKIRAFNGWVMPVLMYSFGILKWTQTELDALDRKVRTLLTAHRMHHPRSSVMRLYIPRRCGGRGILNAKDLHNREVCNLRDYFLHSDVDMHGVVVMVDKGFTPLSLAIENWRKPLVVGTKDREDIWKSKELHGRFYRALHGPDVDRLASVSWLRFGNLFGETEGFVFAIMDEVIKTNNYRKYILKDGTVDICQACHRPGESIRHVISGCSYLANGEYLHRHNLVAKIIHQQIALRYGLVTPEVPYYQYVPQPVLENGHATLYWDRSIITDRTILANKPDIVIIDRLARRAILVDVTIPHDDNLVKAEKDKMSKYLDLAHEVTDMWDVDSTIIVPIVVSAHGLIPKSLDQHLQRLSIGVWVRSQIQKAVLLDTARIVRRFLTLGS

SEQ ID NO: 27119 - protein, 1194 aa, Hyles vespertilio
MTTRASRRNAQMRSPSSSSSASWASASDVFEVTPDIDVSSQRDELQSSPPPPRPARRRGRPPPAVGLGPTGPSVPPTVLATGGVVRRMRWTHQMNENVMRAYFRATKGGTNLTAYRAQMLSMFQVLEPTVNVSSQRLSDQVRFIQRRKLLDDEALERLRTEACVALDVITPITQRAAETPSIPAADIELVDNLDNTVSPQDQQRLRRTLENAILEYKSIPASCRPRVPRLPTHRRNLALMGALDSIVSTYMESSRDLVDTHSILYCAAVAACRVANVKFPINNVTTTRDVATVPAWQRRIEDRINRARTLIGKLIAFRNGNNRQRVMRFVAQAFSGTNISPRDYGLWVTERIDYYKQKVYAWANRIRRYRKRWDRFQQNRTFQSDQKRVYRCWERSPQCVVDGRLPSVHDMRTYWTNIWSSSISHTEADWFGVVERACESIPIMEAISISPEDVLVAIRPTQNWKSPGPDGLHNFWLKWLPCSHARLAAQFQDALDGGSLPTFMTTGVTHLLYKSGSATDPKNYRPITCLPTTYKLFTSILRAKIANHFTSNNILFPGQTGCKSGSRGTKELLLIDMTICQQARQNRRNLSAAWIDYKKAFDSVPHTWLMRVLSLYKIDTNLCTFLGSCMGQWTTVLRYPGGMVSPDCDEPIRIKRGIFQGDSLSPLWFCMALNPLSTLLVDSGLGYRLRRGTEPISHLLYMDDLKLFASKQTELIELLKITEKFSNSINMEFCVDKCAIIHVKRGEVAVSDGVQISDAVRLRALSETETYKYLGMPEALGILSADVKQSVKERFFGRLAKVLNSLLSGGNKIRAFNGWVMPVLMYSFGILRWTQTELDALDRKVRTLLTAHRMHHPRSSVMRLYIPRRCGGRGILNAKDLHNREVCNLRDYFLHSDVDMHRVVVKIDKGLTPLSLANENWRKPLVMSTKDREEVWKSKELHGRFYRALHGPDVDRPASVSWLRFGNLFGETEGFVFAIMDEVIKTNNYRKYILKDGTVDICRACHRPGESIRHVISGCSYLANGEYLHRHNLVAKIIHQQIALRYGLVTLEMPYYQYVPQPVLENGHATLYWDRSIITDRTIVANKPDIVIIDRLARRAILVDVTIPHDVNLVKAEKDKLSKYLDLAHEVTDMWDVDSTVIVPIVVSAHGLMPKSFDQHLQRLSIGRWVKSQIQKAVLLDTARIVRRFLTLDP

SEQ ID NO: 27120 - protein, 1122 aa, Laothoe populi
MTTRNRVRCARLPSPSSSSSSASWASASEAPEPLPVTDASSQRDGLQSSPPTLTPARRRGRQHPPPVGLGPVGPCAPPMAPAAGGVVRRMRWTHSINENVMRAYFGATEGGTKLTAYRPKMLALFQDLEPTIDVSAQRLSDQVRYIQRRKLLDDAALDRLRANLCVVQDVVQRTVDRPSVPTDDVNIELVDDLDNYVSSHDIQCLRGALESAILEFKLVPACLRPRLPRLPTHKRNLALMGALDSMLPEYMESSRDLVDTHAILYCAAIAACRVANVRFPNDYRAARDATHVPAWQRRIEERIDRTRTLISKLICFKAGNNRPKVMRFVTQAFLGSSIRPQDYRFCVTERIDLLKQKVYAWANRIRRYKKRWNRFQQNRAFQSDQKRVYRCWEHSQQGVGDGRLPDVRDMRTYWANIWSSPVSHTEGAWIGVVERACEAISPMETISISPDDVLRAVRPTQNWKSPGPDGLHNFWLKWFVTSHSRLAAQFQSALESGSLPTFMTTGVTHLLFKSGSTTDPKNYRPITCLPTIYKLFTSIIRFKIAYHIDNNNILFSAQTGCKIGSRGTKELLLIDMAICQQVRHNRRNLSAAWIDYKKAYDSVPHTWLMRVLDLYKIHSNLRTLLGACMRQWTTVLKYPGGAGPLDCDEPIKIDRGIFQGDSLSPLWFCLALNPLSTLLLDSGLGYRLRRGSVPISHLLYMDDLKLFAPKKSDLIELLKITKSFSNSISMEFGVDKCAVIHVGRGAVRVSDDVYLSETERLRSLSESETYKYLGMSEALGIMGADMKQSLKERFFCRLTKVLNSFLSGGNKIRAFNGWVMPVLMYSFGILKWTQTELDALDRRVRTLMTAHRMHHPRSSVMRLYIPRRCGGRGLLNAKDLHNHEVRNLRDYFLHSDVDVHREVVKVDKGFTPLSLANENWRVPVVMSTGDRKGVWKSKELHGRFYRALNGPDVDQLASVSWLRFGDLFGETEGFVFAIMDEVVKTNNYRKYILKDGTVDICRACHRPGESIRHVISGCSYLANGEYLHRHNLVAKIIHQQLALRYHLVISEVPYYQYVPQPVLENGHTTLYWDRSIITDRTIVANKPDIVVIDRLARRAILVDVTIPHDDNLVKAEKDKMSK

SEQ ID NO: 27121 - protein, 1173 aa, Deilephila porcellus
MKSASDVFEVTPDIDASSQRDELQSSPQPPRPARRRGRPPPVVGLGPVGPSVPPTVPATGGVVRRMRWTHQINENVMRAYFGATRGGTHLTAYRAKMLSLFQALEPTVEVSSQRLSDQVRFIQRRKLLDDQALERLRTDLRVVQDNNVQPVNGDQAADPTPIPIAVIEVTDNLDDNVSPQDEQRLRGALERAISEFMPLSTSCRPRLPRLPTHRRNLALMGAMDSMLPIYLESSRDLVDTHSILYCAAVAACRVANVNFPNERRATRGVAAVPAWQRRIEERINRARTLIGKLISFKEGNSRPKIMRFVAQAFSGTNTSPRNYRLCVTERIDFYKQKVYAWANRIRRYRRRWDRFQQNRMFQSDQKRVYRCWENSPQSVVDGRLPSAHEMREYWTNIWSSPVSHTEAPWFSVVDRACKVIPAMEAILISPEDVLTAIRPTQNWKSPGPDGLHNFWLKWFPSSHARLATQFQDALEGGSLPTFMTTGVTHLLFKSGSTTEPKNYRPITCLPTIYKVLSSIIRSKIQYHITTNQILYSGQTGCKSGSRGTKELLLIDMAICQQARQNRRNLSAAWIDYKKAYDSVPHTWLMRVLNLYKVDTKLSTFLGACMGQWTTVLKYPGATNPSVNDEPIKIKRGIFQGDSLSPLWFCMALNPLSTLLLDSGLGYRLRRGSEPISHLLYMDDLKLFTSKQSELIELLKIAERFSNSINMEFGVDKCAVIHVKRGVVAVSDDIRVSETVRLRSLSPTETYKYLGMPEALGIMGADVKQSIRERFFSRLTKVLNSFLSGGNKIRAFNGWVMPVLTYSFGILRWTQTELDALDRKVRTLMTAHRMHHPRSSVMRLYIPRRCGGRGILNAKDLHNREVCNLRDYFLHSDVGMHGIVAMVDKGLTPLSLANENWRKPLVVSIRDRLDIWKSKELHGRFYRALHGPDVDRLASVSWLRFGNLFGETEGFVFAIMDEVIKTNNYRKYILKDGTVDICRACHRPGESIRHVISGCSYLANGEYLHRHNLVAKIIHQQIALRYGLVTPEVPYYQYVPQPVLENGHATLYWDRSVITDRTIVANKPDIVIIDRLARRAILVDVTIPHDDNLVKAEKDKMSKYLDLAHEVTDMWNVDSTIIVPIVVSAHGLIPKSLDQHLQRLSIGCWAKSQIQKAVLLDTARIVRKFLTLGS

SEQ ID NO: 27122 - protein, 995 aa, Deilephila porcellus
MNTIMINNIIIIIIISEFVSLSASCRPRLPRLPTHRRNLALVGALDSMLPTYLESSRDLVDTHSILYCAAVAACRVANITFPNEYRATRGVATVPAWQRRIEDRINRARTLIGKLVSFREGNNRPRVMRFVTQAFSGTNTSPRDYRLCVTERIDFFKQKVYAWANRIRRYRKRWDRFQQNRMFQSDQKRVYRCWESSPQSVMDGRLPSAREMREYWANIWASPVSHTEAAWFSVVNQACEALPTMETISISPEDVLAAIRPTQNWKSPGPDGLHNFWLKWFPSSHARLAIQFQDALERGSLPTFMTTGVTHLLFKSGCTTDPKNYRPITCLPTIYKILTSIIRSKITCHITTNKILFSGQTGCKSGSRGTKELLLIDMTICQQVRHNRRNLSAAWIDYKKAYDSVPHTWLMRVLNLYKIDTKLCTFLEVCMGQWTTVLKYPGATSPSDCDEPIAIRRGIFQGDSLSPLWFCMALNPLSTLLLDSGLGYRLRRGTEPISHLLYMDDLKLFASKQSELIELLKITEIFSKSINMEFGVNKCAVIHVKRGEVAVSDDIQVSETVRLRSLSEMETYKYLGMPEALGIMGVDVKQSLKERFFSRLTKVLNSFLSGGNKIRAFNGWVMPALMYSFGILRWTQTELDALDRKIRTLLTAHRMHHPRSSVMRLYIPRRCGGRGMLNAKDLHNREVCNLRDYFLNSDVDMHGVVVMVDKGFTPLSLANENWRKPLVMGIKDREEIWKGKELHGRFYRALHGPDVDRLASVSWLRFGNLFGETEGFVFAIMDEVIKTNNYRKYILKDGTVDICRACHRPGESIRHVISGCSYLANGEYLHRHNLVAKIIHQQIALRYGLVTPEVPYYQYVPQPVLENGHATLYWDRSVITDRTIVANKPDIVIIDRLARRAILVDVTIPHDDNLVKAEKDKLTKYLDLAHEVTELWDVDSTIIVPIVVSAHGLIPKSLDQHLQRLSMGRWVMSQIQKAVLLDTARIVRRFLTLGS

SEQ ID NO: 27123 - protein, 931 aa, Hemaris fuciformis
MLYCAAVAACRVANVKFLNQVRTTPKVVTVPAWQRRIEHRIDWARTLISKLICFKEGNNRPKIMRFVTQAFSGTNIQPGDYRLCVTERIDFFKQKLYAWANRIRRYKKRSDRFRINRAFQSDQKRVYRCWEHSQQSVEDGRLPSASNMHTYWKSIWSSSVSHTEGSWISVVNQACKDISTMETILISPNDVSVAIRSTQNWKSPGADGLQNFWLKWFPSVHALLAAQFQEAINIGSLPTFMTTGITHLLYKSGTTTDPKNYRPITCLPTIYKLLTSIIRNKISIHIKNNSILFSGQTGCKLGSRGTKELLLIDMTICQQARQNRKNLSVAWIDYKKAYDSVPHAWLKRVFNLYKLDTTLCNFLEACMGQWTTVLKYPGTTCSSDCLEPIRIERGIFQGDSLSPLWFCLALNPLSTLLLDSRLGYCLRRGTEPISHLLYMDDLKLFASKSTELIELLKITQRFSNSINMEFGVDKCAVMHVKRGEIVVSDDIQVSETVRLRSLSEAETYKYLGMSESLGILSSDVKLSLKERFFSRLRKVLNSLLSGGNKIRAFNGWVMPVLMYSFGVLKWTQTELDALDRKIRTLLTAHRMHHPRSSVMRLYIPRRCGGRGLLNAKDLHNREICNLRDYFLHSDESMHGVVVMTDKGFTPLSLANENWRRPMVLGVSERREIWKSKELHGRFFRALNGSDVDQLASVTWLRFGNLFGETEGFVFAIMDEVIKTNNYRKYIMKDGTVDICRACHRPGESIRHVISGCSYLANGEYLHRHNLVAKIIHQQLALRYHLVTDEVPYYQYVPHPVLENSHATLYWDRSVITDRTIVANKPDIVIVDRLARRAMLVDVTIPHDDNLVKAEKDKMSKYLDLAHEVTDMWDVDSTVIVPIVVTANGLIPKSLDQHLRRLSIGCWVKTQIQKAVLLDTARIVRRFLTLEP

SEQ ID NO: 27124 - protein, 1197 aa, Hyles vespertilio
MFHNKARKKRNAHLTSPSSSSSASWASASDVFEVTPDNDASSQHGELQSSPPPPRPAQRRGRPPPAVGLGPVGPSVPPTVPATGGVVRRMRWTREINENVMRAYFGATNGGIKLTAYRVKMLPLFQALEPTVDVSSQRLSDQVRFIQRRKLLDDDTLERLRTDLCFVQEDHVSPVSGDQAAGPTPTPVADFELTDNLDDNVSPQDKQQLRGALEYAILEFASLSASCRPRLPRLPTHRRNLALMGALDSMLPTYLESSRDLVDTHSILYCAAVAACRVANVQFPKEYRATRGVVTVPAWQRRIEDRINRARTLIGKLISFKEGNSRPKIMRFVTQAFSGTNTSPRNYRLCVTERIDFFKQKVYAWANRIRRYRRRWDRFQQNRKFQTDQKRVYRCWENPPQGVVDGRLPSAHEMREYWTNIWSSPVSHTEASWFSVVDRACEAIPAMETILINPEDVLTAIRQTQNWKSPGPDGLHNFWLKWFPSSHARLAVQFQDALERGSLPAFMTTGVTHLLFKSGCTTEPKNYRPITCLPTIYKVLTSIIRSKITDHINSNQILFSGQTGCMNGSRGTKELLLINMTICQQARHNRRNLSAAWIDYKKAYDSVPHTWLMRVLNLYKINTNLCNFLGSCMGQWTTVLRYPGGTVPPDCDEPIRIKRGIFQGDSLSPLWFCMALNPLSTLLLDSGLGYRLRRGSEPISHLLYMDDLKLFASKQTELIELLKITDIFSKSINMDFGVDKCAVIHVKRGEVAVSDDILVSETVRLRSLSVTETYKYLGMPEALGIMGADVKRSLKERFFSRLTKVLNSFLSGGNKIRAFNGWVMPVLMYSFGILKWTQTELDALDRKVRTLLTAHRMHHPRSSVMRLYIPRRCGGRGILNAKDLHNREVCNLRDYFLHSDVDMHRVVVMVDKGFTPLYLAIENWRKPLVVGIKDREDIWKSKELHGRFYRALHGPDVDRLASVSWLRFGNLFGETEGFVFAIMDEVIKTNNYRKYILKDGTVDICRACHRPGESIRHVISSCSYLANGEYLHRHNLVAKIIHQQIALRYGLVTPEVPYYQYVPQPVLENGHATLYWDRSIITDRTIPANKPDIVIIDRLARRAILVDVTIPHDDNLVKAEKDKMSKYLDLAHEVADMWDVDSTIIVPIVVSAHGLIPKSLDQHLQRLSIGCWVRSQIQKAVLLDTARIVRRFLTLGS

SEQ ID NO: 27125 - protein, 1197 aa, Hyles vespertilio
MINNKARKKRNARLTSPSSSSSASWASASDVFEVTSDNDASSQHGELQSSPPPPRPARRRGRPPPAVGLGPVGPSVPPTVPATGGVVRRMRWTREINENVMRAYFGATKGGINLTAYRAKMLSLFQALEPTVDVSSQRLSDQVRFIQRRKLLDDDTLERLRTDLCFVQDDHVSPVSGDQAAGPTPTPVADFELTDNLDDNVSPQAKQQLRGALECAILEFASLSASCRPRLPRLPTHRRNLALMGALDSMLTTYLESSRDLVDTHSILYCAAVAACRVANIKFPNEYKATRGVVIVPAWQRRIEDRINRARTLIGKLISFKEGNSRPKIMRFVTHAFSGTNTSPRNYRLCVTERIDFFKQKVYAWANRIRRYRRRWDRFQQNRKFQTDQKSVYRCWENPPQGVVDGRLPSAHEMREYWTNIWSSPVSHTEASWFSVVDRACEAIPAMETILISPKDVLTAIRQTQNWKSPGPDGLHNFWLKWFPSSHARLAAQFQNALERGSLPTFMTTGVTHLLFKSGCTTEPKNYRPITCLPTIYKVLTSIIRSKITDHINSNQILFSGQTGCMNGSRGTKELLLINMTICQQARHNRRNLSAAWIDYKKAYDSVPHTWLMRVLNLYKINTNLCNFLGSCMGQWTTVLRYPGGTVPPDCDEPIRIKRGIFQGDSLSPLWFCMALNPLSTLLLDSGLGYRLRRGSEPISHLLYMDDLKLFASKQTELIELLKITERFSNSINMDFGVDKCAVIHVKRGEVAVSDDILVSETVRLRSLSVTETYKYLGMPEALGIMGADVKRSLKERFFSRLTKVLNSFLSGGNKIRAFNGWVMPVLIYSFGILKWTQTELDALDRKVRTLLTAHRMHHPRSSVMRLYIPRRCGGRGILNAKDLHNREVCNLRDYFLHSDVDMHRVVVMVDKGFTPLSLAIENWRKPLVVGIKDREDIWKSKELHGRFYRALHGPDVDRLASVSWLRFGNLFGETEGFVFAIMDEVIKTNNYRKYILKDGTVDICRACHRPGESIRHVISGCSYLANGEYLHRHNLVAKIIHQQIALRYGLVTPEVPYYQYVPQPVLENGHATLYWDRSIITDRTILANKPDIVIIDRLARRAILVDVTIPHDDNLVKAEKDKMSKYLDLAHEVTDMWDVDSTIIVPIVVSAHGLIPKSLDQHLQRLSIGCWVRSQIQKAVLLDTARIVRRFLTLGS

SEQ ID NO: 27126 - protein, 1154 aa, Hyles vespertilio
MFHNKARKKRNAHLTSPNSSSSASWASASDVFEVTPDNDASSQHGELQSSPPPPRPAQRRGRPPPAVGLGPVGPSVPPTVPATGGVVRRMRWTREINENVMRAYFGATNGGINLTAYRVKMLSLFQALEPTVDVSSQRLSDQVRFIQRRKLLDDDTLERLRTDLCFVQEDHVSPVSGDQAAGPTPTPVADFELTDNLDDNVSPQDKQQLRGALECAILEFASLSASCRPRLPRLPTHRRNLALMGALDSMLPTYLESSRDLVDTHSILYCAAVAACRVANVQFPKEYRATRGVVTVPAWQRRIEDRINRARTLIGKLISFKEGNSRPKIMRFVTQAFSGTNTSPRNYRLCVTERIDFFKQKVYAWANRIRRYRRRWDRFQQNRKFQTDQKRVYRCWENPPQGVVDGRLPSAHEMREYWTNIWSSPVSHTEASWFSVVDRACETIPAMETILINPEDVLTAIRQTQNWKSPGPDGLHNFWLKWFPSSHARLAVQFQDALERGSLPAFMTTGVTHLLFKSGCTTEPKNYRPITCLPTIYKVLTSIIRSKITDHINSNQILFSGQTGCMNGSRGTKELLLINMTICQQARHNRRNLSAAWIDYKKAYDSVPHTWLMRVLNLYKINTNLCNFLGSCMGQWTTVLRYPGGTVPPDCDEPIRIKRGIFQGDSLSPLWFCMALNPLSTLLLDSGLGYRLRRGSEPISHLLYMDDLKLFASKQTELIELLKITDIFSKSINMDFGVDKCAVIHVKRGEVAVSDDILVSETVRLRSLSVTETYKYLGMPEALGIMGADVKRSLKERFFSRLTKVLNSFLSGGNKIRAFNGWVMPVLMYSFGILKWTQTELDALDRKVRTLLTAHRMHHPRSSVMRLYIPRRCGGRGILNAKDLHNREVCNLRDYFLHSDVDMHRVVVMVDKGFTPLYLAIENWRKPLVVGIKDREDIWKSKELHGRFYRALHGPDVDRLASVSWLRFGNLFGETEGFVFAIMDEVIKTNNYRKYILKDGTVDICRACHRPGESIRHVISSCSYLANGEYLHRHNLVAKIIHQQIALRYGLVTPEVPYYQYVPQPVLENGHATLYWDRSIITDRTIPANKPDIVIIDRLARRAILVDVTIPHDDNLVKAEKDKMSKYLDWHTRLPTCGMSTQQLLSRLSFLLMG

SEQ ID NO: 27127 - protein, 1197 aa, Hyles vespertilio
MINNKARKKRNARLTSPSSSSSASWASASDVFEVTSDNDASSQHGELQSSPPPPRPARRRGRPPPAVGLGPVGPSVPPTVPATGGVVRRMRWTREINENVMRAYFGATKGGINLTAYRAKMLSLFQALEPTVDVSSQRLSDQVRFIQRRKLLDDDTLERLRTDLCFVQDDHVSPVSGDQAAGPTPTPVADFELTDNLDDNVSPQAKQQLRGALECAILEFASLSASCRPRLPRLPTHRRNLALMGALDSMLTTYLESSRDLVDTHSILYCAAVAACRVANIKFPNEYKATRGVVIVPAWQRRIEDRINRARTLIGKLISFKEGNSRPKIMRFVTHAFSGTNTSPRNYRLCVTERIDFFKQKVYAWANRIRRYRRRWDRFQQNRKFQTDQKSVYRCWENPPQGVVDGRLPSAHEMREYWTNIWSSPVSHTEASWFSVVDRACEAIPAMETILISPEDVLTAIRQTQNWKSPGPDGLHNFWLKWFPSSHARLAAQFQNALERGSLPTFMTTGVTHLLFKSGCTTEPKNYRPITCLPTIYKVLTSIIRSKITDHINSNQILFSGQTGCMNGSRGTKELLLINMTICQQTRHNRRNLSAAWIDYKKAYDSVPHTWLMRVLNLYKINTNLCNFLGSCMGQWTTVLRYPGGTVPPDFDEPIRIKRGIFQGDSLSPLWFCMALNPLSTLLLDSGLGYRLRRGSEPISHLLYMDDLKLFASKQTELIELLKITERFSNSINMDFGVDKCAVIHVKRGEVAVSDDILVSETVRLRSLSVTETYKYLGMPEALGIMGADVKRSLKERFFSRLTKVLNSFLSGGNKIRAFNGWVMPVLIYSFGILKWTQTELDALDRKVRTLLTAHRIHHPRSSVMRLYIPRRCGGRGILNAKDLHNREVCNFRDYFLHSDVDMHRVVVMVDKGFTPLSLAIENWRKPLVVGIKDREDIWKSKELHGRFYRALHGPDVDRLASVSWLRFGNLFGETEGFVFAIMDEVIKTNNYRKYILKDGTVDICRACHRPGESIRHVISGCSYLANGEYLHRHNLVAKIIHQQIALRYGLVTPEVPYYQYVPQPVLENGHATLYWDRSIITDRTILANKPDIVIIDRLARRAILVDVTIPHDDNLVKAEKDKMSKYLDLAHEVTDMWDVDSTIIVPIVVSAHGLIPKSLDQHLQRLSIGCWVRSQIQKAVLLDTARIVRRFLTLGS

SEQ ID NO: 27128 - protein, 868 aa, Hyles vespertilio
MRFVTQAFSGTNISPQNYRLCVTERIDFYKQKVYAWANRIRRYRRRWDRFQQNRMFQSDQKRVYRSWEDSSQGVVDGRLPGAHEMREYWTNIWSSPVSHTEASWFSVVDRACESIPAMETILITSEDVQTAIRRTQNWKSPGPDGLHNFWLKWFPSSHARLAAQFQDALEAGSLPAFMTKGVTHLLFKSGCTTEPKNYRPITCLPTIYKILTSIIRSKITDHITSNQILFPGQTGCMNGSRGTKELLLINMTICQQARHNRRNLSAAWIDYKKAYDSVPHTWLMRVLNLYKINTNLCNFLGSCMGQWTTVLRYPGGTAPPDCDEPIRIKRGIFQGDSLSPLWFCMALNPLSTLLLDSGLGYRLRRGSEPISHLLYMDDLKLFASKQTELVELLKITERFSNSINMEFGVDKCAVIHVKRGEVAVSDDIQVSETVRLRPLSVTETYKYLGMPEALGIMGANVKQSLKERFFSRLTKVLNSFLSGGNKIRAFNGWVMPVLMYSFGILKWTQTELDALDRKVRTLLTAHRMHHPRSSVMRLYISRRCGGRGILNAKDLHNREVCNLRDYFLHSDVDMHGVVVMVDKGFTPLSLAIENWRKPLVVGTKDREDIWKSKELHGRFYRAFHGPDVDRLASVSWLRFGNLFGETDGFVFAIMDEVIKTNNYRKYILKDGTVDICRACHRPGESIRHVISGCSYLANGEYLHRHNLVAKIIHQQIALRYGLVTPEVPYYQYVPQPVLENGHATLYWDRSIITDRTILANKPDIVIIDRLARRAILVDVTIPHDDNLVKAEKDKMSKYLDLAHEVTDMWDVDSTIIVPIVVSAHGLIPKSLDQHLQRLSIGVWVRSQIQKAVLLDTARIVRRFLTLGS

SEQ ID NO: 27129 - protein, 1195 aa, Hyles vespertilio
MITRARRRIARSRSPSSSSSASWASASEVFESTPNFDVSSQHGELQSSPPPPRPARRRGRPPPAVGLGPVGPSVPPTVPATGGVVRRMRWTQELNENVMRAYFGATKGGTKLTAYRSKMLSLFQALEPTVDVSSQRLSDQVRFIQRRKLLDDQELERLRTDLCVVQDVNVPSVTVDQAADTPPIPAADIDQTDNMNSNVSPQDEQRLRGALERAISEFVSLPASCRPRLPRLPTHRRNLMLVGALDSMLPTYLESSRDLVDTHSILFCAAVAACRVANVKFPSDFKATRGVVTVPAWQRRIEDRINRARILIGKLISFREGNSRPKIMRFVTQAFAGTNTSPRNYRLCVTERIDFYKQKVYAWANRIRRYRKRWDRFQQNRMFQSDQKRVYRCWENSQHGVGDGRLPSAHEMREYWANIWSSPVSHTEAPWFGVVDRACEAIPAMETILISPEDVLAAIRPTQNWKSPGPDGLHNFWLKWFPSSHARLATQFQDALERGSLPTFMTTGVTHLLFKSGVTTEPKNYRPITCLPTIYKVLTSIIRSKITDHISSNQILFSGQTGCMNGSRGTKELLLIDMTICQQARHNRRNLSAAWIDYKKAYDSVPHTWLKRVLNLYKIYTNLCNFLGSCMGRWATVLRYPGGTGPSDCDELIRIKRGIFQGDSLSPLWFCMALNPLSTLLLDSGLGYRLRRGSEPISHLLYMDDLKLFASKQSELIELLKITERFSNSINMEFGVDKCAVIHVKQGEVAVSDDIQVSETVSLRSLSVTETYKYLGMPEALGIMGADVKQSMKERFFNRLTKVLNSFLSGGNKIRAFNGWVMPVLMYSFGILKWTQTELDALDRKVRTLLTAHRMHHPRSSVMRLYIPRRCGGRGILNAKDLHNRELCNLRDYFLHSNVDMHRVVVMVDKGFTPLSLAIENWRKPLVVGIRDREDIWKSKELHGRFYRALHGPGVDRLASVSWLRFGNLFGETEGFVFAIMDEVIKTNNYRKYILKDGKVDICRACHRPGESIRHVISGCSYLANGEYLHRHNLVAKIIHQQIALRYGLVTSEVPYYQYVPQPVLENGHATLYWDRSIITDRTIVANKPDVVIIDRLARRAILVDVTIPHDDNLVKAEKDKMSKYLDLAHEVTDMWDVDSTIIVPIVVSAHGLIPKSLDQHLQRLSIDCWVKGQIQKAVLLDTARIVRRFLTLSP

SEQ ID NO: 27130 - protein, 1111 aa, Dendrolimus kikuchii
MRWTQELNECVMRAYFEATEGGTNLTSYRGRLLSLFQTLQPASTVTAQRLSDQVRAIQRLHLLDESTLDRLRNTVRINRESTDTPQPTSPAPPADSQWPVNSTMDDVSEGLAVGNVSIQTNEQLRRTLEHSIQEFRDQPILNRPRLPKLPLHRNNLVLMGTLDCLLAPYFRSSADLVDTHSILYCGAVAVCRVAGVKFPNTQPTRPASGKPAWQIRIERRIDRARVLIAKLICFRAGNCRPRVMRFMAQAFAGTNVSPSEYMARATERIDFWKQKVYAWANRIRRYKERADRYFLNRTFQSEEKRVYRGWEKCSDSVTDRQMPNIDAMASFWRNIWSMPVSHTEGDWIELVKQSCEQVPDMEPIIIEPLDVGNAIRSAHNWKSPGLDGLHNFWIKWFKSSHGCLANQFQEAVDRGSLPTFMTTGVTHLLFKSGCTTEPKNYRPITCLPTIYKLLTSILGKKISNYFYDNNILAITQNGCKAGSRGTKELLLIDTTVSQQARRNKRNLSVAWIDYKKAYDSVPHTWLMRVLELYKVDATLRTFLQACMRQWVTHLRLPGGGGASLPEGAINIERGIFQGDSLSPLWFCLALNPLSTLLESSKLGYRFRRGGEIMSHLLYMDDLKLFASNEPDLIELLKTTERFSKSINMEFGIEKCAVMHVRRGKVVNSPNLQLSENISLKSLSETETYKYLGMSESLGIADADVKQTVKDRFFCRLRKVLTSLLSGGNKVRAFNSWVMPVLAYSFGILRWTQTELDALDRRVRCLLTKYRMHHPRSSVMRLYISRRCGGRGFLNAKDLHNREVNNLRAYFLKMDVGLHKDVVAVDKGLTMLSLAKENWCNLAVLSASDRINVWKSKELHGRFYRALTGPDVDLSASVNWLRFGNLFGETEGFVFAIMDEVIKTNNYRKYILKDGTLDICRACHRPGESLRHIVSGCSHLSNGEYLHRHNLVARIIHQQLALRYGLVETEVPYYQYSPEPVLENSRATLYWDRSVITDRTIVANKPDIVIIDRSARRAILVDISIPHDDNLVKKEKEKLSKYLDLAHEVTAMWRLESTSIVPIVVTVNGLIAKSLDCHLERLSLGGWVKGQIQKAALLDTARIVRRFLSLEP

SEQ ID NO: 27131 - protein, 1106 aa, Eilema sororculum
MRWTNSINENVMRAYFAATEGGTNLSAYRTRMLPLFQALEPTINTSAQRLSDQVRVIQRNRMLNETVLEALRLECLRNICVTPAPAPAPASTAGINDVTHVAPDDTPIPVSIQYNEEIKEALECALREYRSMPVHVRPRLPRLPIHRRNIALVSALDSLLPRYLENSENLGDTHSVLYCTAVAACRMAGAKFPIKDPAIRPKPVIPAWQCRIERRVAEARVLIGKLICFRSGNTRPRVMRYVTRAFAGTDISPQDYASRVTERIDFLKQKVYAWANRIRRYKKRVDRYTLNCMFQRDQRWVYRSWERTEESVDDVRRPDAEATNAFWRSIWSVPVSHTEGDWMREVERACETIPEMEEINIDAIDVDCAVRSLSNWKSPGPDGLHNFWLKWLRSSHVVLASQFQSAVESGTLPAFMTTGVTHLLHKTGSTLEPNNYRPITCLPTVYKLLTSILRAKINNHINNNSIMCASQNGCRNGARGTKELLLIDMTISQQARRNRKDLAACWIDYKKAFDSVPHTWLLRVLELYKVNTTLCTFLRSCMGQWRTVLFYPGCRQALGSGVPITIERGIFQGDSLSPLWFCLALNPLSTLLVNSGFGYRLRREGQMVSHLFYMDDLKLFAHTNPQLIALLKITETFSNSIKMAFGVDKCAVIHVKRGRVVESEGIQLSDSTNLRSLLVTETYKYLGMSQALCINEADMKQMLQDRFFGRLKKVLNSLLSGGNKVRACNSWVMPLLMYSFGILKWTQTELDTIDRKVRAQLTAFRMHHPRSSVMRLYIPRKCGGRGFLNAKNLHNREVCNLRDYFLKSNVDMHRDVVNVDTGLTPLGLAKENWHRPTIVSTDSRREVWKSKELHGRFYRALHRPEVDLLASVSWLRFSDLFGETEGFVCAIADEVIKTNNYRKYIMRDGTIDICRACHQPGESLRHITSGCSRLANGEYLHRHNQVARIIHQRLALKYNLVEVEVPYYRYVPEPVLENSHITLYWDRSIITDRTVVANKPDIVVIDRSERRALIVDVTIPHDENLVKAETDKQVKYLDLAHEVVDMWNVDSAIIVPIIVSVNGLIAKSLDQHLKRLGLDGWVKGQMQKAVLLDTARIVRKFLSLEP

SEQ ID NO: 27132 - protein, 954 aa, Laothoe populi
MGALDSMLPEYMESSRDLVDTHAILYCAAIAACRVANVRFPNDYRAARDATHVPAWQRRIEERIDRTRTLISKLICFKAGNNRPKVMRFVTQAFLGSSIRPQDYRFYVTERIDLLKQKVYAWANRIRRYKKRWNRFQQNRAFQSDQKRVYRCWEHSQQGVGDGRLPDVQDMRTYWANIWSSPVSHTEGAWIGIVERACEAISPMETISISPDDVLRAVRPTQNWKSPGPDGLHNFWLKLFVTSHSRLAAQFQSALESGSLPTFMTTGVTHLLFKSGSTTDPKNYRPITCLPTIYKLFTSIIRFKIAYHIDNNNILFSAQTGCKIGSRGTKELLLIDMAICQQVRHNRRNLSAAWIDYKKAYDSVPHTWLMRVLDLYKIHSNLRTLLGACMRQWTTVLKYPGGAGPLVCDEPIKIDRGIFQGDSLSPLWFCLALNPLSTLLLDSGLGYRLRRGSVPISHLLYMDDLKLFAPKKSDLIELLKITKSFSNSITMEFGVDKCAVIHVGRGAVRVSDDVYLSETERLRSLSESETYKYLGMSEALGIMGADMKQSLKERFFCRLTKVLNSFLSGGNKIRAFNGWVMPVLMYSFGILKWTQTELDALDRRVRTLMTAHRMHHPRSSVMRLYIPRRCGGRGLLNAKDLHNREVRNLRDYFLHSDVDVHREVVKVDKGFTPLSLANENWRVPVVMSTGDRRGVWKSKELHGRFYRALNGPDVDQLASVSWLRFGDLFGETEGFVFAIMDEVVKTNNYRKYILKDGTVDICRACHRPGESIRHVISGCSYLANGEYLHRHNLVAKIIHQQLALRYHLVISEVPYYQYVPQPVLENGHTTLYWDRSVIRDRTIVANKPDIVVIDRLARRAILVDVTIPHDDNLVKAEKDKMSKYLDLAHEVVDMWNVDSAIIVPIVVTANGLIPKSLDQHLQRLSIGRWVKSQIQKAVLLDTARIVRRFLTLGS

SEQ ID NO: 27133 - protein, 1193 aa, Laothoe populi
MTTRNRVRCARLPSPSSSSSSASWASASEAPEPLPVTDASSQRDGLQSSPPTLTPARRRGRQHPPPVGLGPVGPCAPPMAPAAGGVVRRMRWTHSINENVMRAYFGATEGGTKLTAYRPKMLALFQDLEPTIDVSAQRLSDQVRYIQRRKLLDDAALDRLRVNLCVVQDVVQRTVDRPSVPTDDVNIELVDDLDNNVSSHDIQCLRGALESAILEFKLVPACLRPRLPRLPTHKRNLALMGALDSMLPEYMESSRDLVDTHAILYCAAIAACRVANVRFPNDYRAARDATHVPAWQRRIEERIDRTRTLISKLICFKAGNNRPKVMRFVTQAFLGSSIRPQDYRFCVTERIDLLKQKVYAWANRIRRYKKRWNRFQQNRAFQSDQKRVYRCWEHSQQGVGDGRLPDVRDMRTYRANIWSSPVSHTEGAWIGVVERACEAISPMETVSISPDDVLRAVRPTQNWKSPGPDGLHNFWLKWFVTSHSRLAAQFQSALESGCLPTFMTTGVTHLLFKSGSTTDPKNYRPITCLPTIYKLFTSIIRFKIAYHIDNNNILFSAQTGCKIGSRGTKELLLIDMAICQQVRHNRRNLSAAWIDYKKAYDSVPHTWLMRVLDLYKIHSNLRTLLGACMRQWTTVLKYPGGAGPLDCDEPIKIDRGIFQGDSLSPLWFCLALNPLSTLLLDSGLGYRLRRGSVPISHLLYMDDLKLFAPKKSDLIELLKITKSFSNSISMEFGVDKCAVIHVGRGAVRVSDDVYLSETERLRSLSESETYKYLGMSEALGIMGADMKQSLRERFFCRLTKVLNSFLSGGNKIRAFNGWVMPVLMYSFGILKWTQTELDALDRRVRTLMTAHRMHHPRSSVMRLYIPRRCGGRGLLNAKDLHNREVRNLRDYFLHSDVDVHREVVKVDKGFTPLSLANENWRVPVVMSTGDRKGVWKSKELHGRFYRALNGPDVDQLASVSWLRFGDLFGETEGFVFAIMDEVVKTNNYRKYILKDGTVDICRACHRPGESIRHVISGCSYLANGEYLHRHNLVAKIIHQQLALRYHLVISEVPYYQYVPQPVLENGHTTLYWDRSIITDRTIVANKPDIVVIDRLARRAILVDVTIPHDDNLVKAEKDKMSKYLDLAHEVVDMWNVDSAIIVPIVVTANGLIPKSLDQHLQRLSIGRWVKSQIQKAVLLDTARIVRRFLTLGS

SEQ ID NO: 27134 - protein, 1195 aa, Deilephila porcellus
MIKRARSKHARPTSPSSSSSASWASASDVFEVTPDIDASSQRDELQSSPPPPRPARRRGRPSPVVGLGPVGPSVPPTVPATGGVVRRMRWTHQINENVMRAYFGATRGGTHLTAYRAKMLSLFQALEPTVEVSSQRLSDQVRFIQRRKLLDDEALERLRTDLRVVQDNNVQPVNGDQAADPTPIPIAVIEVTDNLDDNVSPQDEQRLRGALERAISEFMPLSTSCRPRLPRLPTHRRNLALMGAMDSMLPIYLESSRDLVDTHSILYCAAVAAYRVANVNFPNERRATRGVAAVPAWQRRIEERINRARTLIGKLISFKEGNSRPKIMRFVAQAFSGTNTSPRNYRLCVTERIDFYKQKVYAWANRIRRYRRRWDRFQQNRMFQSDQKRVYRCWENSPQSVVDGRLPSAHEMREYWTNIWSSPVSHTEAPWFSVVDRACKVIPAMEAILISPEDVLTAIRPTQNWKSPGPDGLHNFWLKWFPSSHARLATQFQDALEGGSLPTFMTTGVTHLLFKSGSTTEPKNYRPITCLPTIYKVLSSIIRSKIQCHITTNQILYSGQTGCKSGSRGTKKLLLIDMAICQQARQNRRNLSAAWIDYKKAYDSVPHTWLMRVLNLYKVDTKLSTFLGACMGQWTTVLKYPGATNPSVNDEPIKIKRGIFQGDSLSPLWFCMALNPLSTLLLDSGLGYRLRRGSEPISHLLYMDDLKLFTSKQSELIELLKIAERFSNSINMEFGVDKCAVIHVKRGVVAVSDDIRVSETVRLRSLSPTETYKYLGMPEALGIMGADVKQSIKERFFSRLTKVLNSFLSGGNKIRAFNGWVMPVLMYSFGILRWTQTELDALDRKVRTLMTAHRMHHPRSSVMRLYIPRRCGGRGILNAKDLHNREVCNLRDYFLHSDVDMHGIVAMVDKGLTPLSLANENWRKPLVVSIRDRLDIWKSKELHGRFYRALHGPDVDRLASVSWLRFGNLFGETEGFVFAIMDEVIKTNNYRKYILKDGTVDICRACHRPGESIRHVISGCSYLANGEYLHRHNLVAKIIHQQIALRYGLVTPEVPYYQYVPQPVLENVHATLYWDRSVITDRTIVANKPDIVIIDRLARRAILVDVTIPHDDNLVKAEKDKMSKYLDLAHEVTDMWNVDSTIIVPIVVSAHGLIPKSLDQHLQRLSIGCWAKSQIQKAVLLDTARIVRKFLTLGS

SEQ ID NO: 27135 - protein, 954 aa, Hyles vespertilio
MGALDSMLPTYLESSRDLVDTHSILYCAAVAACRVANVQFPKEYRATRGVVTVPAWQRRIEDRINRARTLIGKLISFKEGNSRPKIMRFVTQAFSGTNTSPRNYRLCVTERIDFFKQKVYAWANRIRRYRRRWDRFQQNRKFQTDQKRVYRCWENPPQGVVDGRLPSAHEMREYWTNIWSSPVSHTEASWFSVVDRACEAIPAMETILINPEDVLTAIRQTQNWKSPGPDGLHNFWLKWFPSSHARLAVQFQDALERGSLPAFMTTGVTHLLFKSGCTTEPKNYRPITCLPTTYKVLTSIIRSKITDHINSNQILFSGQTGCMNGSRGTKELLLINMTICQQARHNRRNLSAAWIDYKKAYDSVPHTWLMRVLNLYKINTNLCNFLGSCMGQWTTVLRYPGGTVPPDCDEPIRIKRGIFQGDSLSPLWFCMALNPLSTLLLDSGLGYRLRRGSEPISHLLYMDDLKLFASKQTELIELLKITERFSNSINMDFGVDKCAVIHVKRGEVAVSDDILVSETVRLRSLSVTETYKYLGMPEALGIMGADVKRSLKERFFSRLTKVLNSFLSGGNKIRAFNGWVMPVLIYSFGILKWTQTELDALDRKVRTLLTAHRMHHPRSSVMRLYIPRRCGGRGILNAKDLHNREVCNLRDYFLHSDVDMHRVVVMVDKGFTPLSLAIENWRKPLVVGIKDREDIWKSKELHGRFYRALHGPDVDRLASVSWLRFGNLFGETEGFVFAIMDEVIKTNNYRKYILKDGTVDICRACHRPGESIRHVISGCSYLANGEYLHRHNLVTKIIHQQIALRYGLVTPEVPYYQYVPQPVLENGHATLYWDRSIITDRTILANKPDIVIIDRLARRAILVDVTIPHDDNLVKAEKDKMSKYLDLAHEVTDMWDVDSTIIVPIVVSAHGLIPKSLDQHLQRLSIGVWVRSQIQKAVLLDTARIVRRFLTLGS

SEQ ID NO: 27136 - protein, 868 aa, Hyles vespertilio
MHFVTQAFSGTNTSPRNYRLCVTERIDFFKQKVYAWANRIRRYRRRWDRFQQNRKFQTDQKSVYRCWENPPQGVVDGRLPSAHEMREYWTNIWSSPVSHTEASWFSVVDRACEAIPAMETILISPEDVLTAIRQTQNWKSPGPDGLHNFWLKWFPSSHARLAAQFQNALERGSLPTFMTTGVTHLLFKSGCTTEPKNYRPITCLPTIYKVLTSIIRSKITDHINSKQILFSGQTGCMNGSRGTKELLLINMTICQQARHNRRNLSAAWIDYKKAYDSVPHTWLMRVLNLYKINTNLCNFLGSCMGQWTTVLRYPGGTVPPDCDEPIRIKRGIFQGDSLSPLWFCMALNPLSTLLLDSGLGYRLRRGSEPISHLLYMDDLKLFASKQTELIELLKITKRFSNSINMDFGVDKCAVIHVKRGEVAVSDDILVSETVRLRSLSVTETYKYLGMPEALGIMGADVKRSLKERFFSRLTKVLNSFLSGGNKIRAFNGWVMPVLIYSFGILKWTQTELDALDRKVRTLLTAHRMHHPRSSVMRLYIPRRCGGRGILNAKDLHNREVCNLRDYFLHSDVGMHRVVVMVDKGFTPLSLAIENWRKPLVVGIKDREDIWKSKELHGRFYRALHGPDVDRLASVSWLRFGNLFGKTEGFVFAIMDEVIKTNNYRKYILKDGTVDICRACHRPGESIRHVISGCSYLANGEYLHRHNLVAKIIHQQIALRYGLVTPEVPYYQYVPQPVLENGHATLYWDRSIITDRTILANKLDIVIIDRLARRAILVDVTIPHDDNLVKAEKDKMSKYLDLAHEVTDMWDVDSTIIVPIVVSAHGLIPKSLDQHLQRLSIGCWVRSQIQKAVLLDTARIVRRFLTLGS

SEQ ID NO: 27137 - protein, 1187 aa, Hyles vespertilio
MHTWSRPVYIYFIQLMKLSSLKKKKNNNNNNIIHGELQSSPPPPRPARRRGRPPPAVGLGPVGPSVPPTVPATGGVVRRMRWTREINENVMRAYFGATKGGINLTAYRAKMLSLFQALEPTVDVSSQRLSDQVRFIQRRKLLDDDTLERLRTDLCFVQDDYVSPVSGDQAAGPTPTPVADFELTDNLDDNVSPQAKQQLRGALECAILEFASLSASCRPRLPRLPTHRRNLALMGALDSMLTTYLESSRDLVDTHSILYCAAVAACRVANIKFPNEYKATRGVVIVPAWQRRIEDRINRARTLIGKLISFKEGNSRPKIMRFVTQAFSGTNTSPRNYRLCVTERIDFIKQKVYAWANRIRRYRRRWDRFQQNRKFQTDQKSVYRCWENPPQGVVDGRLPSAHEMREYWTNIWSSPVSHTEASWFSVVDRACEAIPAMETILISPEDVLTAIRQTQNWKSPGPDGLHNFWLKWFPSSHARLAAQFQNALERGSLPTFMTTGVTHLLFKSGCTTEPKNYRPITCLPTIYKVLTSIIRSKITDHINSNQILFSGQTGCMNGSRGTKELLLINMTICQQARHNRRNLSAAWIDYKKAYDSVPHTWLMRVLNLYKINTNLCNFLGSCMGQWTTVLRYPGGTVPPDCDEPIRIKRGIFQGDSLSPLWFCMALNPLSTLLLDSGLGYRLRRGSEPISHLLYMDDLKLFASKQTELIELLKITERFSNSINMDFGVDKCAVIHVKRGEVAVSDDILVSETVRLRSLSVTETYKYLGMPEALGIMGADVKRSLKERFFSRLAKVLNSFLSGGNKIRAFNGWVMPVLMYSFGILKWTQTELDALDRKVRTLLTAHRMHHPRSSVMRLYIPRRCGGRGILNAKDLHNREVCNLRDYFLHSDVDMHRVVVMVDKGFTPLSLAIENWRKPLVMGIKDREDIWKSKELHGRFYRAFHGPDVDRLASVSWLRFGNLFGETEGFVFAIMDEVIKTNNYRKYILKDGTVDICRACHRPGESIRHVISGCSYLANGEYLHRHNLVAKIIHQQIALRYGLVTPEVPYYQYVPQPVLENGHATLYWDRSIITDRTILANKPDIVIIDRLARRAILVDVTIPHDDNLVKAEKDKMSKYLDLAHEVTDMWDVDSTIIVPIVVSAHGLIPKSLDQHLQRLSIGCWVRSQIQKAVLLDTARIVRRFLTLGS

SEQ ID NO: 27138 - protein, 1194 aa, Hyles vespertilio
MTTRASRRNAQMRSPSSSSSASWASASDVFEVTPDIDVSSQRDELQSSPPPPRPARRRGRPPPAVGLGPTGPSVPPTILATGGVVRRMRWTHQMNENVMRAYFRATKGGTNLTAYRAQMLSMFQVLEPTVNVSSQRLSDQVRFIQRRKLLDDEALERLRTEACVALDVITPITQRAAETPSIPAADIELVDNLDNTVSPQDQQRLRRTLESAILEYKSIPASCRPRVPRLPTHRRNLALMGALDSIVSTYMESSRDLVDTHSILYCAAVAACRVANVKFPINNVTTTRDVATVPAWQRRIEDRINRARTLIGKLIAFRNGNNRQRVMRFVAQAFSGTNISPRDYGLWVTERIDYYKQKVYAWANRIRRYRKRWDRFQQNRTFQSDQKRVYRCWERSPQCVVDGRLPSVHDMRTYWTNIWSSSISHTEADWFGVVERACESIPIMEAISISPEDVLVAIRPTQNWKSPGPDGLHNFWLKWLPCSHARLAAQFQDALDGGSLPTFMTTGVTHLLYKSGSATDPKNYRPITCLPTTYKLFTSILRAKIANHFTSNNILFPGQTGCKSGSRGTKELLLIDMTICQQARQNRRNLSAAWIDYKKAFDSVPHTWLMRVLSLYKIDTNLCTFLGSCMGQWTTVLRYPGGMVSPDCDEPIRIKRGIFQGDSLSPLWFCMALNPLSTLLVDSGLGYRLRRGTEPISHLLYMDDLKLFASKQTELIELLKITEKFSNSINMEFCVDKCAIIHVKRGEVAVSDGVQISDAVRLRALSETETYKYLGIPEALGILSADVKQSVKERFFGRLAKVLNSLLSGGNKIRAFNGWVMPVLMYSFGILRWTQTELDALDRKVRTLLTAHRMHHPRSSVMRLYIPRRCGGRGILNAKDLHNREVCNLRDYFLHSDVDMHRVVVKIDKGLTPLSLANENWRKPLVMSTKDREEVWKSKELHGRFYRALHGPDVDRPASVSWLRFGNLFGETEGFVFAIMDEVIKTNNYRKYILKDGTVDICRACHRPGESIRHVISGCSYLANGEYLHRHNLVAKIIHQQIALRYGLVTLEMPYYQYVPQPVLENGHATLYWDRSIITDRTIVANKPDIVIIDRLARRAILVDVTIPHDVNLVKAEKDKLSKYLDLAHEVTDMWDVDSTVIVPIVVSAHGLMPKSFDQHLQRLSIGRWVKSQIQKAVLLDTARIVRRFLTLDP

SEQ ID NO: 27139 - protein, 1111 aa, Dendrolimus kikuchii
MRWTQELNECVMRAYYEATEGETNLTSYRGRLLSLFQTLQPASTVTAQRLSDQVRAIQRLHLLDESTLDRLRNAVRINREATDTPQPTSPAPPADSQRPVNFTMDDVSDGLAVGDVSIQLNEQLRRTLEHSIQEFRDQPILNRPRVPKLPMHRNNLLLMGTLDCLLAPYFRSSTDLADTHSILYCGAVAVCRVAGVKFPNTQPTRPASGKPAWQIRIERRIDRARVLIAKLICFRAGNCRPRVMRFVAQAFAGTNISPSEHMARATERIDFWKQKVYAWANRIRRYKERADRYFLNRTFQSEEKRVYRGWEKSSDSVADRQIPNTDAMASFWRSIWSVPVSHTEGDWIEVIKQSCEQVPDMEPITIEPLDVGNAIRSAHNWKSPGPDGLHNFWIKWFKSSHGCLANQFQEAVDRGSLPTFMTTGVTHLLFKSGCTTEPKNYRPITCLPTIYKLLTSILEKKLSNYFYNNNILAITQNGCKAGSRGTKELLLIDTTVSQQARRNRRNLSVAWIDYKKAYDSVPHTWLMRVLELYKVDATLRTFLQACMRQWVTYLRVPGGGGVPLPEGEINIERGIFQGDSLSPLWFCLALNPLSTLLESSKLGYRFRRGGEIVSHLLYMDDLKLFASNEPDLIELLKTTEHFSKSINMEFGIEKCAVMHVRRGKVVNSPNLQLSENMSLKSLSETETYKYLGMSESLGIADADVKQTVKDRFFCRLRKVLTSLLSGGNKVRAFNSWVMPVLAYSFGILRWTQTELDALDRRVRCLLTKHRMHHPRSSVMRLYISRRCGGRGFLNAKDLHNREVNNLRAYFLKMNVGLHKDVVAVDKGLTTLALAKENWCNLAVLSTSDRINVWKSKELHGRFYRALTGPDVDLSASVNWLRFGNLFGETEGFVFAIMDEVIKTNNYRKYILKDGTLDICRACHRPGESLRHIVSGCSHLSNGEYLHRHNLVARIIHQQLALRYGLVETEVPYYQYSPEPVLENSRATLYWDRSVITDRTIVANKPDIVIIDRSARRAILVDISIPHDDNLVKKEKEKLSKYLDLAHEVTAMWRLESTSIVPIVVTVNGLIAKSLDRHLERLSLGSWVKGQIQKAALLDTARIVRRFLSLEP

SEQ ID NO: 27140 - protein, 1111 aa, Dendrolimus kikuchii
MRWTQELNECVMRAYYEATEGETNLTSYRGRLLSLFQTLQPASTVTAQRLSDQVRAIQRLHLLDESTLDRLRNAVRINREVTDTPQPTSPAPPADSQRPVNFTMDDVSDGLAVGDVSIQINEQLRRTLEHSIQEFRDQPILNRPRVPKLPMHRNNLLLMGTLDCLLAPYFRSSTDLADTHSILYCGAVAVCRVAGVKFPNTQPTRPASGKPAWRIRIERRIDRARVLIAKLICFRAGNCRPRVMRFVAQAFAGTNISPSEHMARATERIDFWKQKVYAWANRIRRYKERADRYFLNRTFQSEEKRVYRGWEKSSDSVADRQIPNTDAMASFWRSIWSVPVSHTEGDWIEVIKQSCEQVPDMEPITIEPLDVGNAIRSAHNWKSPGPDGLHNFWIKWFKSSHGCLANQFQEAVDRGSLPTFMTTGVTHLLFKSGCTTEPKNYRPITCLPTIYKLLTSILEKKLSNYFYNNNILAITQNGCKAGSRGTKELLLIDTTVSQQARRNRRNLSVAWIDYKKAYDSVPHTWLMRVLELYKVDATLRTFLQACMRQWVTYLRVPGGGGVPLPEGEINIERGIFQGDSLSPLWFCLALNPLSTLLESSKLGYRFRRGGEIVSHLLYMDDLKLFASNEPDLIELLKTTEHFSKSINMEFGIEKCAVMHVRRGKVVNSPNLQLSENMSLKSLSETETYKYLGMSESLGIADADVKQTVKDRFFCRLRKVLTSLLSGGNKVRAFNSWVMPVLAYSFGILRWTQTELDALDRRVRCLLTKHRMHHPRSSVMRLYISRRCGGRGFLNAKDLHNREVNNLRAYFLKMNVGLHKDVVAVDKGLTTLALAKENWCNLAVLSTSDRINVWKSKELHGRFYRALTGPDVDLSASVNWLRFGNLFGETEGFVFAIMDEVIKTNNYRKYILKDGTLDICRACHRPGESLRHIVSGCSHLSNGEYLHRHNLVARIIHQQLALRYGLVETEVPYYQYSPEPVLENSRATLYWDRSVITDRTIVANKPDIVIIDRSARRAILVDISIPHDDNLVKKEKEKLSKYLDLAHEVTAMWRLESTSIVPIVVTVNGLIAKSLDRHLERLSLGSWVKGQIQKAALLDTARIVRRFLSLEP

SEQ ID NO: 27141 - protein, 1192 aa, Eilema sororculum
MLTRAQANRKRSAPTTSPDSSLSSAAQPPAVEPAASSSSSSDEFFSPPTSPTPVRRPGRGRPPICLGPRRPPASNRAPATGGNVHRMRWTNSINENVMRAYFAATEGGTNLSAYRTRMLPLFQALEPTINTSAQRLSDQVRVIQRNRMLNETVLETLRLECLRNICVTPAPAPAPASTAGINDVTYVAPDDTPIPVSIQYNEEIKEALECALREYRSMPVHVRPRLPRLPIHRRNIALVSALDSLLPRYLENSENLGDTHSILYCTAVAACRIAGAKFPIKHPAIRPKPVIPAWQCRIERRVAEARVLIGKLICFRSGNTRPRVMRYVTRAFAGTDISPQDYTSRVTERIDFLKQKVYAWANRIRRYKKRVDRYTINCMFQRDQRWVYRSWERTEESVDDVRRPDAEATNAFWRSIWSVPVSHTEGDWMREVERACETIPEMEEINIDAIDVDCAVRSLSNWKSPGPDGLHNFWLKWLRSSHVVLASQFQSAIESGTLPAFMTTGVTHLLHKTGSTLEPNNYRPITCLPTVYKLLTSILRAKINNHINNNSIMCASQNGCRNGARGTKELLLIDMTISQQARRNRKDLAACWIDYKKAFDSVPHTWLLRVLELYKVNTTLCTFLRSCMGQWRTVLFYPGCRQALGSGVPITIERGIFQGDSLSPLWFCLALNPLSTLLVNSGLGYRLRREGQMVSHLFYMDDLKLFAHTNPQLIALLKITETFSNSIKMAFGVDKCAVIHVKRGRVVESEGIQLSDSTNLRSLLVTETYKYLGMSQALCINEAGMKQMLQDRFFGRLKKVLNSLLSGGNKVRACNSWVMPLLMYSFGILKWTQTELDTIDRKVRAQLTAFRMHHPRSSVMRLYIPRKCGGRGFLNAKTLHNREVCNLRDYFLKSNVDMHRDVVNVDTGLTPLGLAKENWRRPTIVGTDSRREVWQSKELHGRFYRALHRPEVDLLASVSWLRFSDLFGETEGFVCAIADEVIKTNNYRKYIMRDGTIDICRACHQPGESLRHITSGCSRLANGEYLHRHNQVARIIHQRLALKYNLVEVEVPYYRYVPEPVLENSHITLYWDRSIITDRTVVANKPDIVVIDRSEHRALIVDVTIPHDENLVKAEKDKQVKYLDLAHEIVDMWNVDSAIIVPIVVSVNGLIAKNLDQHLKRLGLDGWVKGQMQKAVLLDTARIVRKFLSLEP

SEQ ID NO: 27142 - protein, 954 aa, Deilephila porcellus
MGAMDSMLPIYLESSRDLVDTHSILYCAAVAACRMANVNFPNERRATRGVAAVPAWQRRIEERINRARTLIGKLISFKEGNSRPKIMRFVAQAFSGTNTSPRNYRLCVTERIDFYKQKVYAWANRIRRYRRRWDRFQQNRMFQSDQKRVYRCWENSPQSVVDGRLPSAHEMREYWTNIWSSPVSHTEAPWFSVVDRACKVIPAMEAILISPEDVLTAIRPTQNWKSPGPDGLHNFWLKWFPSSHARLATQFQDALEGGSLPTFMTTGVTHLLFKSGSTTEPKNYRPITCLPTIYKVLSSIIRSKIQCHITTNQILYSGQTGCKSGSRGTKELLLIDMAICQQARQNRRNLSAAWIDYKKAYDSVPHTWLMRVLNLYKVDTKLSTFLGACMGQWTTVLKYPGATNPSVNDEPIKIKRGIFQGDSLSPLWFCMALNPLSTLLLDSGLGYRLRRGSEPISHLLYMDDLKLFTSKQSELIELLKIAERFSNSINMEFGVDKCAVIHVKRGVVAVSDDIRVSETVRLRSLSPTETYKYLGMPEALGIMGADVKQSIRERFFSRLTKVLNSFLSGGNKIRAFNGWVMPVLTYSFGILRWTQTELDALDRKVRTLMTAHRMHHPRSSVMRLYIPRRCGGRGILNAKDLHNREVCNLRDYFLHSDVDMHGIVAMVDKGLTPLSLANENWRKPLVVSIRDRLDIWKSKELHGRFYRALHGPDVDRLASVSWLRFGNLFGETEGFVFAIMDEVIKTNNYRKYILKDGTVDICRACHRPGESIRHVISGCSYLANGEYLHRHNLVAKIIHQQIALRYGLVTPEVPYYQYVPQPVLENGHATLYWDRSVITDRTIVANKPDIVIIDRLARRAILVDVTIPHDDNLVKAEKDKMSKYLDLAHEVTDMWNVDSTIIVPIVVSAHGLIPKSLDQHLQRLSIGCWAKSQIQKAVLLDTARIVRKFLTLGS

SEQ ID NO: 27143 - protein, 1070 aa, Deilephila porcellus
MSCQSFYIDDRIIIIIKLIMNNLLLDDEALERLRTDLRVVQDNNVQPVNGDQAADPTPIPIAVIEVTDNLDDNVSPQDEQRLRGALERAISEFMPLSMSCRPRLPRLPTHRRNLALMGAMDSMLPIYLESSRDLVDTHSILYCAAVAACRVANVNFPNERRATRGVAAVPAWQRRIEERINRARTLIGKLISFKEGNSRPKIMRFVAQAFSGTNTSPRNYRLCVTERIDFYKQKVYAWANRIRRYRRRWDRFQQNRMFQSDQKRVYRCWENSPQSVVDGRLPSAHEMREYWTNIWSSPVSHTEAPWFSVVDRACKVIPAMEAILISPEDVLTAIRPTQNWKSPGPDGLHNFWLKWFPSSHARLATQFQDALEGGSLPTFMTTGVTHLLFKSGSTTEPKNYRPITCLPTIYKVLSSIIRSKIQCHITTNQILYSGQTGCKSGSRGTKELLLIDMAICQQARQNRRHLSAAWIDYKKAYDSVPHTWLMRVLNLYKVDTKLSTFLGACMGQWTTVLKYPGATNPSVNDEPIKIKRGIFQGDSLSPLWFCMALNPLSTLLLDSGLGYRLRRGSEPISHLLYMDDLKLFTSKQSELIELLKIAERFSNSINMEFGVDKCAVIHVKRGVVAVSDDIRVSETVRLRSLSPTETYKYLGMPEALGIMGADVKQSIRERFFSRLTKVLNSFLSGGNKIRAFNGWVMPVLMYSFGILRWTQTELDALDRKVRTLMTAHRMHHPRSSVMRLYIPRRCGGRGILNAKDLHNREVCNLRDYFLHSDVDMHGIVAMVDKGLTPLSLANENWRKPLVVSIRDRLDIWKSKELHGRFYRALHGPDVDRLASVSWLRFGNLFGETEGFVFAIMDEVIKTNNYRKYILKDGTVDICRACHRPGESIRHVISGCSYLANGEYLHRHNLVAKIIHQQIALRYGLVTPEVPYYQYVPQPVLENGHATLYWDRSVITDRTIVANKPDIVIIDRLARRAILVDVTIPHDDNLVKAEKDKMSKYLDLAHEVTDMWNVDSTIIVPIVVSAHGLIPKSLDQHLQRLSIGCWAKSQIQKAVLLDTARIVRKFLTLGS

SEQ ID NO: 27144 - protein, 1197 aa, Hyles vespertilio
MINNKARKKRNAHLTSPSSSSSASWASASDVFEVTSDNDASSQHGELQSSPPPPRPARRRGRPPPAVGLGPVGPSVPPTVPATGGVVRRMRWTREINENVMRAYFGATKGGINLTAYRAKMLSLFQALEPTVDVSSQRLSDQVRFIQRRKLLDDDTLERLRTDLCFVQDDHVSPVSGDQAAGPTPTPVADFELTDNLDDNVSPQAKQQLRGALECAILEFSSLSASCRPRLPRLPTHRRNLALMGALDSMLTTYLESSRDLVDTHSILYCAAVAACRVANIKFPNEYKATRGVVIVPAWQRRIEDRINRARTLIGKLISFKEGNSRPKIMRFVTQAFSGTNTSPRNYRLCVTERIDFFKQKVYAWANRIRRYRRRWDRFQQNRKFQTDQKSVYRCWENPPQGVVDGRLPSAHEMREYWTNIWSSPVSHTEASWFSVVDRACEAIPAMETILISPEDVLTAIRQTQNWKSPGPDGLHNFWLKWFPSSHARLAAQFQNALDRGSLPTFMTTGVTHLLFKSGCTTEPKNYRPITCLPTIYKVLTSIIRSKITDHINSNQILFSGQTGCMNGSRGTKELLLINMTICQQARHNRRNLSAAWIDYKKAYDSVPHTWLMRVLNLYKINTNLCNFLGSCMGQWTTVLRYPGGTVPPDCDEPIRIKRSIFQGDSLSPLWFCMALNPLSTLLLDSGLGYRLRRGSEPISHLLYMDDLKLFASKQTELIELLKITERFSNSINMDFGVDKCAVIHVKRGEVAVFDDILVSETVRLRSLSVTETYKYLGMPEALGIMGADVKRSLKERFFSRLTKVLNSFLSGGNKIRAFNGWVMPVLIYSFGILKWTQTELDALDRKVRTLLTAHRMHHPRSSVMRLYIPRRCGGRGILNAKDLHNREVCNLRDYFLHSDVDMHRVVVMVDKGFTPLSLAIENWRKPLVVGIKDREDIWKSKELHGRFYRALHGPDVDRLASVSWLRFGNLFGETEGFVFAIMDEVIKTNNYRKYILKDGTVDICRACHRPGESIRHVISGCSYLANGEYLHRHNLVTKIIHQQIALRYGLVTPEVPYYQYVPQPVLENGHATLYWDRSIITDRIILANKPDIVIIDRLARRAILVDVTIPHDDNLVKAEKDKMSKYLDLAHEVTDMWDVDSTIIVPIVVSAHGLIPKSLDQHLQRLSIGCWVRSQIQKAVLLDTARIVRRFLTLGS

SEQ ID NO: 27145 - protein, 1197 aa, Hyles vespertilio
MFHNKARKKRNAHLTSPSSSSSASWASASDVFEVTPDNDASSQHGELQSSPPPPRPAQRRGRPPPAVGLGPVGPSVPPTVPATGGVVRRMRWTREINENVMRAYFGATNGGINLTAYRVKMLSLFQALEPTVDVSSQRLSDQVRFIQRRKLLDDDTLERLRTDLCFVQEDHVSPVSGDQAAGPTPTPVADFELTDNLDDNVSPQDKQQLRGALECAILEFASLSASCRPRLPRLPTHRRNLALMGALDSMLPTYLESSRDLVDTHSILYCAAVAACRVANVQFPKEYRATRGVVTVPAWQRRIEDRINRARTLIGKLISFKEGNSRPKIMRFVTQAFSGTNTSPRNYRLCVTERIDFFKQKVYAWANRIRRYRRRWDRFQQNRKFQTDQKRVYRCWENPPQGVVDGRLPSAHEMREYWTNIWSSPVSHTEASWLSVVDRACEAIPAMETILINPEDVLTAIRQTQNWKSPGPDGLHNFWLKWFPSSHARLAVQFQDALERGSLPAFMTTGVTHLLFKSGCTTEPKNYRPITCLPTIYKVLTSIIRSKITDHINSNQILFSGQTGCMNGSRGTKELLLINMTICQQARHNRRNLSAAWIDYKKAYDSVPHTWLMRVLNLYKINTNLCNFLGSCMGQWTTVLRYPGGTVPPDCDEPIRIKRGIFQGDSLSPLWFCMALNPLSTLLLDSGLGYRLRRGSEPISHLLYMDDLKLFASKQTELIELLKITERFSNSINMDFGVDKCAVIHVKRGEVAVSDDILVSETVRLRSLSVTETYKYLGMPEALGIMGADVKRSLKERFFSRLTKVLNSFLSGGNKIRAFNGWVMPVLIYSFGILKWTQTELDALDRKVRTLLTAHRMHHPRSSVMRLYIPRRCGGRGILNAKDLHNREVCNLRDYFLHSDVDMHRVVVMVDKGFTPLSLAIENWRKPLVVGIKDREDIWKSKELHGRFYRALHGPDVDRLASVSWLRFGNLFGETEGFVFAIMDEVIKTNNYRKYILKDGTVDICRACHRPSESIRHVISGCSYLANGEYLHRHNLVTKIIHQQIALRYGLVTPEVPYYQYVPQPVLENGHATLYWDRSIITDRTILANKPDIVIIDRLARRAILVDVTIPHDDNLVKAEKDKMSKYLDLAHEVTDMWDVDSTIIVPIVVSAHGLIPKSLDQHLQRLSIGVWVRSQIQKAVLLDTARIVRRFLTLGS

SEQ ID NO: 27146 - protein, 1193 aa, Hyles vespertilio
MITRKARARQNARLRPPSSSSSASWASASDVFEVTPDIDVSSQRDELQSSPPPPRPARRRGRPPPAVGLGPVGQSVPPTVPATGGVVRRMRWTREINENVMRAYFGATKGGINLTAYRAKMLSLFQALEPMVDVSSQRLSDQVRFIQRRKLLDDDTLERLRTDLCVVQDDDISPVSGDQAASPTPTPVFDFELTDNLDDNVSPQDKQHLRGALERAISEFVSLSASCRPRLPRLPTHRRNLALMGALDSMLPTYLESSRDLVDTHSILYCAAVAACRVANVQFPKEYRATRGIVTVPAWQLRIEDRINRARTLIGKLISFSEGNSRPRIMRFVTQAFSGTNISPQNYRLCVTERIDFYKQKVYAWANRIRRYRRRWDRFQQNRMFQSDQKRVYRCWENSSQGVVDGRLPGAHEMREYWTNIWSSPVSHTEASWFSVVDRACEAIPAMETILISLEDVQTAIRRTQNWKSPGPDGLHNFWLKWFPSSHVRLAAQFHDALEAESLPAFMTTGVIHLLFKSGCTTEPKNYRPITCLPTIYKILTSIIRSKITDHITSNQILFPGQTGCMNGSRGTKELLLINMTICQQARHNRRNLSAAWIDYKKAYDSVPHTWLMRVLNLYKINTNLCNFLGSCMGQWTTVLRYPGGTVPPDCDEPIRIKRGIFQGDSLSPLWFCMALNPLSTLLLDSGLGYRLRRGSEPISHLLYMDDLKLFASKQTELIELLKITERFSNSINMEFGVDKCAVIHVKRGEVAVSDDIHVSETVRLRSLSVTEIYKYLGMPEALGIMGADVKRSLKERFFSRLTKVLNSFLSGGNKIRAFNGWFMPVLMYSFGILKWTQTELDALDRKVRTLLTAHRMHHPRSSVMRLYIPRRCGGRGILNAKDLHNREVCNLRDYFLHSDVDMHRVVVMVDKGFTPLSLAIENWRKPLVVGIRDREDIWKSKELHGRFYRALHGPDVDRLASVSWLRFGNLFGETEGFVFAIMDEVIKTNNYRKYILKDGTVDICRACHRPGESIRHVISGCSYLANGEYLHRHNLVAKIIHQQIALRYGLVTSEVPYYQYVPQPVLENGHATLYWDRSIITDRTILSNKPDIVIIDRLARRAILVDVTIPHDDNLVKAEKDKMSKYLDLAHEVTDMWDVDSTIIVPIVVSAHGLIPKSLDQHLQRLSIGCWVRSQIQKAVLLDTARHDNKEK

SEQ ID NO: 27147 - protein, 1181 aa, Hyles vespertilio
MKWYNNKNKYKSASDVFEVTPDIDVSSQRDELQSSPPPPRPARRRGRPPPAVGLGPTGPSVPPTVLATGGVVRRMRWTHQMNENVMRAYFRATKGGTNLTAYRAQMLSMFQVLEPTVNVSSQRLSDQVRFIQRRKLLDDEALERLRTEACVALDVITPITQRAAETPSIPAADIELVDNLDNTVSPQDQQRLRRTLESAILEYKSIPASCRPRVPRLPTHRRNLALMGALDSIVSTYMESSRDLVDTHSILYCAAVAACRVANVKFPINNVTTTRDVATVPAWQRRIEDRINRARTLIGKLIAFRNGNNRQRVMRFVAQAFSGTNISPRDYGLWVTERIDYYKQKVYAWANRIRRYRKRWDRFQQNRTFQSDQKRVYRCWERSPQCVVDGRLPSVHDMRTYWTNIWSSSISHTEADWFGVVERACESIPIMEAISISPEDVLVAIRPTQNWKSPGPDGLHNFWLKWLPCSHARLAAQFQDALDGGSLPTFMTTGVTHLLYKSGSATDPKNYRPITCLPTTYKLFTSILRAKIANHFTSNNILFPGQTGCKSGSRGTKELLLIDMTICQQARQNRRNLSAAWIDYKKAFDSVPHTWLMRVLSLYKIDTNLCTFLGSCMGQWTTVLRYPGGMVSPDCDEPIRIKRGIFQGDSLSPLWFCMALNPLSTLLVDSGLGYRLRRGTEPISHLLYMDDLKLFASKQTELIELLKITEKFSNSINMEFCVDKCAIIHVKRGEVAVSDGVQISDAVRLRALSETETYKYLGMPEALGILSADVKQSVKERFFGRLAKVLNSLLSGGNKIRAFNGWVMPVLMYSFGILRWTQTELDALDRKVRTLLTAHRMHHPRSSVMRLYIPRRCGGRGILNAKDLHNREVCNLRDYFLHSDVDMHRVVVKIDKGLTPLSLANENWRKPLVMSTKDREEVWKSKELHGRFYRALHGPDVDRPASVSWLRFGNLFGETEGFVFAIMDEVIKTNNYRKYILKDGTVDICRACHRPGESIRHVISGCSYLANGEYLHRHNLVAKIIHQQIALRYGLVTLEMPYYQYVPQPVLENGHATLYWDRSIITDRTIVANKPDIVIIDRLARRAILVDVTIPHDVNLVKAEKDKLSKYLDLAHEVTDMWDVDSTVIVPIVVSAHGLMPKSFDQHLQRLSIGRWVKSQIQKAVLLDTARIVRRFLTLDP

SEQ ID NO: 27148 - protein, 868 aa, Hyles vespertilio
MRFVAQAFSGTNISPRDYGLWVTERIDYYKQKVYAWANRIRRYRKRWDRFQQNRTFQSDQKRVYRCWERSPQCVVDGRLPSVHDMRTYWTNIWSSSISHTEADWFGVVERACESIPIMEAISISPEDVLVAIRPTQNWKSPGPDGLHNFWLKWLPCSHARLAAQFQDALDGGSLPTFMTTGVTHLLYKSGSATDPKNYRPITCLPTTYKLFTSILRAKIANHFTSNNILFPGQTGCKSGSRGTKELLLIDMTICQQARQNRRNLSAAWIDYKKAFDSVPHTWLMRVLSLYKIDTNLCTFLGSCMGQWTTVLRYPGGMVSPDCDEPIRIKRGIFQGDSLSPLWFCMALNPLSTLLVDSGLGYRLRRGTEPISHLLYMDDLKLFASKQTELIELLKITEKFSNSINMEFCVDKCAIIHVKRGEVAVSDGVQISDAVRLRALSETETYKYLGMPEALGILSADVKQSVKERFFGRLAKVLNSLLSGGNKIRAFNGWVMPVLMYSFGILRWTQTELDALDRKVRTLLTAHRMHHPRSSVMRLYIPRRCGGRGILNAKDLHNREVCNLRDYFLHSDVDMHRVVVKIDKGLTPLSLANENWRKPLVMSTKDREEVWKSKELHGRFYRALHGPDVDRPASVSWLRFGNLFGETEGFVFAIMDEVIKTNNYRKYILKDGTVDICRACHRPGESIRHVISGCSYLANGEYLHRHNLVAKIIHQQIALRYGLVTLEMPYYQYVPQPVLENGHATLYWDRSIITDRTIVANKPDIVIIDRLARRAILVDVTIPHDVNLVKAEKDKLSKYLDLAHEVTDMWDVDSTVIVPIVVSAHGLMPKSFDQHLQRLSIGRWVKSQIQKAVLLDTARIVRRFLTLDP

SEQ ID NO: 27149 - protein, 1193 aa, Laothoe populi
MTTRNRVRCARLPSPSSSSSSASWASASEAPEPLPVTDASSQRDGLQSSPPTLTPARRRGRQHPPPVGLGPVGPCAPPMAPAAGGVVRRMRWTHSINENVMRAYFGATEGGTKLTAYRPKMLALFQDLEPTIDVSAQRLSDQVRYIQRRKLLDDAALDRLRANLCVVQDVAQRTVDRPSVPTDDVNIELVDDLDNNVSSHDIQCLRGALESAILEFKLVPACLRPRLPRLPTHKRNLALMGVLDSMLPEYMESSRDLVDTHAILYCAAIAACRVANVRFPNDYRAARDATHVPAWQRRIEERIDRTRTLISKLICFKAGNNRPKVMRFVTQAFLGSSIRPQDYRFCVTERIDLLKQKVYAWANRIRRYKKRWNRFQQNRAFQSDQKRVYRCWEHSQQGVGDGRLPDVRDMRTYWANIWSSPVSHTEGTWIGVVERACEAISPMETISISPDDVLRAVRPTQNWKSPGPDGLHNFWLKWFVTSHSRLAAQFQSALESGSLPTFMTTGVTHLLFKSGSTTDPKNYRPITCLPTIYKLFTSIIRFKIAYHIDNNNILISAQTGCKIGSRGTKELLLIDMAICQQVRHNRRNLSAAWIDYKKAYDSVPHTWLMRVLDLYKIHSNLRTLLGACMRQWTTVLKYPGGAGPLDCDEPIKIDRGIFQGDSLSPLWFCLALNPLSTLLLDSGLGYRLRRGSVPISHLLYMDDLKLFAPKKSDLIELLKITKSFSNSISMEFGVDKCAVIHVGRGAVRVSDDVYLSETERLRSLSEAETYKYLGMSEALGIMGADMKQSLKERFFCRLTKVLNSFLSGGNKIRAFNGWVMPVLVYSFGILKWTQTELDALDRRVRTLMTAHRMHHPRSSVMRLYIPRRCGGRGLLNAKDLHNREVRNLRDYFLHSDVDVHREVVKVDKGFTPLSLANENWRVPVVMSTGDRKGVWKSKELHGRFYRALNGPDVDQLASVSWLRFGDLFGETEGFVFAIMDEVVKTNNYRKYILKDGTVDICRACHRPGESIRHVISGCSYLANGEYLHRHNLVAKIIHQQLALRYHLVISEVPYYQYVPQPVLENGHTTLYWDRSIITDRTIVANKPDIVVIDRLARRAILVDVTIPHDDNLVKAEKDKMSKYLDLAHEVDDMWNVDSAIIVPIVVTANGLIPKSLDQHLQRLSIGRWVKSQIQKAVLLDTARIVRRFLTLGS

SEQ ID NO: 27150 - protein, 1056 aa, Deilephila porcellus
MNFNKLAYFRENNNNNNLFFTDLCVVQGVNVTPVSRGPVADSTSTPVADIELADNLDDNVSPQDEQCLRGALERAISEFVSLSASCRPRLPRLPTHRRNLALVGALDSMLPTYLESSRDLVDTHSILYCAAVAACRVANITFPNEYRATRGVATVPAWQRRIEDRINRARTLIGKLVSFREGNSRPRVMRFVTQAFSGTNTSPRDYRLCVTERIDFFKQKVYAWANRIRRYRKRWDRFQQNRMFQSDQKRVYRCWESSPQSVMDGRLPSAREMREYWANIWASPVSHTEAAWFSVVNQACEALPTMETISISPEDVLAVIRPTQNWKSPGPDGLHNFWLKWFPSSHARLAIQFQDALERGSLPTFMTTGVTHLLFKSGCTTDPKNYRPITCLPTIYKILTSIIRSKITCHITTNKILFSGQTGCKSGSRGTKELLLIDMTICQQVRHNRRNLSAAWIDYKKAYDSVPHTWLMRVLNLYKIDTKLCTFLEVCMGQWTTVLKYPGATSPSDCDEPIAIRRGIFQGDSLSPLWFCMALNPLSTLLLDSGLGYRLRRGTEPISHLLYMDDLKLFASKQSELIELLKITEIFSKSINMEFGVNKCAVIHVKRGEIAVSDDIQVSETVRLRSLSEMETYKYLGMPEALGIMGVDVKQSLKERFFSRLTKVLNSFLSGGNKIRAFNGWVMPALMYSFGILRWTQTELDALDRKVRTLLTAHRMHHPRSSVMRLYIPRRCGGRGMLNAKDLHNREVCNLRDYFLNSDVDMHGVVVMVDKGFTPLSLANENWRKPLVMGIKDREEIWKGKELHGRFYRALHGPDVDRLASVSWLRFGNLFGETEGFVFAIMDEVIKTNNYRKYILKDGTVDICRACHRPGESIRHVISGCSYLANGEYLHRHNLVAKIIHQQIALRYGLVTPEVPYYQYVPQPVLENGHATLYWDRSVITDRTIVANKPDIVIIDRLARRAILVDVTIPHDDNLVKAEKDKLTKYLDLAHEVTELWDVDSTIIVPIVVSAHGLIPKSLDQHLQRLSMGRWVMSQIQKAVLLDTARIVRRFLTLGS

SEQ ID NO: 27151 - protein, 1182 aa, Hyles vespertilio
MINNKARKKRNAHLTSPSSSSSASWASASDVFEVTSDNDASSQHGELQSSPPPPRPARRRGRPPPAVGLGPVGPSVPPTVPATGGVVRRMRWTREINENVMRAYFGATKGGINLTAYRAKMLSLFQALEPTVDVSSQRLSDQVRFIQRRKLLDDDTLERLRTDLCFVQDDHVSPVSGDQAAGPTPTPVADFELTDNLDDNVSPQAKQQLRGALECAILEFSSLSASCRPRLPRLPTHRRNLALMGALDSMLTTYLESSRDLVDTHSILYCAAVAACRVANIKFPNEYKATRGVVIVPAWQRRIEDRINRARTLIGKLISFKEGNSRTKIMRFVTQAFSGTNTSPRNYRLCVTERIDFFKQKVYAWANRIRRYRRRWDRFQQNRKFQTDQKSVYRCLENPPQGVVDGRLPSAHEMREYWTNIWSSPVSHTEASWFSVVDRACEAIPAMETILISPEDVLTAIRQTQNWKSPGPDGLHNFWLKWFPSSHARLAAQFQNALERGSLPTFMTTGVTHLLFKSGCTTEPKNYRPIICLPTIYKVLTSIIRSKITDHINSNQILFSGQTGCMNGSRGTKELLLINMTICQQARHNRRNLSAAWIDYKKAYDSVPHTWLMRVLNLYKMNTNLCNFLGSCMGQWTTVLRYPGGTVPPDCDEPIRIKRGIFQGDSLSPLWFCMALNPLSTLLLDSGLGYRLRRGSEPISHLLYMDDLKLFASKQTELIELLKITERFSNSINMDFGVDKCAVIHVKRGEVAVSDDILVSETVRLRSLSVTETYKYLGMPEALGIMGADVKRSLKERFFSRLTKVLNSFLSGGNKIHAFNGWVMPVLIYSFGILKWTQTELDALDRKVRTLLTAHRMHHPRSSVMRLYIPRRCGGRGILNAKDLHNREVCNLRDYFLHSDVDMHRVVVMVDKGFTPLSLAIENWRKPLVVGIKDREDIWKSKELHGRFYRALHGPDVDRLASVSWLRFGNLFGETEGFVFAIMDEVIKTNNYRKYILKDGTVDICRACHRPGESIRHVISGCSYLANGEYLHRHNLVAKIIHQQIALRYGLVTPEVPYYQYVPQPVLENGHATLYWDRSIITDRTILANKPDIVIIDRLARRAILVDVTIPHDDNLVKAEKDKMSKYLDLAHEVTDMWDVDSTIIVPIVVSAHGLIPKSLDHHLQRLYIKIYIYVFCFLLYI

SEQ ID NO: 27152 - protein, 954 aa, Hyles vespertilio
MGALDSMLPTYLESSRDLVDTHSILYCAAVAACRVANVQFPKEHRATRGVAAVPAWQLRIEDRINRARTLIGKLISFSEGNSRPRIMRFVTQAFSGTNISPQNYRLCVTERIDFYKQKVYAWANRIRRYRRRWDRFQQNRMFQSDQKRVYRCWEDSSQGVVDGRLPGAHEMREYWTNIWSSPVSHTEASWFSVVDRACESIPAMETILISSEDVQTAIRRTQNWKSPGPDGLHNFWLKWFPSSHARLAAQFQDALEAGSLPAFMTKGVTHLLFKSGCTTEPKNYRPITCLPTIYKILTSIIRSKITDHITSNQILFPGQTGCMNGSRGTKELLLINMTICQQARHNRRNLSAAWIDYKKAYDSVPHTWLMRVLNLYKINTNLCNFLGSCMGQWTTVLRYPGGTAPPDCDEPIRIKRGIFQGDSLSPLWFCMALNPLSTLLLDSGLGYRLRRGSEPISHLLYMDDLKLFASKQTELVELLKITERFSNSINMEFGVDKCAVIHVKRGEVAVSDDIQVSETVRLKPLSVTETYKYLGMPEALGIMGANVKQSLKERFFSRLTKVLNSFLSGGNKIRAFNGWVMPVLMYSFGILKWTQTELDALDRKVRTLLTAHRMHHPRSSVMRLYIPRRCGGRGILNAKDLHNREVCNLRDYFLHSDVDIHGVVVMVDKGFTPLSLAIENWRKPLVVGTKDREDIWKSKELHGRFYRALHGPDVDRLASVSWLRFGNLFGETEGFVFAIMDEVIKTNNYRKYILKDGTVDICRACHRPGESIRHVISGCSYLANGEYLHRHNLVAKIIHQQIALRYGLVTPEVPYYQYVPQPVLENGHATLYWDRSIITDRTILANKPDIVIIDRLARRAILVDVTIPHDDNLVKAEKDKMSKYLDLAHEVTDMWDVDSTIIVPIVVSAHGLIPKSLDQHLQRLSIGVWVRSQIQKAVLLDTACIVRRFLTLGS

SEQ ID NO: 27153 - protein, 1194 aa, Hyles vespertilio
MTTRASRRNAQMRSPSSSSSASWASASDVFEVTPDIDVSSQRDELQSSPPPPRPARRRGRPPPAVGLGPTGPSVPPTVLATGGVVRRMRWTHQMNENVMRAYFRATKGGTNLTAYRAQMLSMFQVLEPTVNVSSQRLSDQVRFIQRRKLLDDEALERLRTEACVALDVITPITQRAAETPSIPAADIELVDNLDNTVSPQDQQRLRRTLESAILEYKSIPASCRPRVPRLPTHRRNLALMGALDSIVSTYMESSRDLVDTHSILYCAAVAACRVANVKFPINNVTTTRDVATVPAWQRRIEDRINRARTLIGKLIAFRNGNNRQRVMRFVAQAFSGTNISPRDYGLWVTERIDCYKQKVYAWANRIHRYRKRWDRFQQNRTFQSDQKRVYRCWERSPQCVVDGRLPSVHDMRTYWTNIWSSSISHTEADWFGVVKRACESIPIMEAISISPEDVLVAIRPTQNWKSPGPDGLHNFWLKWLPCSHARLAAQFQDALDGGSLPTFMTTGVTHLLYKSGSATDPKNYRPITCLPTTYKLFTSILRAKIANHFTSNNILFPGQTGCKSGSRGTKELLLIDMTICQQARQNRRNLSAAWIDYKKAFDSVPHTWLMRVLSLYKIDTNLCTFLGSCMGQWTTVLRYPGGMVSPDCDEPIRIKRGIFQGDSLSPLWFCMALNPLSTLLVDSGLGYRLRRGTEPISHLLYMDDLKLFASKQTELIELLKITEKFSNSINMEFCVDKCAIIHVKRGEVAVSDGVQISDAVRLRALSETETYKYLGMPEALGILSADVKQSVKERFFGRLAKVLNSLLSGGNKIRAFNGWVMPVLMYSFGILRWTQTELDALDRKVRTLLTAHRMHHPRSSVMRLYIPRRCGGRGILNAKDLHNREVCNLRDYFLHSDVDMHRVVVKIDKGLTPLSLANENWRKPLVMSTKDREEVWKSKELHGRFYRALHGPDVDRPASVSWLRFGNLFGETEGFVFAIMDEVIKTNNYRKYILKDGTVDICRACHRPGESIRHVISGCSYLANGEYLHRHNLVAKIIHQQIALRYGLVTLEMPYYQYVPQPVLENGHATLYWDRSIITDRTIVANKPDIVIIDRLARRAILVDVTIPHDVNLVKAEKDKLSKYLDLAHEVTDMWDVDSTVIVPIVVSAHGLMPKSFDQHLQRLSIGRWVKSQIQKAVLLDTARIVRRFLTLDP

SEQ ID NO: 27154 - protein, 1197 aa, Hyles vespertilio
MFHNKARKKRNAHLTSPSSSSSASWASASDVFEVTPDNDASSQHGELQSSPPPPRPAQRRGRPPPAVGLGPVGPSVPPTVPATGGVVRRMRWTREINENVMRAYFGATNGGINLTAYRVKMLSLFQALEPTVDVSSQRLSDQVRFIQRRKLLDDDTLERLRTDLCFVQEDHVSPVSGDQAAGPTPTPVADFELTDNLDDNVSPQDKQQLRGALECAILEFASLSASCRPRLPRLPTHRRNLALMGALDSMLPTYLESSRDLVDTHSILYCAAVAACRVANVQFPKEYRATRGVVTVPAWQRRIEDRINRARTLIGKLISFKEGNSRPKIMRFVTQAFSGTNTSPRNYRLCVTERIDFFKQKVYAWANRIRRYRRRWDRFQQNRKFQTDQKRVYRCWENPPQGVVDGRLPSAHEMREYWTNIWSSPVSHTEASWFSVVDRACEAIPAMETILINPEDVLTAIRQTQNWKSPGPDGLHNFWLKWFPSSHARLAVQFQDALERGSLPAFMTTGVTHLLFKSGCTTEPKNYRPITCLPTIYKVLTSIIRSKITDHINSNQILFSGQTGCMNGSRGTKELLLINMTICQQARHNRRNLSAAWIDYKKAYDSVPHTWLMRVLNLYKINTNLSNFLGSCMGQWTTVLRYPGGTVPPDCDEPIRIKRGIFQGDSLSPLWFCMALNPLSTLLLDSGLGYRLRRGSEPISHLLYMDDLKLFASKQTELIELLKITDIFSKSINMDFGVDKCAVIHVKRGEVAVSDDILVSETVRLRSLSVTETYKYLGMPEALGIMGADVKRSLKERFFSRLTKVLNSFLSGGNKIRAFNGWVMPVLMYSFGILKWTQTELDALDRKVRTLLTAHRMHHPRSSVMRLYIPRRCGGRGILNAKDLHNREVCNLRDYFLHSDVDMHRVVVMVDKGFTPLYLAIENWRKPLVVGIKDREDIWKSKELHGRFYRALHGPDVDRLASVSWLRFGNLFGETEGFVFAIMDEVIKTNNYRKYILKDGTVDICRACHRPGESIRHVISSCSYLANGEYLHRHNLVAKIIHQQIALRYGLVTPEVPYYQYVPQPVLENGHATLYWDRSIITDRTIPANKPDIVIIDRLARRAILVDVTIPHDDNLVKAEKDKMSKYLDLAHEVADMWDVDSTIIVPIVVSAHGLIPKSLDQHLQRLSIGCWVRSQIQKAVLLDTARIVRRFLTLGS

SEQ ID NO: 27155 - protein, 1111 aa, Dendrolimus kikuchii
MRWTQELNECVMRAYFEATEGGTNLTSYRGRLLSLFQTLQPASTVTAQRLSDQVRAIQRLHLLDESTLDRLRNTVRINRESTDTPQPTSPAPPADSQWPVNSTMDDVSEGLAVGNVSIQTNEQLRRTLEHSIQEFRDQPILNRPRLPKLPLHRNNLVLMGTLDCLLAPYFRSSADLVDTHSILYCGAVAVCRVAGVKFPNTQPTRPASGKPAWQIRIERRIDRARVLIAKLICFRAGNCRPRVMRFMAQAFAGTNVSPSEYMARATERIDFWKQKVYAWANRIRRYKERADRYFLNRTFQSEEKRVYRGWEKCSDSVTDRQMPNIDAMASFWRNIWSMPVSHTEGDWIELVKQSCEQVPDMEPIIIEPLDVGNAIRSAHNWKSPGLDGLHNFWIKWFKSSHGCLANQFQEAVDRGLLPTFMTTGVTHLLFKSGCTTEPKNYRPITCLPTIYKLLTSILGKKISNYFYDNNILAITQNGCKAGSRGTKELLLIDTTVSQQARRNKRNLSVAWIDYKKAYDSVPHTWLMRVLELYKVDATLRTFLQACMRQWVTHLRLPGGGGASLPEGAINIERGIFQGDSLSPLWFCLALNPLSTLLESSKLGYRFRRGGEIMSHLLYMDDLKLFASNEPDLIELLKTTERFSKSINMEFGIEKCAVMHVRRGKVVNSPNLQLSENISLKSLSETETYKYLGMSESLGIADADVKQTVKDRFFCRLRKVLTSLLSGGNKVRAFNSWVMPVLAYSFGILRWTQTELDALDRRVRCLLTKYRMHHPRSSVMRLYISRRCGGRGFLNAKDLHNREVNNLRAYFLKMDVGLHKDVVAVDKGLTMLSLAKENWCNLAVLSASDRINVWKSKELHGRFYRALTGPDVDLSASVNWLRFGNLFGETEGFVFAIMDEVIKTNNYRKYILKDGTLDICRACHRPGESLRHIVSGCSHLSNGEYLHRHNLVARIIHQQLALRYGLVETEVPYYQYSPEPVLENSRATLYWDRSVITDRTIVANKPDIVIIDRSARRAILVDISIPHDDNLVKKEKEKLSKYLDLAHEVTAMWRLESTSIVPIVVTVNGLIAKSLDCHLERLSLGGWVKGQIQKAALLDTARIVRRFLSLEP

SEQ ID NO: 27156 - protein, 1193 aa, Laothoe populi
MTTRNRVRCARLPSPSSSSSSASWASASEAPEPLPVTDASSQRDGLQSSPPTLTPARRRGRQHPPPVGLGPVGPCAPPMAPAAGGVVRRMRWTHSINENVMRAYFGATEGGTKLTAYRPKMLALFQDLEPTIDVSAQRLSDQVRYIQRRKLLDDAALDRLRANLCVVQDVAQRTVDRPSVPTDDVNIELVDDLDNNVSSHDIQCLRGALESAILEFKLVPACLRPRLPRLPTHKRNLALMGVLDSMLPEYMESSRDLVDTHAILYCAAIAACRVANVRFPNDYRAARDATHVPAWQRRIEERIDRTRTLISKLICFKAGNNRPKVMRFVTQAFLGSSIRPQDYRFCVTERIDLLKQKVYAWANRIRRYKKRWNRFQQNRAFQSDQKRVYRCWEHSQQGVGDGRLPDVRDMRTYWANIWSSPVSHTEGAWIGVVERACEAISPMETISISPDDVLRAVRPTQNWKSPGPDGLHNFWLKWFVTSHSRLAAQFQSALESGSLPTFMTTGVTHLLFKSGSTTDPKNYRPITCLPTIYKLFTSIIRFKIAYHIDNNNILFSAQTGCKIGSRGTKELLLIDMAICQQVRHNRRNLSAAWIDYKKAYDSVPHTWLMRVLDLYKIHSNLRTLLGACMRQWTTVLKYPGGAGPLDCDEPIKIDRGIFQGDSLSPLWFCLALNPLSTLLLDSGLGYRLRRGSVPISHLLYMDDLKLFAPKKSDLIELLKITKSFSNSISMEFGVDKCAVIHVGRGAVRVSDDVYLSETERLRSLSESETYKYLGMSEALGIMGADMKQSLKERFFCRLTKVLNSFLSGGNKIRAFNGWVMPVHMYSFGILKWTQTELDALDRRVRTLMTAHRMHHPRSSVMRLYIPRRCEGRGLLNAKDLHNREVRNLRDYFLHSDVDVHREVVKVDKGFTPLSLANENWRVPVVMSTGDRKGVWKSKELHGRFYRALNGPDVDQLASVSWLRFGDLFGETEGFVFAIMDEVVKTNNYRKYILKDGTVDICRACHRPGESIRHVISGCSYLANGEYLHRHNLVAKIIHQQLALRYHLVISEVPYYQYVPQPVLENGHTTLYWDRSVITDRTIVANKPDIVVIDRLARRAILVDVTIPHDDNLVKAEKDKMSKYLDLAHEVVDMWNVDSAIIVPIVVTANGLIPKSLDQHLQRLSIGRWVKSQIQKAVLLDTARIVRRFLTLGS

SEQ ID NO: 27157 - protein, 1111 aa, Dendrolimus punctatus
MRWTQELNECVMRAYYEATEGGTNLTSYRGRLLSLFQTLQPASAVTAQRLSDQVRAIQRLHLLDESTLDRLRNAVRINRESTDTPQPTSPAMPADSQGTVNFTIDDVSDSIAVGNVSIQINEQLRRTLEHSIQEFRDQPILNRPRVPKLPLHRNNLLLMGALDCLLAPYFGSSANLVDTHSILYCGAVAVCRVAGVKFPNTQPTRPASGKPAWQIRIERRIDRARVLIAKLICFRAGNCRPRVVRFVAQAFTGTNVSPSEYMARATERIDFWKQKVYAWANRIRRYKERADRYFLNRTFQSEEKRVYRGWEKSRDSVADRQIPNIDAMASFWRSIWSMPVSHTEGDWIELVKQSCDQVPDMEPITIEPLDVGNAIRSAHNWKSPGPDGLHNFWIKWFKSSHSCLANQFQEAVDRGSLPTFMTTGVTHLLFKSGCTTEPKNYRPITCLPTIYKLLTSILGKKLSNYFYNNNILAITQNGCKAGSRGTKELLLIDTTVSQQARRNRRNLSVAWIDYKKAYDSVPHTWLMRVLELYKVDATLRTFLQACMRQWVTHLKLPGGRGPSLPEGAINIERGIFQGDSLSPLWFCLALNPLSTLLESSKLGYRFRRGGEIMSHLLYMDDLKLFASNEPDLIELLKTTERFSKSINMEFGIEKCAVMHVRRGKVLNSPNLQLSENMSLKSLSETETYKYLGMSESLGIADADVKQTVKDRFFCRLRKVLTSLLSGGNKVRAFNSWVMPVLAYSFGVLRWTQTELDALDRRVRCLLTKYRMHHPRSSVMRLYISRRCGGRGFLNAKDLHNREVNNLRTYFLKIDVGLHKDVVAVDKGLTTLSLANENWCNLAVLSASDRINVWKSKALHGRFYRALTGPDIDLSASVNWLRFGNLFGETEGFVFAIMDEVIKTNNYRKYILKDGTLDICRACHRPGESLRHIVSGCSHLSNGEYLHRHNLVARIIHQQLALRYGLVETEVPYYQYSPEPVLENSRATLYWDRSIITDRNIVANKPDIVIIDRSARRAILVDISIPHDDNLVKKEKEKLSKYLDLAHEVTAMWRLESTSIVPIVVTVNGLIAKSLDRHLERLSLGSWLKGQIQKAALLDTARIVRRFLSLEP

SEQ ID NO: 27158 - protein, 1197 aa, Hyles vespertilio
MIKRKARTTQNARIRSPSSSSSASWASASDVFEVTPDNDALSQRDELQSSPPPPRPARRRGRPPPAVGLGPVGPSVPPTVPATGGVVRRMRWTCEINENVMRAYFGATKGGINLTAYRAKMLSLFQALEPTIDVSSQRLSDQVRFIQRRKLLDDDTLERLRTDLCVVQDDNVSPVSGDQAVGPTPTPVADFELTDNLDDNVSPQDKQHLRRALVRAISDFVSVSASCRPRLLRLPTHRRNLALMGALDSMLPTYLESSRDLVDTHSILYCAAVAACRVANVQFPKEHRATRGVAAVPAWQLRIEDRINRARTLIGKLISFSEGNSRPRIMRFVTQAFSGTNISPQNYRLCVTERIDFYKQKVYAWANRIRRYRRRWDRFQQNRMFQSDQKRVYRCWEDSSQGVVDGRLPGADEMREYWTNIWSSPVSHTEASWFSVVDRACESIPAMETILISSEDVQTAIRRTQNWKSPGPDGLHNFWLKWFPSSHARLAAQFQDALEAGSLPAFMTKGVTHLLFKSGCTTEPKNYRPITCLPTIYKILTSIIRSKITDHITSNQILFSGQTGCMNGSRGTKELLLINMTICQQARHNRRNLSAAWIDYKKAYDSVPHTWLMRVLNLYKINTNLCNFLGSCMGQWTTVLRYPGGTAPPDCDEPIRIKRGIFQGDSLSPLWFCMALNPLSTLLLDSGLGYRLRRGSEPISHLLYMDDLKLFASKQTELVELLKITERFSNSINMEFGVDKCAVIHVKRGEVAVSDDIQVSETVRLRPLSVTETYKYLGMPEALGIMGANVKQSLKERFFSRLTKVLNSFLSGGNKIRAFNGWVMPVLMYSFGILKWTQTELDALDRKVRTLLTAHRMHHPRSSVMRLYIPRRCGGRGILNAKDLHNREVCNLRDYFLHSDVDMHGVVVMVDKGFTPLSLAIENWRKPLVVGTKDREDIWKSKELHGRFYRALHGPDVDRLASVSWLRFGNLFGETEGFVFAIMDEVIKTNNYRKYILKDGTVDICRACHRPGESIRHVISGCSYLANGEYLHRHNLVAKIIHQQIALRYGLVTPEVPYYQYVPQPVLENGHATLYWDRSIITDRTILANKPDIVIIDRLARRAILVDDTIPHDDNLVKAEKDKMSKYLDLAHEVTDMWDVDSTIIVPIVVSAHGLIPKSLDQHLQRLSIGVWVRSQIQKAVLLDTARIVRRFLTLGS

SEQ ID NO: 27159 - protein, 868 aa, Hyles vespertilio
MRFVTQAFSGTNTSPRNYRLCVTERIDFFKQKVYAWANRIRRYRRRWDRFQQNRKFQTDQKRVYRCWENPPQGVVDGRLPSAHEMREYWTNIWSSPVSHTEASWFSVVDRACEAIPAMETILINPEDVLTAIRQTQNWKSPGPDGLHNFWLKWFPSSHARLAVQFQDALERGSLPAFMTTGVTHLLFKSGCTTEPKNYRPITCLPTIYKVLTSIIRSKITDHINSNLILFSGQTGCMNGSRGTKELLLINMTICQQARHNRRNLSAAWIDYKKAYDSVPHTWLMRVLNLYKINTNLCNFLGSCMGQWTTVLRYPGGTVPPDCDEPIRIKRGIFQGDSLSPLWFCMALNPLSTLLLDSGLGYRLRRGSEPISHLLYMDDLKLFASKQTELIELLKITDIFSKSINMDFGVDKCAVIHVKRGEVAVSDDILVSETVRLRSLSVTETYKYLGMPEALGIMGADVKRSLKERFFSRLTKVLNSFLSGGNKIRAFNGWVMPVLMYSFGILKWTQTELDALDRKVRTLLTAHRMHHPRSSVMRLYIPRRCGGRGILNAKDLHNREVCNLRDYFLHSDVDMHRVVVMVDKGFTPLYLAIENWRKPLVVGIKDREDIWKSKELHGRFYRALHGPDVDRLASVSWLRFGNLFGETEGFVFAIMDEVIKTNNYRKYILKDGTVDICRACHRPGESIRHVISSCSYLANGEYLHRHNLVAKIIHQQIALRYGLVTPEVPYYQYVPQPVLENGHATLYWDRSIITDRTIPANKPDIVIIDRLARRAILVDVTIPHDDNLVKAEKDKMSKYLDLAHEVADMWDVDSTIIVPIVVSAHGLIPKSLDQHLQRLSIGCWVRSQIQKAVLLDTARIVRRFLTLGS

SEQ ID NO: 27160 - protein, 1098 aa, Hyles vespertilio
MRMSCGPTLGQQREELTSLRIALKCCLCFRLWNQRLMYRPNDCQVRFIQRRKLLDDDTLERLRTDLCFVQDDHVSPVSGDQAAGPTPTPVADFELTDNLDDNVSPQAKQQLRGALECAILEFASLSASCRPRLPRLPTHRRNLALMGALDSMLTTYLESSRDLVDTHSILYCAAVAACRVANIKFPNEYKATRGVIVPAWQRRIEDRINRARTLIGKLISFKEGNSRPKIMRFVTHAFSGTNTSPRNYRLCVTERIDLFKQKVYAWANRIHRYRRRWDRFQQNRKFQTDQKSVYRCWENPPQGVVDGRLPSAHEMREYWTNIWSSPVSHTEASWFSVVDRACEAIPAMETILISPEDVLTAIRQTQNWKSPGPDGLHNFWLKWFPSSHARLAAQFQNALERGSLPTFMTTGVTHLLFKSGCTTEPKNYRPITCLPTIYKVLTSIIRSKITDHINSNQILFSGQTGCMNGSRGTKELLLINMTICQQARHNRRNLSAAWIDYKKAYDSVPHTWLMRVLNLYKINTNLCNFLGSCMGQWTTVLRYPGGTVPPDCDEPIRIKRGIFQGDSLSPLWFCMALNPLSTLLLDSGLGYRLRRGSEPISHLLYMDDLKLFASKQTELIELLKITERFSNSINMDFGVDKCAVIHVKRGEVAVSDDILVSETVRLRSLSVTETYKYLGMPEALGIMGADVKRSLKERFFSRLTKVLNSFLSGGNKIRAFNGWVMPVLIYSFGILKWTRTELDALDRKVRTLLTAHRMHHPRSSVMRLYIPRRCGGRGILNAKDLHNREVCNLRDYFLHSDVDMHRVVVMVDKGFTPLSLAIENWRKPLVVGIKDREDIWKSKELHGRFYRALHGPDLDRLASVSWLRFGNLFGETEGFVFAIMDEVIKTNNYRKYILKDGTVDICRACHRLGESIRHVISGCSYLANGEYLHRHNLVAKIIHQQIALRYGLVTPEVPYYQYVPQPVLENGHATLYWDRSIITDRTILANKPDIVIIDRLARRAILVDVTIPHDDNVVKAEKDKMSKYLDLAHEVTDMWDVDSTIIVPIVVSAHGLIPKSLDQHLQRLSIGCWVRSQIQKAVLLDTARIVRRFLTLGS

SEQ ID NO: 27161 - protein, 1210 aa, Hyles vespertilio
MSKDFTKYDKTKTMINNKARKKRNAHLTSPSSSSSASWASASDVFEVTPDNDASSQHGELQSSPPPPRPARRRGRPPPAEGLGPVGPSVPPTVPATGGVVRRMRWTREINENVMRAYFGATKGGINFTAYRAKMLSLFQALEPTVDVSSQRLSDQVRFIQRRKLLDDDTLERLRTDLCFVQDDHVSPVSGDQAAGPTPTPVSDFELTDNLDDNVSPQVKQQLRGALERAILEFASLSASCKPRLPRLPTHRRNLALMGALDSMLTTYLESSRDLVDTHSILYCAAVAACRVANIKFPNEYKATRGVVIVPAWQRRIEDRINRTRTLIGKLISFKEGNSRPKIMRFVTQAFSGTNTSPQNYRLCVTERIDFFKQKVYAWANRIRRYRRRWDRFQQNRKFQTDQKSVYRCWENPPQGVVDGRLPSAHEMREYWTNIWSLPVSHTEASWFSVVDRACEAIRAMETILISPEDVLTAIRQTQNWKSPGPDGLHNFWLKWFPSSHARLAAQFQDALERGSLPTFMTTGVTHLLFKSGCTTEPKNYRPITCLPTIYKVLTSIIRSKITDHINSNQILFSSQTGCMNGSRGTKELLLINMTICQQARQNRRNLSAAWIDYKKAYDSVPHTWLMRVLNLYKINTNLCNFLGSCMGQWTTVLRYPGGTVPPDCDEPIRIKRGIFQGDSLSPLWFCMALNPLSTLLLDSGLGYRLRRGSEPISDLLYMDDLKLFVSKQTELIELLKITERFSNSINMDFGVDKCAVIHVKRGEVAVSDDILVSETVRLRSLSVTETYKYLGMPEALGIMSADVKRSLKERFFSRLTKVLNSFLSGGNKIRAFNGWVMPVLIYSFGILKWTQAELDALDRKVRTLLTAHRMHHPRSSVMRLYIPRRCGGRGFLNVKDLHNREVCNLRDYFLHSDVDMHRVVVMVDKGFTPLSLAIENWRKPLVVGIKDREDIWKSKELHGRFYRALHGPDVDRLASVSWLRFGNLFGETEGFVFAIMDEVIKTNNYRKYILKDGTVDICRACHRPGESIRHVISGCSYLANGEYLHRHNLVAKIIHQQIALRYGLVTPEVPYYQYVPQPVLENGHATLYWDRSIITDRTILANKPDIVIIDQLARRAILVDVTIPHDDNLVKAEKDKMSKYLDLAHEVTDMWDVDSTIIVPIVVSAHGLIPKNLDQHLQRLSIGYWVRSQIQKAVLLDTARIVRRFLTLGS

SEQ ID NO: 27162 - protein, 1119 aa, Dendrolimus kikuchii
MRWSQQMNESVMRAYFEATNIGTNLTAYRDRMLSLFQVLHPDTTVTAQRLSDQVRAIQRLHLLDESVLDRLRTEVRISLRITETSQSPVPQNNNIITNTMIDVTSTAAVPPETDLGISTADYVSSQDNEHMRRSLEAAIKDFKDMPTLSRPRLPRLPIHKRSLAIMGHMNSLLASHLIQSKDLTETHSILYCGAVAVCRTVGVNFSDNPHPIRHTCQKPAWQYRIERRINTARTLIAKLLCFRSGNTRPKIMRFVTQAFAGTNIGPNDYKGRVMERIDLLKQKIYAWANRIRRYKKRTERFYLNRRFQRDQKGVYRGWEQPEEQVIDRQLPNADAISAFWRGIWSVPVNHTEGDWMGAVEQRCGLIPEMDSITIEPYDVGYAIRSAHNWKSPGPDGLHNFWIKWFKVSHPCLATQFQDALNSGNVPTFMTTGVTHLLYKSGSTTEPKNYRPITCLPTIYKLLTSILRSKLMKHLVDNTLLAKTQNGCRPGSRGTKELLLIDMTINHQVRRNKKNLCTAWVDYKKAYDSVPHTWLMRVLELYKIDVTLRTFLGACMGQWVTRLCMPGGGSLPISDGLIKIERGIFQGDSLSPLWFCLALNPLSFLLEDSRLGFHLRRGGEAISHLLYMDDLKLFTSKKHDLLELLNLTETFSSSIGMEFGVDKCAVMYVQRGRVVNSNGLQLSEGVCFKTLSEDETYKYLGISQSLGIVDEDVKQLIKERFFSRLRKVLNCLLSGGNKIRAFNSWVMPSLTYSFGILRWTQTELDALDRRVRCMLTTYRMHHPRSSVMRLYIPRKCGGRGLLNAKDLHNREVYNLREYFLKTIQSIHRDMLSVDKGFTPLSLAKQNWLRPPVLSTSERMDVWKSKELHGRFHRALYGPDIDLPASVNWLRFGDLFGETEGFVCAIMDEVIKTNNYRKYILKDGTLDVCRACHRPGESIRHIISCCSRLANSEYLHRHNLVARIIHQQLALRYGLIATEVPYYKYTPEPVLENGHITLYWDRSIITDRTIVANKPDIAIIDRSARRTLLVDISIPHDCNLVNAETDKLTKYLDLAHEITDMWHMESTIIVPIVVSVNGLVAKSLDRHLERLSLGKWVKGQMQKAVLLSTARIVRKFLSLEP

SEQ ID NO: 27163 - protein, 1193 aa, Deilephila porcellus
MTKRTRSKHARPTSTSSSSSASWASASDVFEVTPDIDASSQRDELQSSPPPPRPARRRGRPPPVVGLGPVGPSVPPTVPATGGVVRRMRWTQQINENVMRAYFGATKGGTHLTAFRAQMLSVFQVLEPTINVSSQRLSDQVRFIQRRKLLDDEVLERLRTEACVVLDVVTPTTQRAADSPPSPAADIEVVDNLDNTVSPHEEQRLRRTLESAILEYKSIPASCRPRVPRLPTHRRNLALMGALDSMLATYMESSRDLVDTHSILYCAAVAACRVANVKFPNNFTTTRDVTTVPAWQRRIEDRINWARTLIGKLTAFQNGNNRPRVMRFVTQAFSGTNISSRDYRLWVTERIDYYKQKIYAWANRIRRYRRRWDRFQQNRAFQRDEKRVYRCWERSPQSVVDGRLPSVHDMRSYWENIWSSSVSHTEADWFGVVERACECIPTMGAISISPEDVLFAIRPAQNWKSPGPDGLHNFWLKWFPSSHVRLAAQFQDALDGGSLPTFMTTGVTHLLYKSGSTTDPKNYRPITCLPTIYKLFTSILRAKISDHFTLNNILFSGQTGCKNGSRGTKELLLIDMTICQQARHNRRNLSAAWIDYKKAFDSMPHTWLRRVLNLYKIDTNLCTFLGSCMGQWTTVLRYPGGTVPPDCDEPIRIKRGIFQGDSLSPLWFCMALNPLSTLLLHSGLGYRLRRGSEPISHLLYMDDLKLFASKQSELIELLKITEKFSNSINMEFGVDKCAVIHVKRGKVTVSDDIQVSETVRLRSLSETETYKYLGMSESLGILSADVKQSLKERFFSRLTKVLNSFLSGGNKIRAFNGWVMPVLMYSFGILRWTQTELDALDRKVRTLLTAHRMHHPRSSVMRLYIPRRCGGRGILNAKVLHNREVCNLRDYFLHSDVGMHRAVVSVDKGLTPLSLANENWRKPLVMSVRDREEIWKSKELHGRFYRALHGPDVDRPASVSWLRFGNLFGETEGFIFAIMDEVIKTNNYRKYILKDGTVDICRACHRPGESIRHVISGCSYLANGEYLHRHNLVAKIIHQQIALRYKLVTPEVPYYQYVPQPVLENGHATLYWDRSVITDRTIVANKPDIVIIDRCARRAILVDVTVPHDDNLVKAEKDKLSKYSDLAHEVTDMWDVDSTIIVPIVVSAHGLIAKSLDQHLQRLSIGRWVKSQIQKAVLLDTARIVRRFLTLDP

SEQ ID NO: 27164 - protein, 1193 aa, Deilephila porcellus
MRKKARSKHARRTSSSSSSSASWASASDVFEVTPNIDASSQRDELQSSPPPPRPARRRGRPPPVVGLGPVGPSVPPTVPATGGVVRRMRWTQQINENVMRAYFGATKGGTHLTAFRAQMLSVFQVLEPTINVSSQRLSDQVRFIQRRKLLDDEVLERLRTEACVVLDVVTPTTQRAADSPPSPAADIEVVDNLDNTVSPHEEQRLRRTLESAILEYKSIPASCRPRVPRLPTHKRNLALMGALDSMLATYMESSRDLVDTHSILYCAAVAACRVANVKFPNNFTTTRDVTTVPAWQRRIEDRINWARTLIGKLTAFQNGNNRPRVMRFVTQAFSGTNISSRDYRLWVTERIDYYKQKIYAWANRIRRYRKRWDRFQQNRAFQSDEKRVYRCWERSPQSVVDGRLPSVHDMRSYWENIWSSSVSHAEADWYGVVERACECIPTMGAISISPEDVLIAIRPAQNWKSPGPDGLHNFWLKWFPSSHVRLAAQFQDALDGGSLPTFMTTGVTHLLYKSGSTTDPKNYRPITCLPTIYKLLTSILRAKISDHFTLNNILFSGQTGCKSGSRGTKELLLIDMTICQQARHNRRNLSAAWIDYKKAFDSVPHTWLRRVLSLYKIDTNLCTFLGSCMGQWTTVLRYPGGTVPPDCDEQIRTKRGIFQGDSLSPLWFCMALNPLSTLLLHSGLGYRLRRGSEPISHLLYMDYLKLFASKQSELIELLKITEKFSNSINMEFGVDKCAVIHVKRGKVTVSDDIQVSETVRLRSLSETETYKYLGMSESLGILSADVKQSLKERFFSRLTKVLNSFLSGGNKIRAFNGWVMPVLMYSFGILRWTQTELDALDRKVRTLLTAHRMHHPRSSVMRLYIPRRCGGRGILNAKVLHNREVCNLRDYFLHSDVGMHRAVVLVDKGLTPLSLANENWRKPLVMSVRDREEIWKSKELHGRFYRALHGPDVDRPASVSWLRFGNLFGETEGFIFAIMDEVIKTNNYRKYILKDGTVDICRACHRPGESIRHVISGCSYLANGEYLHRHNLVAKIIHEQIALRYKLVTPEVPYYQYVPQPVLENGHATLYWDRSVITDRTIVANKPDIVIIDRCARRAILVDVTVPHDDNLVKAEKDKLSKYSDLAHEVTDMWDVDSTIIVPIVVSAHGLIAKSLDQHLQKLSIGRWVKSQIQKAVLLDTARIVRRFLTLDP

SEQ ID NO: 27165 - protein, 1132 aa, Deilephila porcellus
MARVPLMARDTIFWARRRIRYFKTIERETRKELELIETERSTSNLSKNANNKILASLNKFQAFEPTVVVSSQRLSDQVRFIQRRKLLDDEALERLRTDLCVVQGVNVTPVSRGPVADSTSTPVADIELADNLDDNVSPQDEQCLRGALERAISEFVSLSASCRPRLPRLPTHRRNLALVGALDSMLPTYLESSRDLVDTHSILYCAAVAACRVANITFPNEYRATRGVATVPAWQRRIEDRINRARTLIGKLVSFREGNSRPRVMRFVTQAFSGTNTSPRDYRLCVTERIDFFKQKVYAWAKRIRRYRKRWDRFQQNRMFQSDQKRVYRCWESSPQSVMDGRLPSAREMREYWANIWASPVSHTEAAWFSVVNQACEALPTMETISISPEDVLAAIRPTQNWKSPGPDGLHNFWLKWFPSSHARLAIQFQDALERGSLPTFMTTGVTHLLFKSGCTTDPKNYRPITCLPTIYKILTSIIRSKITCHITTNKILFSGQTGCKSGSRGTKELLLIDMTICQQVRHNRRNLSAAWIDYKKAYDSVPHTWLMRVLNLYKIDTKLCTFLEVCMGQWTTVLKYPGATSPSDCDEPIAIRRGIFQGDSLSPLWFCMALNPLSTLLLDSGLGYRLRRGTEPISHLLYMDDLKLFASKQSELIELLKITEIFSKSINMEFGVNKCAVIHVKRGEVAVSDDIQVSETVRLRSLSEMETYKYLGMPEALGIMGVDVKQSLKERFFSRLTKVLNSFLSGGNKIRAFNGWVMPALMYSFGILRWTQTELDALDRKVRTLLTAHRMHHPRSSVMRLYIPRRCGGRGMLNAKDLHNREVCNLRDYFLNSDVDMHGVVVMVDKGFTPLSLANENWRKPLVMGIKDREEIWKGKELHGRFYRALHGPDVDRLASVSWLRFGNLFGETEGFVFAIMDEVIKTNNYRKYILKDGTVDICRACHRPGESIRHVISGCSYLANGEYLHRHNLVAKIIHQQIALRYGLVTPEVPYYQYVPQPVLENGHATLYWDRSVITDRTIVANKPDIVIKDRLARRAILVDVTIPHDDNLVKAEKDKLTKYLDLAHEVTELWDVDSTIIVPIVVSAHGLIPKSLDQHLQRLSMGRWVMSQIQKAVLLDTARIVRRFLTLGS

SEQ ID NO: 27166 - protein, 1194 aa, Hyles vespertilio
MTTRASRRNAQMRSPSSSSSASWASASDVFKVTPDIDVSSQRDELQSSPPPPRPARRRGRPPPAVGLGPTGPSVPPTVLATGGVVRRMRWTHQMNENVMRAYFRATKGGTNLTAYRAQMLSMFQVLEPTVNVSSQRLSDQVRFIQRRKLLDDEALERLRTEACVALDVITPITQRAAETPSIPAADIELVDNLDNTVSPQDQQRLRRTLESAILEYKSIPASCRPRVPRLPTHRRNLALMGALDSIVSTYMESSRDLVDTHSILYCAAVAACRVANVKFPINNVTTTRDVATVPAWQRRIEDRINRARTLIGKLIAFRNGNNRQRVMRFVAQAFSGTNISPRDYGLWVTERIDYYKQKVYAWANRIRRYRKRWDRFQQNRTFQSDQKRVYRCWERSPQCVVDGRLPSVHDMRTYWTNIWSSSISHTEADWFGVVERACESIPIMEAISISPEDVLVAIRPTQNWKSPGPDGLHNFWLKWLPCSHARLAAQFQDALDGGSLPTFMTTGVTHLLYKSGSATDPKNYRPITCLPTTYKLFTSILRAKIANHFTSNNILFPGQTGCKSGSRGTKELLLIDMTICQQARQNRRNLSAAWIDYKKAFDSVPHTWLMRVLSLYKIDTNLCTFLGSCMGQWTTVLRYPGGMVSPDCDEPIRIKRGIFQGDSLSPLWFCMALNPLSTLLVDSGLGYRLRRGTEPISHLLYMDDLKLFASKQTELIELLKITEKFSNSINMEFCVDKCAIIHVKRGEVAVSDGVQISDAVRLRALSETETYKYLGIPEALGILSADVKQSVKERFFGRLAKVLNSLLSGGNKIRAFNGWVMPVLMYSFGILRWTQTELDALDRKVRTLLTAHRMHHPRSSVMRLYIPRRCGGRGILNAKDLHNREVCNLRDYFLHSDVDMHRVVVKIDKGLTPLSLANENWRKPLVMSTKDREEVWKSKELHGRFYRALHGPDVDRPASVSWLRFGNLFGETEGFVFAIMDEVIKTNNYRKYILKDGTVDICRACHRPGESIRHVISGCSYLANGEYLHRHNLVAKIIHQQIALRYGLVTLEMPYYQYVPQPVLENGHATLYWDRSIITDRTIVANKPDIVIIDRLARRAILVDVTIPHDVNLVKAEKDKLSKYLDLAHEVTDMWDVDSTVIVPIVVSAHGLMPKSFDQHLQRLSIGRWVKSQIQKAVLLDTARIVRRFLTLDP

SEQ ID NO: 27167 - protein, 865 aa, Hyles vespertilio
MRFVTHAFSGTNTSPRNYRLCVTERIDFFKQKVYAWANRIRRYRRRWDRFQQNRKFQTDQKSVYRCWENPPQGVVDGRLPSAHEMREYWTNIWSSPVSHTEASWFSVVDRACEAIPAMETILISPEDVLTAIRQTQNWKSPGPDGLHNFWLKWFPSSHARLAAQFQNALERGSLPTFMTTGVTHLLFKSGCTTEPKNYRPITCLPTIYKVLTSIIRSKITDHINSNQILFSGQTGCMNGSRGTKELLLINMTICQQARHNRRNLSAAWIDYKKAYDSVPHTWLMRVLNLYKINTNLCNFLGSCMGQWTTVLRYPGGTVPPDCDEPIRIKRGIFQGDSLSPLWFCMALNPLSTLLLDSGLGYRLRRGSEPISHLLYMDDLKLFASKQTELIELLKITERFSNSINMDFGVDKCAVIHVKRGEVAVSDDILVSETVRLRSLSVTETYKYLGMPEALGIMGADVKRSLKERFFSRLTKVLNSFLSGGNKIRAFNGWVMPVLIYSFGILKWTQTELDALDRKVRTLLTAHRMHHPRSSVMRLYIPRRCGGRGILNAKDLHNREVCNLRDYFLHSDVDMHRVVVMVDKGFTPLSLAIENWRKPLVVGIKDREDIWNSKELHGRFYRALHGPDVDRLASVSWLRFGNLFGETEGFVFAIMDEVIKTNNYRKYILKDDICRACHRPGESIRHVISGCSYLANGEYLHRHNLVAKIIHQQIALRYGLVTPEVPYYQYVPQPVLENGHATLYWDRSIITDRTILANKPDIVIIDRLARRAILVDVTIPHDDNLVKAEKDKMSKYLDLAHEVTDMWDVDSTIIVPIVVSAHGLIPKSLDQHLQRLSIGCWVRSQIQKAVLLDTARIVRRFLTLGS

SEQ ID NO: 27168 - protein, 1194 aa, Hyles vespertilio
MTTRASRRNAQMRSPSSSSSASWASASDVFEVTPDIDVSSQRDELQSSPPPPRPARRRGRPPPAVGLGPTGPSVPPTVLATGGVVRRMRWTHQMNENVMRAYFRATKGGTNLTAYRAQMLSMFQVLEPTVNVSSQRLSDQVRFIQRRKLLDDEALERLRTEACVALDVITPITQRAAETPSIPAADIELVDNLDNTVSPQDQQRLRRTLESAILEYKSIPASCRPRVPRLPTHRRNLALMGALDSIVSTYMESSRDLVDTHSILYCAAVAACRVANVKFPINNVTTTRDVATVPAWQRRIEDRINRARTLIGKLIAFRNGNNRQRVMRFVAQAFSGTNISPRDYGLWVTERIDYYKQKVYAWANRIRRYRKRWDRFQQNRTFQSDQKRVYRCWERSPQCVVDGRLPSVHDMRTYWTNIWSSSISHTEADWFGVVERACESIPIMEAISISPEDVLVAIRPTQNWKSPGPDGLHNFWLKWLPCSHARLAAQFQDALDGGSLPTFMTTGVTHLLYKSGSATDPKNYRPITCLPTTYKLFTSILRAKIANHFTSNNILFPGQTGCKSGSRGTKELLLIDMTICQQARQNRRNLSAAWIDYKKAFDSVPHTWLMRVLSLYKIDTNLCTFLGSCMGQWTTVLRYPGGMVSPDCDEPIRIKRGIFQGDSLSPLWFCMALNPLSTLLVDSGLGYRLRRGTEPISHLLYMDDLKLFASKQTELIELLKITEKFSNSINMEFCVDKCAIIHVKRGEVAVSDGVQISDAVRLRALSETETYKYLGMPEALGILSADVKQSVKERFFGRLAKVLNSLLSGGNKIRAFNGWVMPVLMYSFGILRWTQTELDALDRKVRTLLTAHRMHHPRSSVMRLYIPRRCGGRGILNAKDLHNREVCNLRDYFLHSYVDMHRVVVKIDKGLTPLSLANENWRKPLVMSTKDREEVWKSKELHGRFYRALHGPDVDRPASVSWLRFGNLFGETEGFVFAIMDEVIKTNNYRKYILKDGTVDICRACHRPGESIRHVISGCSYLANGEYLHRHNLVAKIIHQQIALRYGLVTLEMPYYQYVPQPVLENGHATLYWDRSIITDRTIVANKPDIVIIDRLARRAILVDVTIPHDVNLVKAEKDKLSKYLDLAHEVTDMWDVDSTVIVPIVVSAHGLMPKSFDQHLQRLSIGRWVKSQIQKAVLLDTARIVRRFLTLDP

SEQ ID NO: 27169 - protein, 955 aa, Hyles vespertilio
MGALDSIVSTYMESSRDLVDTHSILYCAAVAACRVANVKFAINNVTTTRDVATVPAWQRRIEDRINRARTLIGKLIAFRNGNNRQRVMRFVAQAFSGTNISPRDYGLWVTERIDYYKQKVYAWANRIRRYRKRWDRFQQNRTFQSDQKRVYRCWERSPQCVVDGRLPSVHDMRTYWTNIWSSSISHTEADWFGVVERACESIPIMEAISISPEDVLVAIRPTQNWKSPGPDGLYNFWLKWLPCSHARLAAQFQDALDGGSLPTFMTTGVTHLLYKSGSATDPKNYRPITCLPTTYKLFTSILRAKIANHFTSNNILFPGQTGCKSGSRGTKELLLIDMTICQQARQNRRNLSAAWIDYKKAFDSVPHTWLMRVLSLYKIDTNLCTFLGSCMGQWTTVLRYPGGMVSPDCDEPIRIKRGIFQGDSLSPLWFCMALNPLSTLLVDSGLGYRLRRGTEPISHLLYMDDLKLFASKQTELIELLKITEKFSNSINMKFCVDKCAIIHVKRGEVAVSDGVQISDAIRLRALSETETYKYLGMPEALGILSADVKQSVKERFFGRLAKVLNSLLSGGNKIRAFNGWVMPVLMYSFGILRWTQTELDALDRKVRTLLTAHRMHHPRSSVMRLYIPRRCGGRGILNAKDLHNREVCNLRDYFLHSDVDMHRVVVKIDKGLTPLSLANENWRKPLVMSTKDREEVWKSKELHGRFYRALHGPDVDRPASVSWLRFGNLFGETEGFVFAIMDEVIKTNNYRKYILKDGTVDICRACHRPGESIRHVISGCSYLANGEYLHRHNLVAKIIHQQIALRYGLVTLEMPYYQYVPQPVLENGHATLYWDRSIITDRTIVANKPDIVIIDRLARRAILVDVTIPHDVNLVKAEKDKLSKYLDLAHEVTDMWDVDSTVIVPIVVSAHGLMPKSFDQHLQRLSIGRWVKSQIQKAVLLDTARIVRRFLTLDP

SEQ ID NO: 27170 - protein, 1197 aa, Hyles vespertilio
MINNKARKKRNARLTSPSSSSSASWASASDVFEVTSDNDASSQHGELQSSPPPPRPARRRGRPPPAVGLGPVGPSVPPTVPATGGVVRRMRWTREINENVMRAYFGATKGGINLTAYRAKMLSLFQALEPTVDVSSQRLSDQVRFIQRRKLLDDDTLERLRTDLCFVQDDHVSPVSGDQAAGPTPTPVADFELTDNLDDNVSPQAKQQLRGALECAILEFASLSASCRPRLPRLPTHRRNLALMGALDSMVTTYLESSRDLVDTHSILYCAAVAACRVANIKFPNEYKATRGVVIVPAWQRRIEDRINRARTLIGKLISFKEGNSRPKIMRFVTHAFSGTNTSPRNYRLCVTERIDFFKQKVYAWANRIRRYRRRWDRFQQNRKFQTDQKSVYRCWENPPQGVVDGRLPSAHEMREYWTNIWSSPVSHTEAPWFSVVDRACEAIPAMETILISPEDVLTAIRQTQNWKSPGPDGLHNFWLKWFPSSHARLAAQFQNALERGSLPTFMTTGVTHLLFKSGCTTEPKNYRPITCLPTIYKVLTSIIRSKITDHINSNQILFSGQTGCMNGSRGTKELLLINMTICQQARHNRRNLSAAWIDYKKAYDSVPHTWLMRVLNLYKINTNLCNFLGSCMGQWTTVLRYPGGTVPPDCDEPIRIKRGIFQGDSLSPLWFCMALNPLSTLLLDSGLGYRLRRGSEPISHLLYMDDLKLFASKQTELIELLKITDRFSKSINMDFGVDKCAVIHVKRGEVAVSDDILVSETVRLRSLSVTETYKYLGMPEALGIMGADVKRSLKERFFSRLTKVLNSFLSGGNKIRAFNGWVMPVLIYSFGILKWTQTELDALDRKVRTLLTAHRMHHPRSSVMRLYIPRRCGGRGILNAKDLHNREVCNLRDYFLHSDVDMHRVVVMVDKGFTPLSLAIENWRKPLVVGIKDREDIWKSKELHGRFYRALHGPDVDRLASVSWLRFGNLFGETEGFVFAIMDEVIKTNNYRKYILKDGTVDICRACHRPGESIRHVISGCSYLANGEYLHRHNLVAKIIHQQIALRYGLVTPEVPYYQYVPQPVLENGHATLYWDRSIITDRTILANKPDIVIIDRLARRAILVDVTIPHDDNLVKAEKDKMSKYLDLAHEVTDMWDVDSTIIVPIVVSAHGLIPKSLDQHLQRLSIGCWVRSQIQKAVLLDTARIVRRFLTLGS

SEQ ID NO: 27171 - protein, 1008 aa, Dendrolimus kikuchii
MDDVSDGLVVGDVSIQINEQLRRTLEHSIQEFRDQPILNRPRVPKLPMHRNNLLLMGTLDCLLAPYFRSSTDLADTHSILYCGAVAVCRVAGVKFPNTQPTRPASGKPAWQIRIERRIDRARVLIAKLICFRAGNCRPRVMRFVAQAFAGTNISPSEHMARATERIDFWKQKVYAWANRIRRYKERADRYFLNRTFQSEEKRVYRGWEKSSDSVADRQIPNTDAMASFWRSIWSVPVSHTEGDWIEVIKQSCEQVPDMEPITIEPLDVGNAIRSAHNWKSPGPDGLHNFWIKWFKSSHGCLANQFQEAVDRGSLPTFMTTGVTHLLFKSGCTTEPKNYRPITCLPTIYKLLTSILEKKLSNYFYNNNILAITQNGCKAGSRGTKELLLIDTTVSQQARRNRRNLSVAWIDYKKAYDSVPHTWLMRVLELYKVDATLRTFLQACMRQWVTYLRVPGGGGVPLPEGEINIERGIFQGDSLSPLWFCLALNPLSTLLESSKLGYRFRRGGEIVSHLLYMDDLKLFASNEPDLIELLKTTERFSKSINMEFGIEKCAVMHVRRGKVVNSPNLQLSENMSLKSLSETETYKYLGMSESLGIADADVKQTVKDRFFCRLRKVLTSLLSGGNKVRAFNSWVMPVLAYSFGILRWTQTELDALDRRVRCLLTKHRMHHPRSSVMRLYISRRCGGRGFLNAKDLHNREVNNLRAYFLKMNVGLHKDVVAVDKGLTTLALAKENWCNLAVLSTSDRINVWKSKELHGRFYRALTGPDVDLSASVNWLRFGNLFGETEGFVFAIMDEVIKTNNYRKYILKDGTLDICRACHRPGESLRHIVSGCSHLSNGEYLHRHNLVARIIHQQLALRYGLVETEVPYYQYSPEPVLENSRATLYWDRSVITDRTIVANKPDIVIIDRSARRAILVDISIPHDDNLVKKEKEKLSKYLDLAHEVTAMWRLESTSIVPIVVTVNGLIAKSLDRHLERLSLGSWVKGQIQKAALLDTARIVRRFLSLEP

SEQ ID NO: 27172 - protein, 1196 aa, Eilema sororculum
MLTRAKTKIIIQDAHLTPTDSSCSSASQAPGTTSPRPTPVEASSSDEYFSPPTSPTPVRRPGRGRPPTCLGPRRPPASNRAPAAGGNVHRMRWTNSINENVMRAYFAATEGGTNLSAYRSRMLPLFQALEPSVNTSAQRLSDQVRVIQRNHMLNETVLETLRQECLRNICVTPALAPAPASTTALNEDSHVTRDDTPIPVSIQYNEEIKEALEYALREYRSMPIHVRPRLPRLPIHRRNIALVSALDSLLPKYLENSENLGDTHSILYCTAVAACRMAGAKFPIKDPAIRPKPAIPAWQCRIERRVAEARVLIGKLICFRSGNTRPRVMRYVTRAFAGTNISPQDYTSRVTERIDFLKQKVCAWANRIRRYKKRVDRYTVNRMFQRDQRWVYRSWERTDESVDDLRRPDAEATNAFWRSIWSVPVSHTEGDWMREVERACETIPEMEEIYIDATDVDCAVRSLSNWKSPGPDGLHNFWLKWLRSSHVVLASQFQSAIESGTLPAFMTTGVTHLLHKTGSTLEPNNYRPITCLPTVYKLLTSILRAKINNHINNNSIMCTSQNGCRNGARGTKELLLIDMTISQQARRNRKDLVACWIDYKKAFDSVPHTWLLRVLELYKVNTTLCTFLRSCMGQWRTVLLYPGCRQALGSGEPITIERGIFQGDSLSPLWFCLALNPLSTLLVNSGLGYRLRREGQMVSHLFYMDDLKLFAHTNPQLIALLKVTETFSNSIKMAFGVDKCAVIHVKRGRVVESEGIQLSDSTNLRSLLVTETYKYLGMSQALCINEVGMKQMLQERFFGRLKKVLNSLLSGGNKVRACNSWVMPLLMYSFGILKWTQTELDTIDRKVRTQLTAFRMHHPRSSVMRLYIPRKCGGRGFLNAKTLHNREVCNLRDYFLKSNVDMHRDVVNVDTGLTPLGLAKENWRRPTIVGTDSRREVWQSKELHGRFYRALHRPEVYLLASVSWLRFGDLFGETEGFVCAIADEVIKTNNYRKYIMRDGTIDICRACHQPGESLRHITSGCSRLANGEYLHRHNQVARIIHQRLALKYNLVEVEVPYYRYVPEPVLENSHITLYWDRSIITDRTVVANKPDIVVIDRSERRALIIDVTIPRDENLVKAEKDKQVKYLDLAHEVVDMWNVDSAIIVPIVVSVNGLIAKSLDQHLKRLGLDGWVKGQMQKAVLLDTARIVRKFLSLAP

SEQ ID NO: 27173 - protein, 1020 aa, Dendrolimus punctatus
MIELTSTAAVTPEADLGNPTADYVSSQDNEHMRRNLETAINDFKDMPTLSRPRLPRLPIHRRSLAIMGHMNSLLASHLMQSKDLIETHSILYCGAVAVCRTVGVNFADNPQPTRDACEKPAWQYRIERRINTARTLIAKLLCFRSGNTRPKVMRFVTQAFVGTNIGPNDYKERVMERIDFLKQKIYAWANRIRRYKKRTKRFYLNRRFQRDQKGVYRGWEQPEEQVADRQLPNADAIAAFWRGIWSVPVNHTEGDWMGVVEQRCELIPEMDSITIEPYDVGYAIRSAHNWKSPGPDGLHNFWIKWFKVSHPCLATQFQDALNSGNVPTFMTTGVTHLLFKSGSTTEPKNYRPITCLPTIYKLLTSILRSKLIKHLVDNTLLAKTQNGCRPGTRSTKELLLIDMTINQQVRRNRKNLCTAWVDYKKAYDSVPHTWLGRVLELYKIDVTLRTFLGVCMGQWVTRLCIPGGGSLPISDGLIKIERGIFQGDSLSPLWFCLALNPLSSLLEDSKLGFHLRRGGEAISHLLYMDDLKLFASKKHDLLELLNLTETFSSSIGMEFGVDKCAVMYVQRGRVVNSNGLQLSEGVCFKTLSEDETYKYLGISQSLGIVDENVKQLIKERFFSRLRKVLNCLLSGGNKIRAFNGWVMPSLTYSFGILKWTQTELDALDRRIRSMLTTYRMHHPRSSVMRLYIPRKCGGRGLLNAKDLHNREVYNLREYFLKTNESIHRDMLSVDKGLTPLSLAKQNWLRLPVSSTSERMDVWKSKELHGRFHRALYGPDIDLPASVNWLRFGDLFGETEGFACAIMDEVIKTKNYRKYIMKDGTLDICRACHHPGESIRHIISCCSRLANSEYLHRHNLVARIIHQQLALQYDLIATEVPYYKYTPEPVLEKGHITLYWDRSIITDRTIVANKPDIVIIDRSARRTMLVDISIPHDCNLIKAETDKLTKYLDLAHEIAAMWHMESTIIVPIVVSVNGLIAKSLDRHLERLSLGKWVKGQIQKAVILSTTRIVRKFLSLEP

SEQ ID NO: 27174 - protein, 1010 aa, Hyles vespertilio
MRWTQELNENVMRAYFGATKGGTRLTAYRAKMLSLFQALEPTVDVSSQRLSDQVRFIQRRKLLDDQVLERLRSDLCVVQDVNVPSVTIDQAADTPPTPAADIDLTDNMNSNVSPQDEQRLRGALERAISEFLSLSASYRPRLPRLPTHRRNLALMGALDSMLPTYLESSRDLVDTHSILFCAAVAACQVANVKFPSDFKATRGVVTVPAWQRRIEDRINGARILIGKLISFREGNSRPKIMRFVTQAFSGTNTSPRNYRLCVTERIDFYKQKVYAWANRIRRYRKRWDRFQQNRMFQSDQKRVYRCWENSQKGVGDGRLPSAHEMREYWVNIWSSPVSHTEAPWFGVVDRACEAIPAMDTILISPEDVLAAIRPTQNWKSPGPDGLHNFWLKWFPSSHARLATQFQDALERGSLPTFMTTGVTHLLFKSGVTTEPKNYRPITCLPTIYKVLTSIIRSKITDDISSNQILFSGQTGCMNGSRGTKELLLIDMTICQQARHNRRNLSAAWIDYKKTYDSVPHTWLMRVLNLYKINTNLCNFLGSCMGQWTTVLRYPGGTVPPDCDEPIRIKRGIFQGDSLSPLWFCMALNPLSNLLLDSGLGYRLRRGSEPISHLLYMDDLKLFASKQTELIELLKITERFSNSINMEFGVDKCAVIHVKRGEVAVSDDIHVSETVRLKSLSVTETYKYLGMPEALGIMGADVKRSLKERFFSRLTKVLNSFLSGGNKIRAFNGWVMPVLMYSFGILKWTQTELDALDRKVRTLLTAHRMHHPRSSVMRLYIPRRCGGRGILNAKDLHNREVCNLRDYFLHSDVDMHRVVVMVDKGFTPLSLAIENWWKPLVVGIRDREDIWKSKELHGRFYRALHGPDVDRLASVSWLRFGNLFGETEGFIFAIMDEVIKTNNYRKYILKDGTVDICRACHRPGESIRHVISGCSYLANGEYLHRHNLVAKIIHQQIALRYGLVTSEVPYYQYVPQPVLENGHATLYWDRSIITDRTILSNKPDIVIIDTC

SEQ ID NO: 27175 - protein, 1033 aa, Hyles vespertilio
MCCPGRQCPSVTIDQAAYTPPTPAADIDLTDNMNSNVSPQDEQRLRGALERAISEFVSLSASCRPRLPRLPTHRRNLALMGALDSMLPTYLESSRDLVDTHSILFCAAVAACRVANVKFPSDFRATRGVVTVPAWQRRIEDRINGARILIGKLISFREGNSRPKIMRFVTQAFSGTNTSPRNYRLCVTERIDFYKQKVYAWANRIRRYRKRWDRFQQNRMFQSDQKRVYRCWENSQQGVGDGRLPSAHEMREYWVNIWSSPVSHTEAPWFGVVDRACEAIPAMETILISPEDVLAAIRPTQNWKSPGPDGLHNFWLKWFPSSHARLATQFQDALERGSLPTFMTTGVTHLLFKSGVTTEPKNYRPITCLPTIYKVLTSMIRSKITDHISSNQILFSGQTGCMNGSRGTKELLLIDMTICQQARHNRRNLSAAWIDYKKAYDSVPHTWLMRVLNLYKINTNLCNFLGSCMGQWTTVLRYPGGTVPPDCDEPIRIKRGIFQGDSLSPLWFCMALNPLSTLLLDSGLGYRLRRGSEPISHFLYMDDLKLFASKQTELIELLKITERFSNSINMEFGVDKCAVIHVKRGEVAVSDDIHVSETVRLRSLSVTETYKYLGMPEALGIMGADVKRSLKERFFSRLTKVLNSFLSGGNKIRAFNGWVMPVLMYSFGILKWTQTELDALDRKVRTLLTAHRMHHPRSSVMRLYIPRRCGGRGILNAKDLHNREVCNLRDYFLHSDVDMHRVVVMVDKGFTPLSLAIENWRKPLVVGIRDREDIWKSKELHGRFYRALHGPDVDRLASVSWLRFGNLFGESEGFVFAIMDEVIKTNNYRKYILKDGTVDICRACHRPGESIRHVISGCSYLANGEYLHRHNLVAKIIHQQIALRYGLVTSEVPYYQYVPQPVLENGHATLYWDRSIITDRTILSNKPDIVIIDRLARRAILVDVTIPHDDNLVKAEKDKMSKYLDLAHEVTDMWDVDSTIIVPIVVSAHGLIPKSLDQHLQRLSIGCWVRSQIQKAVLLDTARIVRRFLTLGS

SEQ ID NO: 27176 - protein, 868 aa, Hyles vespertilio
MRFVTQAFSGTNISPRDYGLWVTERIDYYKQKVYAWANRIRRYRKRWDRFQQNRTFQSDQKRVYRCWERSPQCVVDGRLPSIHDMRTYWTNIWSSSISHTEADWFGVVERACESIPIMEAISISPEDVLVAIRPTQNWKSPGPDGLHNFWLKWLPCSHARLAAQFQDALDGGSLPTFMTTGVTHLLYKSGSTTDPKNYRPITCLPTTYKLFTSILRAKIANHFTSNNILFPGQTGCKSGSRGTKELLLIDMTICQQARQNRRNLSAAWIDYKKAFDSVPHTWLMRVLSLYKIDTNLCTFLGSCMGQWTTVLRYPGGMVSPDCDEPIRIKRGIFQGDSLSPLWFCMALNPLSTLLVDSGLGYRLRRGTEPISHLLYMDDLKLFASKQTELIELLKITEKFSNSINMEFCVDKCAIIHVKRGEVAVSDGVQISDAVRLRALSETETYKYLGMPEALGILSADVKQSVKERFFGRLAKVLNSLLSGGNKIRAFNGWVMPVLMYSFGILRWTQTELDALDRKVRTLLTAHRMHHPRSSVMRLYIPRRCGGRGILNAKDLHNREVCNLRDYFLHSDVDMHRVVVKIDKGLTPLSLANENWRKPLVMSTKDREEVWKSKELHGRFYRALHGPDVDRPASVSWLRFGNLFGETEGFVFAIMDEVIKTNNHRKYILKDGTVDICRACHRPGESIRHVISGCSYLANGEYLHRHNLVAKIIHQQIALRYGLVTLEMPYYQYVPQPVLENGHATLYWDRSIITDRTIVANKPDIVIIDRLARRAILVDVTIPHDVNLVKAEKDKLSKYLDLAHEVTDMWDVDSTVIVPIVVSAHGLMPKSFDQHLQRLSIGRWVKSQIQKAVLLDTARIVRRFLTLDP

SEQ ID NO: 27177 - protein, 1197 aa, Hyles vespertilio
MFHNKARKKRNAHLTSPSSSSSASWASASDVFEVTPDNDASSQHGELQSSPPPPRPAQRRGRPPPAVGLGPVGPSVPPTVPATGGVVRRMRWTHEINENVMRAYFGATNGGINFTAYRVKMLSLFQALEPTVDVSSQRLSDQVRFIQRRKLLDDDTLERLRTDLCFVQEDHVSPVSGDQAAGPTPTPVADFELTDNLDDNVSPQDKQQLRGALECAILEFASLSASCRPRLPRLPTHRRNLALMGALDSMLPTYLESSRDLVDTHSILYCAAVAACRVANVQFPKEYRATRGVVTVPAWQRRIEDRINRARTLIGKLISFKEGNSRPKIMRFVTQAFSGTNTSPRNYRLCVTERIDFFKQKVYAWANRIRRYRRRWDRFQQNRKFQTDQKRVYRCWENPPQGVVDGRLPSAHEMREYWTNIWSSPVSHTEASWFSVVDRACEAIPAMETILINPEDVLTAIRQTQNWKSPGPDGLHNFWLKWFPSSHARLAVQFQDALERGSLPAFMTTGVTHLLFKSGCTTEPKNYRPITCLPTIYKVLTSIIRSKITDHINSNQILFSGQTGCMNGSRGTKELLLINMTICQQARHNRRNLSAAWIDYKKAYDSVPHTWLMRVLNLYKINTNLCNFLGSCMGQWTTVLRYPGGTVPPDCDEPIRIKRGIFQGDSLSPLWFCMALNPLSTLLLDSGLGYRLRRGSEPISHLLYMDDLKLFASKQTELIELLKITERFSNSINMDFGVDKCAVIHVKRGEVAVSDDILVSETVRLRSLSVTETYKYLGMPEALGIMGADVKRSLKERFFSRLTKVLNSFLSGGNKIRAFNGWVMPVLIYSFGILKWTQTELDALDRKVRTLLTAHRMHHPRSSVMRLYIPRRCGGRGILNAKDLHNREVCNLRDYFLHSDVDMHRVVVMVDKGFTPLSLAIENWRKPLVVGIKDREDIWKSKELHGRFYRALHGPDVDRLASVSWLRFGNLFGETEGFVFAIMDEVIKTNNYRKYILKDGTVDICRACHRPGESIRHVISGCSYLANGEYLHRHNLVTKIIHQQIALRYGLVTPEVPYYQYVPQPVLENGHATLYWDRSIITDRTILANKPDIVIIDRLARRAILVDVTIPHDDNLVKAEKDKMSKYLDLAHEVADMWDVDSTIIVPIVVSAHGLIPKSLDQHLQRLSIGVWVRSQIQKAVLLDTARIVRRFLTLGS

SEQ ID NO: 27178 - protein, 1197 aa, Hyles vespertilio
MITRKARARQNARLRPPSSSSSASWASASDVFEVTPDIDVSSQRDELQSSPPPPRPARRRGRPPPAVGLGPVGQSVPPTVPATGGVVRRMRWTREINENVMRAYFGATKGGINLTAYRAKMLSLFQALEPMVDVSSQRLSDQVRFIQRRKLLDDDTLERLRTDLCVVQDDDISPVSGDQAASPTPTPVSDFELTDNLDDNVSPQDKQHLRGALERGISEFVSLSASCRPRLPRLPTHRRNLALMGALDSMLPTYLESSRDLVDTHSILYCAAVAACRVANVQFPKEYRATRGVVTVPAWQLRIEDRINRARTLIGKLISFSEGNSRPRIMRFVTQAFSGTNISPQNYRLCVTERIYFYKQKVYAWANRIRRYRRRWDRFQQNRMFQSDQKRVYRCWENSSQGVVDGRLPGAHEMREYWTNIWSSPVSHTEASWFSVVDRACGAIPAMETILISLEDVQTAIRRTQNWKSPGPDGLHNFWLKWFPSSHVRLAAQFQDALEAESLPAFMTTGVTHLLFKSGCTTEPKNYRPITCLPTIYKILNSIIRSKITDHITSNQILFPGQTGCMNGSRGTKELLLINMTICQQARHNRRNLSAAWIDYKKAYDSVPHTWLMRVLNLYKINTNLCNFLGSCMGQWTTVLRYPGSTAPPDCDEPIRIKRGIFQGDSLSPLWFCMALNPLSTLLLDSGLGYRLRRGSEPISHLLYMDDLKLFASKQTELVELLKITERFSKSINMEFGVDKCAVIHVKRGEVAVSDDIQVSETVRLRHLSVTETYKYLGMPEALGIMGADVKQSLKERFFSRLAKVLNSFLSGGNKIRAFNGWVMPVLMYSFGILKWTQTELDALDRKVRTLLTAHRMHHPRSSVMRLYIPRRCGGRGILNAKDLHNREVCNLRDYFLHSDVDMHRVVVMVDKGFTPLSLAIENWRKPLVMGIRDREDIWKSKELHGRFYRALHGPDVDRLASVSWLRFGNLFGETEGFVFAIMDEVIKTNNYRKYILKDGTVDICRACHRPGESIRHVISGCSYLANGEYLHRHNLVAKIIHQQIALRYGLVTNGVPYYQYVPQPVLENGHATLYWDRSIITDRTILANKPDIVIIDRLARRAILVDVTIPHDDNLVKAEKDKMSKYLDLAHEVTDMWDVDSTIIVPIVVSAHGLIPKSLDQHLQRLSIGCWVRSQIQKAVLLDTARIMRRFLTLGS

SEQ ID NO: 27179 - protein, 1020 aa, Dendrolimus kikuchii
MIDVTLTAAVPPETDLGIPTADYVSSQDNEHMRRSLEAAIKDFKDMPTLSRPRLPRLPIHKRSLAIMGHMNSLLASHLIQSKDLTETHSILYCGAVAVCRTVGVNFSDNPHLIRHTCQKPAWQYRIERRINTARTLIAKLLCFRSGNTRPKIMRFVTQAFAGTNIGPNDYKGRVMERIDLLKQKIYAWANRIRRYKKRTERFYLNRRFQRDQKGVYRGWEQPEEQVIDRQLPNADAISAFWRGIWSVPVNHTEGDWMGAVEQRCGLIPEMDSITIEPYDVGYAIRSAHNWKSPGPDGLHNFWIKWFKVSHPCLATQFQDALNSGNVPTFMTTGVTHLLYKSGSTTEPKNYRPITCLPTIYKLLTSILRSKLMKHLVDNTLLAKTQNGCRPGSRGTKELLLIDMTINHQVRRNKKNLCTAWVDYKKAYDSVPHTWLMRVLELYKIDVTLRTFLGACMGQWVTRLCMPGGGSLPISDGLIKIERGIFQGDSLSPLWFCLALNPLSFLLEDSRLGFHLRRGGEAISHLLYMDDLKLFTSKKHDLLELLNLTETFSSSIGMEFGVDKCAVMYVQRGRVVNSNGLQLSGGVCFKTLSEDETYKYLGISQSLGIVDEDVKQLIKERFFSRLRKVLNCLLSGGNKIRAFNSWVMPSLTYSFGILRWTQTELDALDRRVRCMLTTYRMHHPRSSVMRLYIPRKCGGRGLLNAKDLHNREVYNLREYFLKTIQSIHRDMLSVDKGFTPLSLAKQNWLRPPVLSTSERMDVWKSKELHGRFHRALYGPDIDLPASVNWLRFGDLFGETEGFVCAIMDEVIKTNNYRKYILKDGTLDVCRACHRPGESIRHIISCCSRLANSEYLHRHNLVARIIHQQLALRYGLIATEVPYYKYTPEPVLENGHITLYWDRSIITDRTIVANKPDIAIIDRSARRTLLVDISIPHDCNLVNAETDKLTKYLDLAHEITDMWHMESTIIVPIVVSVNGLVAKSLDRHLERLSLGKWVKGQMQKAVLLSTARIVRKFLSLEP

SEQ ID NO: 27180 - protein, 1045 aa, Eilema sororculum
MLNETVLETLRQECLRNICVTPALAPAPASTTALNEDSHVTRDDTPIPVSIQYNEEIKEALEYALREYRSMPIHVRPRLPRLPIHRRNIALVSALDSLLPKYLENSENLRDTHSILYCTAVAACRMAGAKFPIKDPAIRPKPAIPAWQCRIERRVAEARVLIGKLICFRSGNTRPRVMRYVTRAFAGTDISPQDYTSRVTERIDFLKQKVYAWANRIRRYKKRVDRYTVNRMFQRDQRWVYRSWERTDESVDDLRRPDAEATNAFWRSIWSVPVSHTEGDWMREVERACETIPEMEEIYIDATDVDCAVRSLSNWKSPGPDGLHNFWLKWLRSSHVVLASQFQSAIESGTLPAFMTTGVTHLLHKTGSTLEPNNYRPITCLPTVYKLLTSILRAKINNHINNNSIMCTSQNGCRNGARGTKELLLIDMTISQQARRNRKDLVACWIDYKKAFDSVPHTWLLRVLELYKVNTTLCTFLRSCMGQWRTVLLYPGCHQALGSGEPITIERGIFQGDSLSPLWFCLALNPLSTLLVNSGLGYRLRREGQMVSHLFYMDDLKLFAHTNPQLIALLKVTETFSNSIKMAFGVDKCAVIHVKRGRVVESEGIQLSDSTNLRSLLVTETYKYLGMSQALCINEVGMKQMLQERFFGRLKKVLNSLLSGGNKVRACNSWVMPLLMYSFGILKWTQTELDTIDRKVRTQMTAFRMHHPRSSVMRLYIPRKCGGRGFLNAKTLHNREVCNLRDYFLKSNVDMHRDVVNVDTGLTPLGLAKENWRRPTIVGTDSRREVWQSKELHGRFYRALHRPEVDLLASVFWLRFSDLFGETEGFVCAIADEVIKTNNYRKYIMRDGTIDICRACHQPGESLRHITSGCSRLANGEYLHRHNQVARIIHQRLALKYNLVEVEVPYYRYVPEPVLENSHITLYWDRSIITDRTVVANKPDIVVIDRSERRALIVDVTIPHDENLVKAEKDKQVKYLDLAHEVVDMWNVDSAIIVPIVVSVNGLIAKSLDQHLKRLGLDGWVKGQMQKAVLLDTARIVRKFLSLEP

SEQ ID NO: 27181 - protein, 1106 aa, Eilema sororculum
MRWTNSINENVMRAYFAATEGGTNLSAYRSRMLPLFQALEPSVNTSAQRLSDQVRVIQRNHMLNETVLETLRQECLRNICVTPALAPAPASTTALNEDSHVTRDDTPIPVSIQYNEEIKEALEYALREYRSMPIHVRPRLPRLPIHRRNIALVSALDSLLPKYLENSENLGDTHSILYCTAVAACRMVGAKFPIKDPAIRPKPAIPAWQCRIERRVAEARVLIGKLICFRSGNTRPRVMRYVTRAFAGTNISPQDYTSRVTERIDFLKQKVCAWANRIRRYKKRVDRYTVNRMFQRDQRWVYRNWERTDESVDDLRRPDAEATNAFWRSIWSVPVSHTEGDWMREVERACETIPEMEEIYIDATDVDCAIRSLSNWKSPGPDGLHNFWLKWLRSSHVVLASQFQSAIESGTLPAFMTTGVTHLLHKTGSTLEPNNYRPITCLPTVYKLLTSILRAKINNHINNNSIMCTSQNGCRNGARGTKELLLIDMTISQQARRNRKDLVACWIDYKKAFDSVPHTWLLRVLELYKVNTTLCTFLRSCMGQWRTVLLYPGCRQALGSGEPITIERGIFQGDSLSPLWFCLALNPLSTLLVNSGLGYRLRREGQMVSHLFYMDDLKLFAHTNPQLIALLKVTETFSNSIKMAFSVDKCAVIHVKRGRVVESEGIKLSDSTNLRSLLVTETYKYLGMSQALCINEVDMKQRLQERFFGRLKKVLNSLLSGGNKVRACNSWVMPLLMYSFGILKWTQTELDTIDRKVRNQLTAFRMHHPRSSVMRLYIPRKCGGRGFLNAKTLHNREVCNLRDYFLKSNVDMHRDVVNVDTGLTPLGLAKENWRRPTIVGTDSRREVWQSKELHGRFYRALHRPEVDLLASVSWLRFSDLFGETEGFVCAIADEVIKTNNYRKYIMRDGTIDICRACHQPGESLRHITSGCSRLANGEYLHRHNQVARIIHQRLALKYNLVEVEVPYYRYVPEPVLENSHITLYWDRSIITDRTVVANKPDIVVIDRSERRALIVDVTIPHDENLVKAEKDKQVKYLDLAHEVVDMWNVDSAIIVPIVVSVNGLIAKSLDQHLKRLGLDGWVKGQMQKAVLLDTARIVRKFLFLEP

SEQ ID NO: 27182 - protein, 1192 aa, Eilema sororculum
MLTRAQANRNRSAPTTSPDSSLSSAAQPPAVEPAASSSSSSDEFFSPPTSPTPVRRPGRGRPPTCLGPRRPPASNWAPATGGNVHRMRWTNSINENVMRAYFAATEGGTNLSAYRTRMLPLFQALEPTINTSAQRLSDQVRVIQRNRMLNETVLETLRLECLRNICVTPAPAPAPASTAGINDVTYVAPDDTPIPVSIQYNEEIKEALECALREYRSMPVHVRPRLPRLPIHRRNIALVSALDSLLPRYLENSENLGDTHSILYCTAVAACRIAGAKFPIKHPAIRPKPVIPAWQCRIERRVAEARVLIGKLICFRSGNTRPRVMRYVTRAFAGTDISPQDYTSRVTERIDFLKQKVYAWANRIRRYKKRVDRYTINCMFQRDQRWVYRSWERTEESVDDVRRPDAEATNAFWRSIWSVPVSHTEGDWMREVERACETIPEMEDINIDAIDVDCAVRSLSNWKSPGPDGLHNFWLKWLRSSHVVLASQFQSAIESGTLPAFMTTGVTHLLHKTGSTLEPNNYRPITCLPTVYKLLTSILRAKINNHINNNSIMCASQNGCRNGARGTKELLLIDMTISQQARRNRKDLAACWIDYKKAFDSVPHTWLLRVLELYKVNTTLCTFLRSCMGQWRTVLFYPGCRQALGSGVPITIERGIFQGDSLSPLWFCLALNPLSTLLVYSGLGYRLRREGQMVSHLFYMDDLKLFAHTNPQLIALLKITETFSNSIKMAFGVDKCAVIHVKRGRVVESEGIQLSDSTNLRSLLVTETYKYLGMSQALCINEAGMKQMLQDRFFGRLKKVLNSLLSGGNKVRACNSWVMPLLMYSFGILKWTQTELDTIDRKVRAQLTAFRMHHPRSSVMRLYIPRKCGGRGFLNAKTLHNREVCNLRDYFLKSNVDMHRDVVNVDTGLTPLGLAKENWRRPTIVSTDSRREVWQSKELHGRFYRALHRPEVDLLASVSWLRFSDLFGETEGFVCAIADEVIKTNNYRKYIMRDGTIDICRACHQPGESLRHITSGCSRLANGEYLHRHNQVARIIHQRLALKYNLVEVEVPYYRYVPEPVLENSHITLYWDRSIITDRTVVANKPDIVVIDRSERRALIVDVTIPHDENVVKAEKDKQVKYLDLAHEIVDMWNVDSAIIVPIVVSVNGLIAKSLDQHLKRLGLDGWVKGQMQKAVLLDTARIVRKFLSLEP

SEQ ID NO: 27183 - protein, 1115 aa, Laothoe populi
MAPAAGGVVRRMRWTHSINENVMRAYFGATEGGTKLTAYRPKMLALFQDLEPTIDVSAQRLSDQVRYIQRRKLLDDAALDRLRVNLCVVQDVVQRTVDRPSVPTDDVNIELVDDLDNNVSSHDIQCLRGALESAILEFKLVPACLRPRLPRLPTHKRNLALMGALDSMLPEYMESSRDLVDTHAILYCAAIAACRVANVRLPNDYRAARDATHVPAWQRRIEERIDRTRTLISKLICFKAGNNRPKVMRFVTQAFLGSSIRPQDYRFCVTERIDLLKQKVYAWANRIRRYKKRWNRFQQNRAFQSDQKRVYRCWEHSQQGVGDGRLPDVRDMRTYWANIWSSPVSHTEGAWIGVVERACEAISPMETISISPDDVLRAVRPTQNWKSPGPDGLHNFWLKWFVTSHSRLAAQFQSALESGCLPTFMTTGVTHLLFKSGSATDPKNYRPITCLPTIYKLFTSIIRFKIAYHIDNNNILFSAQTGCKIGSRGTKELLLIDMAICQQVRHNRRNLSAAWIDYKKAYDSVPHTWLMRVLDLYKIHSNLRTLLGACMRQWTTVLKYPGGAGPLDCDEPIKIDRGIFQGDSLSPLWFCLALNPLSTLLLDSGLGYRLRRGSVPISHLLYMDDLKLFAPKKSDLIELLKITKSFSNSISMEFGVDKCAVIHVGRGAVRVSDDVYLSETERLRSLSESETYKYLGMSEALGIMGADMKQSLKERFFCRLTKVLISFLSGGNKIRAFNGWVMPVLMYSFGILKWTQTELDALDRRVRTLMTAHRMHHPRSSVMRLYIPRRCGGRGLLNAKDLHNREVRNLRDYFLHSDVDVHREVVKVDKGFTPLSLANENWRVPVVMSTGDRKGVWKSKELHGRFYRALNGPDVDQLASVSWLRFGDLFGETEGFVFAIMDEVVKTNNYRKYILKDGTVDICRACHRTGESIRHVISGCSYLANGEYLHRHNLVAKIIHQQLALRYHLVISEVPYYQYVPQPVLENGHTTLYWDRSIITDRTIVANKPDIVVIDRLVRRAILVDVTIPHDDNLVKAEKDKMSKYLDLAHEVVDMWNVDSAIIVPIVVTANGLIPKSLDQHLQRLSIGRWVKSQIQKAVLLDTARIVRRFLTLGS

SEQ ID NO: 27184 - protein, 1111 aa, Dendrolimus punctatus
MRWTQELNECVMRAYYEATEGGTNLTSYRGRLLSLFQTFQPASAVTAQRLSDQVRAIQRLHLLDESTLDRLRNAVRINRESTDTPQPTSPATPADSQGTVNFTIDDVSDSIAVDNVSIQINEQLRRTLEHSIQEFRDQPILNRPRVPKLPLHRNNLLLMGALDCLLAPYFGSSADLVDTHSILYCGAVAVCRVAGVKFPNTQPTRPASGKPAWQIRIEQRIDRARVLIAKLICFRAGNCRPRVVRFVAQAFTGTNVSPSEYMARATERIDFWKQKVYAWANRIRRYKERADRYFLNRTFQSEEKRVYRGWEKSRDSVADRQIPNIDAMASFWRSIWSMPVSHTEGDWIELVKQSCDQVPDMEPITIEPLDVGNAIRSAHNWKSPGPDGLHNFWIKWFKSSHSCLANQFQEAVDRGSLPTFMTTGVTHLLFKSGCTTEPKNYRPITCLPTIYKLLTSILGKKLSNYFYNNNILAITQNGCKAGSRGTKELLLIDTTVSQQARRNRRNLSVAWIDYKKAYDSVPHTWLMRVLELYKVDATLRTFLQACMRQWVTHLKLPGGRGPSLPEGAINIERGIFQGDSLSPLWFCLALNPLSTLLESSKLGYRFRRGGEIMSHLLYMDDLKLFASNEPDLIELLKTTERFSKSINMEFGIEKCAVMHVRRGKVVNSPNLQLSENMSLKSLSETETYKYLGMSESLGIADADVKQTVKDRFFCRLRKVLTSLLSGGNKVRAFNSWVMPVLAYSFGILRWTQTELDALDRRVRCLLTKHRMHHPRSSVMRLYISRRCGGRGFLNAKDLHNREVNNLRTYFLKMDVGLHKDVVAVDKGLTTLSLANENWCNLAVLSASDRINVWKSKALHGRFYRALTGPDVDLSASVNWLRFGNLFGETEGFVFAIMDEVIKTNNYRKYILKDGTLDICRACHRPGESLRHIVSGCSHLSNGEYLHRHNLVARIIHQQLALRYGLVETEVPYYQYSPEPVLENSRATLYWDRSIITDRTIVANKPDIVIIDRSARRAILVDISIPHDDNLVKKEKEKLSKYLDLAHEVTAMWRLESTSIVPIVVTVNGLIAKSLDRHLERLSLGSWVKGQIQKAALLDTARIVRRFLSLEP

SEQ ID NO: 27185 - protein, 868 aa, Hyles vespertilio
MRFVAQAFSGTNISPRDYGLWVTERIDYYKQKVYAWANRIRRYRKRWDRFQQNRTFQSDQKRVYRCWERSPQCVVDGRLPSVHDMRTYWTNIWSSSISHTEADWFGVVERACESIPIMEAISISPEDVLVAIRPTQNWKSPGPDGLHNFWLKWLPCSHARLAAQFQDALDGGSLPTFMTTGVTHLLYKSGSATDPKNYRPITCLPTTYKLFTSILRAKIANHFTSNNILFPGQTGCKSGSRGTKELLLIDMTICQQARQNRRNLSAAWIDYKKAFDSVPHTWLMRVLSLYKIDTNLCTFLGSCMGQWTTVLRYPGGMVSPDCDEPIRIKRGIFQGDSLSPLWFCMALNPLSTLLVDSGLGYRLRRGTEPISHLLYMDDLKLFASKQTELIELLKITEKFSNSINMEFCVDKCAIIHVKRGEVAVSDGVQISDAVRLRALSETETYKYLGIPEALGILSADVKQSVKEHFFGRLAKVLNSLLSGGNKIRAFNGWVMPVLMYSFGILRWTQTELDALDRKVRTLLTAHRMHHPRSSVMRLYIPRRCGGRGILNAKDLHNREVCNLRDYFLHSDVDMHRVVVKIDKGLTPLSLANENWRKPLVMSTKDREEVWKSKELHGRFYRALHGPDVDRPASVSWLRFGNLFGETEGFVFAIMDEVIKTNNYRKYILKDGTVDICRACHRPGESIRHVISGCSYLANGEYLHRHNLVAKIIHQQIALRYGLVTLEMPYYQYVPQPVLENGHATLYWDRSIITDRTIVANKPDIVIIDRLARRAILVDVTIPHDVNLVKAEKDKLSKYLDLAHEVTDMWDVDSTVIVPIVVSAHGLMPKSFDQHLQRLSIGRWVKSQIQKAVLLDTARIVRRFLTLDP

SEQ ID NO: 27186 - protein, 1248 aa, Hyles vespertilio
MIPFYNHIMFYRRNRVNKQQFIIIENNRVTVCDNVKGFYTFWFLFIIKTKTMINNKARKKRNAHLTSPSSSSSASWASASDVFEVTSDNDASSQHGELQSSPPPPRPARRRGRPPPAVGLGPVGPSVPPTVPATGGVVRRMRWTREINENVMRAYFGATKGGINLTAYRAKMLSLFQALEPTVDVSSQRLSDQVRFIQRRKLLDDDTLERLRTDLCFVQDDHVSPVSGDQAAGPTPTPVADFELTDNLDDNVSPQAKQQLRGALECAILEFASLSASCRPRLPRLPTHRRNLALMGALDSMLTTYLESSRDLVDTHSILYCAAVAACRVANIKFPNEYKATRGVVIVPAWQRRIEDRINRARTLIGKLIYFKEGNSRPKIMRFVTQAFSGTNTSPRNYRLCVTERIDFFKQKVYAWANRIRRYRRRWDRFQQNRKFQTDQKSVYRCWENPPQGVVDGRLPSAHEMREYWTNIWSSPVSHTEASWFSVVDRACKAIPAMETILISPEDVLTAIRQTQNWKSPGPDGLHNFWLKWFPSSHARLAAQFQNALERGSLPTFMTTGVTHLLFKSGCTTEPKNYRPITCLPTIYKVLTSIIRSKITDHINSNQILFSGQTGCMNGSRGTKELLLINMTICQQARHNRRNLSAAWIDYKKAYDSVPHTWLMRVLNLYKINTNLCNFLGSCMGQWTTVLRYPGGTVPPDCDEPIRIKRGIFQGDSLSPLWFCMALNPLSTLLLDSGLGYRLRRGSEPISHLLYMDDLKLFASKQTELIELLKITERFSNSINMDFGVDKCAVIHVKRGEVAVSDDILVSETVRLRSLSVTETYKYLGMPEALGIMGADVKRSLKERFFSRLTKVLNSFLSGGNKIRAFNGWVMPVLIYSFGILKWTQTELDALDRKVRTLLTAHRMHHPRSSVMRLYIPRRCGGRGILNAKDLHNREVCNLRDYFLHSDVDMHRVVVMVDKGFTPLSLAIENWRKPPVVGIKDREDIWKSKELHGRFYRALHGPDVDRLASVSWLRFGNLFGETEGFVFAIMDEVIKTNNYRKYILKDGTVDICRACHRPGESIRHVISGCSYLANGEYLHRHNLVAKIIHQQIALRYGLVTPEVPYYQYVPQPVLENGHATLYWDRSIITDRTILANKPDIVIIDRLARRAILVDVTIPHDDNLVKAEKDKMSKYLDLAHEVTDMWDVDSTIIVPIVVSAHGLIPKSLDQHLQRLSIGCWVRSQIQKAVLLDTARIVRRFLTLGS

SEQ ID NO: 27187 - protein, 1108 aa, Hyles vespertilio
MRWTREINENVMRAYFGATKGGINLTAYRAKMLSLFQALEPMVDVSSQRLSDQVRFIQRRKLLDDDTLERLRTDLCVVQDDDISPVSGDQAASPTPTPVSDFELTDNLDDNVSPQDKQHLRGALERAISEFVSLSASCRPRLPRLPTHRRNLALMGALDSMLPTYLESSRDLVDTHSILYCAAVAACRVANVQFPKEYRATRGVVTVPAWQLRIEDRINRARTLIGKLISFSEGNSRPRIMRFVTQAFSGTNISPQNYRLCVTERIDFYKQKVYAWANRIRCYRRRWDRFQQNRMFQSDQKRVYRCWENSSQGVVDGRLPGAHEMREYWTNIWSSPVSHTEASWFSVVDRACEAIPAMETILISLEDVQTAIRRTQNWKSPGPDGLHNFWLKWFPSSHVRLAAQFQDALEAESLPAFMTTGVTHLLFKSGCTTEPKNYRPITCLPTIYKILTSIIRSKITDHITSNQILFPGQTGCMNGSRGTKELLLINMTSCQQARHNRRNLSAAWIDYKKAYDSVPHTWLMRVLNLYKINTNLCNFLGSCMGQWTTVLRYPGSTAPPDCDEPIRIKRGIFQGDSLSPLWFCMALNPLSTLLLDSGLGYRLRRGSEPISHLLYMDDLKLFASKQTELVELLKITERFSNSINMEFGVDKCAVIHVKRGEVAVSDDIQVSETVRLRHLSVTETYKYLGMPEALGIMGADVKQSLKERFFSRLAKVLNSFLSGGNKIRAFNGWVMPVLMYSFGILKWTQTELDALDRKVRTLLTAHRMHHPRSSVMRLYIPRRCGGRGILNAKDLHNREVCNLWDYFLHSDVDMHRVVVMVDKGFTPLSLAIENWRKPLVMGIRDREDIWKSKELHGRFYRALHGPDVDRLASVSWLRFGNLFGETEGFVFAIMDEVIKTNNYRKYILKDGTVDICRACHRPGESIRHVISGCSYVANGEYLHIHNLVAKIIHQQIALRYGLVTNGVPYYQYVPQPVLENGHATLYWDPSIITDRTILANKPDIVIIDRLARRAILVDVTIPHDDNLVKAEKDKMSKYLDLAHEVTDMWDVDSTIIVPIVVSAHGLIPKSLDQHLQRLSIGCWVRSQIQKAVLLDTARIVRRFLTLGS

SEQ ID NO: 27188 - protein, 868 aa, Hyles vespertilio
MRFVTQAFSGTNTSPRNYRLCVTERIDFFKQKVYAWANRIRRYRRRWDRFQQNRKFQTDQKRVYRCWENPPQGVVDGRLPSAHEMREYWTNIWSSPVSHTEASWFSVVDRACEAIPAMETILINPEDVLTAIRQTQNWKSPGPDGLHNFWLKWFPSSHARLAVQFQDALERGSLPAFMTTGVTHLLFKSGCTTEPKNYRPITCLPTIYKVLTSIIRSKITDHINSNQILFSGQTGCMNGSRGTKELLLINMTICQQARHNRRNLSAAWIDYKKAYDSVPHTWLMRVLNLYKINTNLCNFLGSCMGQWTTVLRYPGGTVPPDCDEPIRIKRGIFQGDSLSPLWFCMALNPLSTLLLDSGLGYRLRRGSEPISHLLYMDDLKLFASKQTELIELLKITDIFSKSINMDFGVDKCAVIHVKRGEVAVSDDILVSETVRLRSLSVTETYKYLGMPEALGIMGADVKRSLKERFFSRLTKVLNSFLSGGNKIRAFNGWVMPVLMYSFGILKWTQTELDALDRKVRTLLTAHRMHHPRSSVMRLYIPRRCGGRGILNAKDLHNREVCNLRDYFLHSDVDMHRVVVMVDKGFTPLYLAIENWRKPLVVGIKDREDIWKSKELHGRFYRALHGPDVDRLASVSWLRFGNLFGETEGFVFAIMDEVIKTNNYRKYILKDGTVDICRACHRPGESIRHVISSCSYLANGEYLHRHNLVAKIIHQQIALRYGLVTPEVPYYQYVPQPVLENGHATLYWDRSIITDRTIPANKPDIVIIDRLARRAILVDVTIPHDDNLVKAEKDKMSKYLDLAHEVADMWDVDSTIIVPIVVSAHGLIPKSLDQHLQRLSIGCWVRSQIQKAVLLDTARIVRRFLTLGS

SEQ ID NO: 27189 - protein, 1194 aa, Hyles vespertilio
MTTRASRRNAQMRSPSSSSSASWASASDVFEVTPDIDVSSQRDELQSSPPPPRPARRRGRPPPAVGLGPTGPSVPPTVLATGGVVRRMRWTHQMNENVMRAYFRATKGGTNLTAYRAQMLSMFQVLEPTVNVSSQRLSDQVRFIQRRKLLDDEALERLRTEACVALDVITPITQRAAETPSIPAADIELVDNLDNTVSPQDQQRLRRTLESAILEYKSIPASCRPRVPRLPTHRRNLALMGALDSIVSTYMESSRDLVDTHSILYCAAVAACRVANVKFPINNVTTTRDVATVPAWQRRIEDRINRARTLIGKLIAFRNGNNRQRVMRFVAQAFSGTNISPRDYGLWVTERIDYYKQKVYAWANRIRRYRKRWDRFQQNRTFQSDQKRVYRCWERSPQCVVDGRLPSVHDMRTYWTNIWSSSISHTEADWFGVVERACESIPIMEAISISPEDVLVAIRPTQNWKSPGPDGLHNFWLKWLPCSHARLAAQFQDALDGGSLPTFMTTGVTHLLYKSGSATDPKNYRPITCLPTTYKLFTSILRAKIANHFTSNNILFPGQTGCKSGSRGTKELLLIDMTICQQARQNRRNLSAAWIDYKKAFDSVPHTWLMRVLSLYKIDTNLCTFLGSCMGQWTTVLRYPGGMVSPDCDEPIRIKRGIFQGDSLSPLWFCMALNPLSTLLVDSGLGYRLRRGTEPISHLLYMDDLKLFASKQTELIELLKITEKFSNSINMEFCVDKCAIIHVKRGEVAVSDGVQISDAVRLRALSETETYKYLGMPEALGILSADVKQSVKERFFGRLAKVLNSLLSGGNKIRTFNGWVMPVLMYSFGILRWTQTELDALDRKVRTLLTAHRMHHPRSSVMRLYIPRRCGGRGILNAKDLHNREVCNLRDYFLHSDVDMHRVVVKIDKGLTPLSLANENWRKPLVMSTKDREEVWKSKELHGRFYRALHGPDVDRPASVSWLRFGNLFGETEGFVFAIMDEVIKTNNYRKYILKDGTVDICRACHRPGESIRHVISGCSYLANGEYLHRHNLVAKIIHQQIALRYGLVTLEMPYYQYVPQPVLENGHATLYWDRSIITDRTIVANKPDIVIIDRLARRAILVDVTIPHDVNLVKAEKDKLSKYLDLAHEVTDMWDVDSTVIVPIVVSAHGLMPKSFDQHLQRLSIGRWVKSQIQKAVLLDTARIVRRFLTLDP

SEQ ID NO: 27190 - protein, 1196 aa, Deilephila porcellus
MIRKTTRQRNARKTSPSSSSSASWASASDVFEVTPNIDASSQRDELQSSPPPLRPARRRGRPPPAVGLGPVGQSVPSTVPATGGVVRRMRWTREINENVMRAYFGATKGGTHLTAYRVKMLSLFQAFEPTVVVSSQRLSDQVRFIQRRKLLDDEALERLRTDLCVVQGVNVTPVSRGPVADSTSTPVADIELADNLDDNVSPQDEQCLRGALERAISEFVSLSASCRPRLPRLPTHRRNLALVGALDSMLRTYLESSRDLVDTHSILYCAAVAACRVANITFPNEYRATRGVATVPAWQRRIEDRINRARTLIGKLVSFREGNSRPRVMRFVTQAFSGTNTSPRDYRLCVTERIDFFKQKVYAWANRIRRYRKRWDRFQQNRMFQSDQKRVYRCWESSPQSVMDGRLPSAREMREYWANIWASPVSHTEAAWFSVVNQACEALPTMETISISPEDVLAAIRPTQNWKSPGPDGLHNFWLKWFPSSHARLAIQFQDALERGSLPTFMTTGVTHLLFKSGCTTDPKNYRPITCLPTIYKILTSIIRSKITCHITTNKILFSGQTGCKSGSRGTKELLLIDMTICQQVRHNRRNLSAAWIDYKKAYDSVPHTWLMRVLNLYKIDTKLCTFLEVCMGQWTTVLKYPGATSPSDCDEPIAIRRGIFQGDSLSPLWFCMALNPLSTLLLDSGLGYRLRRGTEPISHLLYMDDLKLFASKQSELIELLKITEIFSKSINMEFGVNKCAVIHVKRGEVAVSDDIQVSETVRLRSLSEMETYKYLGMPEALGIMGVDVKQSLKERFFSRLTKVLNSFLSGGNKIRAFNGWVMPALMYSFGILRWTQTELDALDRKVRTLLTAHRMHHPRSSVMRLYIPRRCGGRGMLNAKDLHNREVCNLRDYFLNSDVDMHGVVVMVDKGFTPLSLANENWRKPLVMGIKDREEIWKGKELHGRFYRALHGPDVDRLASVSWLRFGNLFGETEGFVFAIMDEVIKTNNYRKYILKDGTVDICRACHRPGESIRHVISGCSYLANGEYLHRHNLVAKIIHQQIALRYGLVTPEVPYYQYVPQPVLENGHATLYWDRSVITDRTIVANKPDIVIIDRLARRAILVDVTIPHDDNLVKAEKDKLTKYLDLAHEVTELWDVDSTIIVPIVVSAHGLIPKSLDQHLQRLSMGRWVMSQIQKAVLLDTARIVRRFLTLGS

SEQ ID NO: 27191 - protein, 1194 aa, Hyles vespertilio
MTTRASRRNAQMRSPSSSSSASWASASDVFEVTPDIDVSSQRDELQSSPPPPRPARRRGRPPPAVGLGPTGPSVPPTVLATGGVVRRMRWTHQMNENVMRAYFRATKGGTNLTAYRAQMLSMFQVLEPTVNVSSQRLSDQVRFIQRRKLLDDEALERLRTEACVALDVITPITQRAAETPSIPAADIELVDNLDNTVSPQDQQRLRRTLESAILEYKSIPASCRPRVPRLPTHRRNLALMGALDSIVSTYMESSRDLVDTHSILYCAAVAACRVANVKFPINNVTTTRDVATVPAWQRRIEDRINRARTLIGKLIAFRNGNNRQRVMRFVAQAFSGTNISPRDYGLWVTERIDYYKQKVYAWANRIRRYRKRWDRFQQNRTFQSDQKRVYRCWERSPQCVVDGRLPSVHDMRTYWTNIWSSSISHTEADWFGVVERAYESIPIMEAISISPEDVLVAIRPTQNWKSPGPDGLHNFWLKWLPCSHARLAAQFQDALDGGSLPTFMTTGVTHLLYKSGSATDPKNYRPITCLPTTYKLFTSILRAKIANHFTSNNILFPGQTGCKSGSRGTKELLLIDMTICQQARQNRRNLSAAWIDYKKAFDSVPHTWLMRVLSLYKIDTNLCTFLGSCMGQWTTVLRYPGGMVSPDCDEPIRIKRGIFQGDSLSPLWFCMALNPLSTLLVDSGLGYRLRRGTEPISHLLYIDDLKLFASKQTELIELLKITEKFSNSINMEFCVDKCAIIHVKRGEVAVSDGVQISDAVRLRALSETETYKYLGMPEALGILSADVKQSVKERFFGRLAKVLNSLLSGGNKIRAFNGWVMPVLMYSFGILRWTQTELDALDRKVRTLLTAHRMHHPRSSVMRLYIPRRCGGRGILNAKDLHNREVCNLRDYFLHSDVDMHRVVVKIDKGLTPLSLANENWRKPLVMSTKDREEVWKSKELHGRFYRALHGPDVDRPASVSWLRFGNLFGETEGFVFAIMDEVIKTNNYRKYILKDGTVDICRACHRPGESIRHVISGCSYLANGEYLHRHNLVAKIIHQQIALRYGLVTLEMPYYQYVPQPVLENGHATLYWDRSIITDRTIVANKPDIVIIDRLAHRAILVDVTIPHDVNLVKAEKDKLSKYLDLAREVTDMWDVDSTVIVPIVVSAHGLMPKSFDQHLQRLSIGRWVKSQIQKAVLLDTARIVRRFLTLDP

SEQ ID NO: 27192 - protein, 1077 aa, Hyles vespertilio
MLSLFQALEPTVDVSSQRLSDQVRFIQRRKLLDDDTLERLRTDLCFVQEDHVSPVSGDQAAGPTPTPVADFELTDNLDDNVSPQDKQQLRGALECAILEFASLSASCRPRLPRLPTHRRNLALMGALDSMLPTYLESSRDLVDTHSILYCAAVAACRVANVKFPKEYRATRGVVTVPAWQRRIEDRINRARTLIGKLISFKEGNSRPKIMRFVTQAFSGTNTSPRNYRLCVTERIDFFKQKVYAWANRIRRYRRRWDRFQQNRKFQTDQKRVYRCWENPPQGVVDGRLPSAHEMREYWTNIWSSPVSHTEASWFSVVDRACEAIPAMETILINPEDVLTAIRQTQNWKSPGPDGLHNFWLKWFPSSHARLAVQFQDALERGSLPAFMTTGVTHLLFKSGCTTEPKNYRPITCLPTIYKVLTSIIRSKITDHINSNQILFSGQTGCMNGSRGTKELLLINMTICQQARHNRRNLSAAWIDYKKAYDSVPHTWLMRVLNLYKINTNLCNFLGSCMGQWTTVLRYPGGTVPPDCDEPIRIKRGIFQGDSLSPLWFCMALNPLSTLLLDSGLGYRLRRGSEPISHLLYMDDLKLFASKQTELIELLKITERFSNSINMDFGVDKCAVIHVKRGEVAVSDDILVSETVRLRSLSVTETYKYLGMPEALGIMGADVKRSLKERFFSRLTKVLNSFLSGGNKIRAFNGWVMPVLIYSFGILKWTQTELDALDRKVRTLLTAHRMHHPRSSVMRLYIPRRCGGRGILNAKDLHNREVCNLRDYFLHSDVDMHRVVVMVDKGFTPLSLAIENWRKPLVVGIKDREDIWKSKELHGRFYRALHGPDVDRLASVSWLRFGNLFGETEGFVFAIMDEVIKTNNYRKYILKDGTVDICRACHRPGESIRHVISGCSYLANGEYLHRHNLVTKIIHQQIALRYGLVTPEVPYYQYVPQPVLENGHATLYWDRSIITDRTILANKPDIVIIDRLARRAILVDVTIPHDDNLVKAEKDKMSKYLDLAHEVTDMWDVDSTIIVPIVVSAHGLIPKSLDQHLQRLSIGVWVRSQIQKAVLLDTARIVRRFLTLGS

SEQ ID NO: 27193 - protein, 1197 aa, Hyles vespertilio
MINNKARKKRNARLTSPSSSSSASWASASDVFEVTSDNDASSQHGELQSSPPPPRPTRRRGRPPPAVGLGPVGPSVPPTVPATGGVVRRMRWTREINENVMRAYFGATKGGINLTAYRAKMLSLFQALEPTVDVSSQRLSDQVRFIQRRKLLDDDTLERLRTDLCFVQDDHVSPVSGDQAAGPTPTPVADFELTDNLDDNVSPQAKQQLRGALECAILEFASLSASCRPRLPRLPTHRRNLALMGALDSMLTTYLESSRDLVDTHSILYCAAVAACRVANIKFPNEYKATRGVVIVPAWQRRIEDRINRARTLIGKLISFKEGNSRPKIMRFVTHAFSGTNTSPRNYRLCVTERIDFFKHKVYAWANRIRRYRRRWDRFQQNCKFQTDQKSVYRCWENPPQGVVDGRLPSAHEMREYWTNIWSSPVSHTEASWFSVVDRACEAIPAMETILISPEDVLTAIRQTQNWKSPGPDGLHNFWLKWFPSSHARLAAQFQNALERGSLPTFMTTGVTHLLFKSGCTTEPKNYRPITCLPTIYKVLTSIIRSKITDHINSNQILFSGQTGCMNGSRGTKELLLINMTICQQARHNRRNLSAAWIDYKKAYDSVPHTWLMRVLNLYKINTNLCNFLGSCMGQWTTVLRYPGGTVPPDCDEPIRIKRGIFQGDSLSPLWFCMALNPLSTLLLDSGLGYRLRRGSEPISHLLYMDDLKLFASKQTELIELLKITERFSNSINMDFGVDKCAVIHVKRGEVAVSDDILVSETVRLRSLSVTETYKYLGMPEALGIMGADVKRSLKERFFSRLTKVLNSFLSGGNKIRAFNGWVMPVLIYSFGILKWTQTELDALDRKVRTLLTAHRMHHPRSSVMRLYIPRRCGGRGILNAKDLHNREVCNLRDYFLQSDVDMHRVVVMVDKGFTPLSLAIENWRKPLVVGIKDREDIWKSKELHGRFYRALHGPDVDRLASVSWLRFGNLFGETEGFVFAIMDEVIKTNNYRKYILKDGTVDICRACHRPGESIRHVISGCSYLANGEYLHRHNLVAKIIHQQIALRYGLVTPEVPYYQYVPQPVLENGHATLYWDRSIITDRTILANKPDIVIIDRLARRAILVDVTIPHDDNLVKAEKDKMSKYLDLAHEVTDMWDVDSTIIVPIVVSVHGLIPKSLDQHLQRLSIGCWVRSQIQKAVLLDTARIVRRFLTLGS

SEQ ID NO: 27194 - protein, 1197 aa, Hyles vespertilio
MFHNKARKKRNAHLTSPSSSSSASWASASDVFEVTPDNDASSQHGELQSSPPPPRPAQRRGRPPPAVGLGPVGPSVPPTVPATGGVVRRMRWTREINENVMRAYFGATNGGINLTAYRVKMLSLFQALEPTVDVSSQRLSDQVRFIQRRKLLDDDTLERLRTDLCFVQEDHVSPVSGDQAAGPTPTPVADFELTDNLDDNVSPQDKQQLRGALECAILEFASLSASCRPRLPRLPTHRRNLALMGALDSMLPTYLESSRDLVDTHSILYCAAVAACRVANVQFPKEYRATRGVVTVPAWQRRIEDRINRVRTLIGKLISFKEGNSRPKIMRFVTQAFSGTNTSPRNYRLCVTERIDFFKQKVYAWANRIRRYRRRWDRFQQNRKFQTDQKRVYRCWENPPQGVVDGRLPSAHEMREYWTNIWSSPVSHTEASWFSVVDRACEAIPAMETILINPEDVLTAIRQTQNWKSPGPDGLHNFWLKWFPSSHARLAVQFQDALERGSLPAFMTTGVTHLLFKSGCTTEPKNYRPITCLPTIYKVLTSIIRSKITDHINSNQILFSGKTGCMNGSRGTKELLLINMTICQQARHNRRNLSAAWIDYKKAYDSVPHTWLMRVLNLYKINTNLCNFLGSCMGQWTTVLRYPGGTVPPDCDEPIRIKRGIFQGDSLSPLWFCMALNPLSTLLLDSGLGYRLRRGSEPISHLLYMDDLKLFASKQTELIELLKITERFSNSINMDFGVDKCAVIHVKRGEVAVSDDILVSETVRLRSLSVTETYKYLGMPEALGIMGADVKRSLKERFFSRLTKVLNSFLSGGNKIRAFNGWVMPVLIYSFGILKWTQTELDALDRKVRTLLTAHRMHHPRSSVMRLYIPRRCGGRGILNAKDLHNREVCNLRDYFLHSDVDMHRVVVMVDKGFTPLSLAIENWRKPLVVGIKDREDIWKSKELHGRFYRALHGPDVDRLASVSWLRFGNLFGETEGFVFAIMDEVIKTNNYRKYILKDGTVDICRACHRPGESIRHVISGCSYLANGEYLHRHNLVTKIIHQQIALRYGLVTPEVPYYQYVPQPVLENGHATLYWDRSIITDRTILANKPDIVIIDRLARRAILVDVTIPHDDNLVKAEKDKMSKYLDLAHEVTDMWDVDSTIIVPIVVSAHGLIPKSLDQHLQRLSIGVWVRSQIQKAVLLDTARIVRRFLTLGS

SEQ ID NO: 27195 - protein, 1190 aa, Hyles vespertilio
MINNKARKKRNAHLTSPSSSSSASWASASDVFEVTSDNDASSQHGELQSSPPPPRPARRRGRPPPAVGLGPVGPSVPPTVPATGGLVRRMRWTREINENVMRAYFGATKGGINLTAYRAKMLSLFQALEPTVDVSSQRLSDQVRFIQRRKLLDDDTLERLRTDLCFVQDDHVSPVSGDQAAGPTPTPVADFELTDNLDDNVSPQAKQQLRGALECAILEFASLSASCRPRLPRLPTHRRNLALMGALDSMLTTYLESSRDLVDTHSILYCAAVAACRVANIKFPNEYKATRGVVIVPAWQRSIEDRINRARTLIGKLISFKEGNSRPKIMRFVTQAFSGTNTSPRNYRLCVTERIDFFKQKVYAWANRIRRYRRMMKFQTDQKSVYRCWENPPQGVVDGRLPSAHEMREYWTNIWSSPVSHTEASWFSVVDRACEAIPAMETILISPEDVLTAIRQTQNWKSPGPDGLHNFWLKWFPSSHARLAAQFQNALERGSLPTFMTTGVTHLLFKSGCTTEPKNYRPITCLPTIYKVLTSIIRSKITDHINSNQILFSGQTGCMNGSRGTKELLLINMTICQQARHNRRNLSAAWIDYKKAYDSVPHTWLMRVLNLYKINTNLCNFLGSCMGQWTTVLRYPGGTGPPDCDEPIRIKRGIFQGDSLSPLWFCMALNPLSTLLLDSGLGYRLRRGSEPISHLLYMDDLKLFASKQTELIELLKITERFSNSINMDFGVDKCAVIHVKRGEVAVSDDILVSETVRLRSLSVTETYKYLGMPEALGIMGADVKRSLKERFFSRLTKVLNSFLSGGNKIRAFNGWVMPVLIYSFGILKWTQTELDALDRKVRTLLTAHRMHHPRSSVMRLYIPRRCGGRGILNAKDLHNREVCNLRDYFLHSDVDMHRVVVMVDKGFTPLSLAIENWRKPLVVGIKDCEDIWKSKELHGRFYRALHGPDVDRLASVSWLRFGNLFGETEGFVFAIMDEVIKTNNYRKYILKDGTVDICRACHRPGESIRHVISGCSYLANGEYLHRHNLVAKIIHQQIALRYGLVTPEVPYYQYVPQPVLENGHATLYWDRSIITDRTILANKPDIVIIDRLARWAILVDVTIPHDDNLVKAEKDKMSKYLDLAHEVTDMWDVDSTIIVPIVVSAHGLIPKSLDQHLQRLSIGCWVRSQIQKAVLLDTARIVRRFLTLGS

SEQ ID NO: 27196 - protein, 985 aa, Eilema sororculum
MESRMRINILRHFFCKYIHRIYNTRTLTLFFVNTYIHILIIIIRGRPPTCLGPRRPPASNRAPAAGGNVHRMRWTNSINENVMRAYFAATEGGTNLSAYRSRMLPLCFRSGNTRPRVMRYVTRAFAGTNISPQDYTSRVTERIDFLKQKVCAWANRIRRYKKRVDRYTVNRMFQRDQRWVYRSWERTDESVDDLRRPDAEATNTFWRSIWSVPVSHTEGDWMREVERACEPIPEMEEIYIDATDVDCAVRSLSNWKSPGPDGLHNFWLKWLRSSHVVLASQFQSAIESGTLPAFMTTGVTHLLHKTGSTLEPNNYRPITCLPTVYKLLTSILRAKINNHINNNSIMCTSQNGCRNGARGTKELLLIDMTISQQARRNRKDLVACWIDYKKAFDSVPHTWLLRVLELYKVNTTLCTFLRSCMGQWRTVLLYPGCRQALGSGEPITIERGIFQGDSLSPLWFCLALNPLSTLLVNSGLGYRLRREGQMVSHLFYMDDLKLFAHTNPQLIALLKVTETFSNSIKMAFGVDKCAVIHVKRGRVVESEGIQLSDSTNLRSLLVTETYKYLGMSQTLCINEVNMKQMLQERFFGRLKKVLNSLLSGGNKVRACNSWVMPLLMYSFGILKWTQTELDTIDRKVRTQLTALRMHHPRSSVMRLYIPRKCGGRGFLNAKTLHNREVCNLRDYFLKSNVDMHRDVVNVDTGLTPLGLAKENWRRPTIVGTDSRREVWQSKELHGRFYRALHRPEVDLLASVSWLRFSDLFGETEGFVCAIADEVIKTNNYRKYIMRDGTIDICRACHQPGESLRHITSGCSRLANGEYLHRHNQVARIIHQRLALKYNLVEVEVPYYRYVPEPVLENSHITLYWDRSIITDRTVVANKPDIVVIDRSERRALIVDVTIPHDENLVKAEKDKQVKYLDLAHEVVDMWNVDSAIIVPIVVSVNGLIAKSLDQHLKRLGLDGWVKGQMQKAVLLDTARIVRKFLSLQP

SEQ ID NO: 27197 - protein, 1111 aa, Dendrolimus punctatus
MRWTQELNECVMRAYYEATEGGTNLTSYRGRLLSLFQTLQPASAVTAQRLSDQVRAIQRLHLLDESTLDRLRNAVRINRESTDTPQPTSPAMPADSQGTVNFTIDDVSDSIAVGNVSIQINEQLRRTLEHSIQEFRDQPILNRPRVPKLPLHRNNLLLMGALDCLLAPYFGSSANLVDTHSILYCGAVAVCRVAGVKFPNTQPTRPASGKPAWQIRIERRIDRARVLIAKLICFRAGNCRPRVVRFVAQAFTGTNVSPSEYMARATERIDFWKQKVYAWANRIRRYKERADRYFLNRTFQSEEKRVYRGWEKSRDSVADRQTPNIDAMASFWRSIWSMPVSHTEGDWIELVKQSCDQVPDMEPITIEPLDVGNAIRSAHNWKSPGPDGLHNFWIKWFKSSHSCLANQFQEAVDRGSLPTFMTTGVTHLLFKSGCTTEPKNYRPITCLPTIYKLLTSILGKKLSNYFYNNNILAITQNGCKAGSRGTKELLLIDTTVSQQARRNRRNLSVAWIDYKKAYDSVPHTWLMRVLELYKVDATLRTFLQACMRQWVTHLKLPGGRGPSLPEGAINIERGIFQGDSLSPLWFCLALNPLSTLLESSKLGYRFRRGGEIMSHLLYMDDLKLFASNEPDLIELLKTTERFSKSINMEFGIEKCAVMHVRRGKVLNSPNLQLSENMSLKSLSETETYKYLGMSESLGIADADVKQTVKDRFFCRLRKVLTSLLSGGNKVRAFNSWVMPVLAYSFGVLRWTQTELDALDRRVRCLLTKYRMHHPRSSVMRLYISRRCGGRGFLNAKDLHNREVNNLRTYFLKMDVGLHKDVVAVDKGLTTLSLANENWCNLAVLSASDRINVWKSKALHGRFYRALTGPDIDLSASVNWLRFGNLFGETEGFVFAIMDEVIKTNNYRKYILKDGTLDICRACHRPGESLRHIVSGCSHLSNGEYLHRHNLVARIIHQQLALRYGLVETEVPYYQYSPEPVLENSRATLYWDRSIITDRNIVANKPDIVIIDRSARRAILVDISIPHDDNLVKKEKEKLSKYLDLAHEVTAMWRLESTSIVPIVVTVNGLIAKSLDRHLERLSLGSWVKGQIQKAALLDTARIVRRFLSLEP

SEQ ID NO: 27198 - protein, 1194 aa, Hemaris fuciformis
MNKNAKKTHARKTSPSSSSSSASWASASEIFEPSPGNDASSQIDGLQSSPPPLRPARRGGRRPPPACLGPVGPRVLPTAPATGGVVRRMRWTTSINENVMRAYFGATEGGTKLTAYRSKMLALFQALEPTIDVSAQRLSDQVRYIQRRKALGDEVLDRLRADLRVVQENFDPAPSQQIVDPSPPPDTSCDINNLDNTVSSDDNQRLRRALEDAISEFAPVPASSRPCLPRLPTHRRNLALMGTLDSILPSYLESSRDLIDTHSMLYCAAVAACRVANVKFLNQVRTTPKVVTVPAWQRRIEHRIDWARTLSSKLICFKEGNNRPKIMRFVTQAFSGTNIQPGDYRLCVTERIDFFKQKLYAWANRIRRYKKRSDRFRINRAFQSDQKRVYRCWEHSQQSVEDGRLPSASNMHTYWKSIWSSSVSHTEGSWISVVNQACKDISTMETILISPNDVSVAIRSTQNWKSPGADGLQNFWLKWFPSVHALLAAQFQEAINIGSLPTFMTTGITHLLYKSGTTTDPKNYRPITCLPTIYKLLTSIIRNKISIHIKNNSILFSGQTGCKLGSRGTKELLLIDMTICQQARQNRKNLSVAWIDYKKAYDSVPHTWLKRVFNLYKLDTTLCNFLEACMGQWTTVLKYPGTTCSSDCLEPIRIERGIFQGDSLSPLWFCLALNPLSTLLLDSRLGYCLRRGTEPISHLLYMDDLKLFASKSTELIELLKITQRFSNSINMEFGVDKCAVMHVKRGEIVVSDDIQVSETVRLRSLSEAETYKYLGMSESLGILSSDVKLSLKERFFSRLRKVLNSLLSGGNKIRAFNGWVMPVLMYSFGVLKWTQTELDALDRKIRTLLTAHRMHHPRSSVMRLYIPRRCGGRGLLNAKDLHNREICNLRDYFLHSDESMHGVVVMTDKGFTPLSLANENWRRPMVLSVSERREIWKSKELHGRFFRALNGSDVDQLASVTWLRFGNLFGETEGFVFAIMDEVIKTNNYRKYIMKDGTVDICRACHRPGESIRHVISGCSYLANGEYLHRHNLVAKIIHQQLALRYHLVTDEVPYYQYVPHPVLENSHATLYWDRSVITDRTIVANKPDIVIVDRLARRAMLVDVTIPHDDNLVKAEKDKMSKYLDLAHEVTDMWDVDSTVIVPIVVTANGLIPKSLDQHLRRLSIGCWVKTQIQKAVLLDTARIVRRFLTLEP

SEQ ID NO: 27199 - protein, 1171 aa, Hyles vespertilio
MFHNKARKKRNAHLTSPSSSSSASWASASDVFEVTPDNDASSQHGELQSSPPPPRPAQRRGRPPPAVGLGPVGPSVPPTVPATGGVVRRMRWTREINENVMRAYFGATNGGINLTAYRVKMLSLFQALEPTVDVSSQRLSDQVRFIQRRKLLDDDTLERLRTDLCFVQEDHVSPVSGDQAAGPTPTPVADFELTDNLDDNVSPQDKQQLRGALECAILEFASLSASCRPRLPRLPTHRRNLALMGALDSMLPTYLESSRDLVDTHSILYCAAVAACRVANVQFPKEYRATRGVVTVPAWQRRIEDRINRARTLIGKLISFKEGNSRPKIMRFVTQAFSGTNTSPRNYRLCVTERIDFFKQKVYARANRIRRYRRRWDRFQQNRKFQTDQKRVYRCWENPPQGVVDGRLPSAHEMREYWTNIWSSPVSHTEASWFSVVDRACEAIPAMETILINPEDVLTAIRQTQNWKSPGPDGLHNFWLKWFPSSHARLAVQFQDALERGSLPAFMTTGVTHLLFKSGCTTEPKNYRPITCLPTIYKVLTSIIRSKITDHINSNQILFSGQTGCMNGSRGTKELLLINMTICQQARHNRRNLSAAWIDYKKAYDSVPHTWLMRVLNLYKINTNLCNFLGSCMGQWTTVLRYPGGTVPPDCDEPIRIKRGIFQGDSLSPLWFCMALNPLSTLLLDSGLGYRLRRGSEPISHLLYMDDLKLFASKQTELIELLKITDIFSKSINMDFGVDKCAVIHVKRGEVAVSDDILVSETVRLRSLSVTETYKYLGMPEALGIMGADVKRSLKERFFSRLTKVLNSFLSGGNKIRAFNGWVMPVLMYSFGILKWTQTELDALDRKVRTLLTAHRMHHPRSSVMRLYIPRRCGGRGILNAKDLHNREVCNLRDYFLHSDVDMHRVVVMVDKGFTPLYLAIENWRKPLVVGIKDREDIWKSKELHGRFYRALHGPDVDRLASVSWLRFGNLFGETEGFVFAIMDEVIKTNNYRKYILKDGTVDICRACHRPGESIRHVISSCSYLANGLYLHRHNLVAKIIHQQIALRYGLVTPEVPYYQYVPQPVLENGHATLYWDRSIITDRTIPANKPDIVIIDRLARRAILVDVTIPHDDNLVKAEKDKMSKYLDLAHEVADMWDVDSTIIVPIVVSAHGLIPKSLDQHLQRLSIGC

SEQ ID NO: 27200 - protein, 1197 aa, Hyles vespertilio
MINNKARKKRNARLTSPSSSSSASWASASDVFEVTSDNDASSQHGELQSSPPPPRPARRRGRPPPAVGLGPVGPSVPPTVPATGGVVRRMRWTREINENVMRAYFGATKGGINLTAYRAKMLSLFQALEPTVDVSSQRLSDQVRFIQRRKLLDDDTLERLRTDLCFVQDDHVSPVSGDQAAGPTPTPVADFELTDNLDDNVSPQAKQQLRGALECAILEFASLSASCRPRLPRLPTHRRNLALMGALDSMLTTYLESSRDLVDTHSILYCAAVAACRVANIKFPNEYKATRGVVIVPAWQRRIEDRINRARTLIGKLISFKEGNSRPKIMRFVTHAFSGTNTSPRNYRLCVTERIDFFKQKVYAWANHIRRYRRRWDRFQQNRKFQTDQKSVYRCWENPPQGVVDGRLPSAHEMREYWTNIWSSPVSHTEASWFSVVDRACEAIPAMETILISPEDVLTAIRQTQNWKSPGPDGLHNFWLKWFPSSHARLAAQFQNALERGSLPTFMTTGVTHLLFKSGCTTEPKNYRPITCLPTIYKVLTSIIRSKITDHINSNQILFSGQTGCMNGSRGTKELLLINMTICQQAHHNRRNLSAAWIDYKKAYDSVPHTWLMRVLNLYKINTNLCNFLGSCMGQWTTVLRYPGGTVPPDCDEPIRIKRGIFQGDSLSPLWFCMALNPLSTLLLDSGLGYRLRRGSEPISHLLYMDDLKLFASKQTELIELLKITERLSNSINMDFGVDKCAVIHVKRGEVAVSDDILVSETVRLRSLSVTETYKYLGMPEALGIMGADVKRSLKERFFSRLTKVLNSFLSGGNKIRAFNGWVMPVLIYSFGILKWTQTELDALDRKVRTLLTAHRMHHPRSSVMRLYIPRRCGGRGILNAKDLHNREVCNLRDYFLHSDVDMHRVVVMVDKGFTPLSLAIENWRKPLVVGIKDREDIWKSKELHGRFYRALHGPDVDRLASVSWLRFGNLFGETEGFVFAIMDEVIKTNNYRKYILKDGTVDICRACHRPGESIRHVISGCSYLANGEYLHRHNLVAKIIHQQIALRYGLVTPEVPYYQYVPQPVLENGHATLYWDRSIITDRTILANKPDIVIIDRLARRAILVDVTIPHDDNLVKAEKDKMSKYLDLAHEVTDMWDVDSTIIVPIVVSAHGLIPKSLDQHLQRLSIGCWVRSQIQKAVLLDTARIVRRFLTLGS

SEQ ID NO: 27201 - protein, 1197 aa, Hyles vespertilio
MIKRKARTTQNARIRSPSSSSSASWASASDVFEVTPDNDALSQRDELQSSPPPPRPARRRGRPPPAVGLGPVGPSVPPTVPATGGVVRRMRWTCEINENVMRAYFGATKGGINLTAYRAKMLSLFQALEPTIDVSSQRLSDQVRFIQRRKLLDDDTLERLRTDLCVVQDDNVSPVSGDQAVGPTPTPVADFELTDNLDDNVSPQDKQHLRGALVRAISDFVSVSASCRPRLLRLPTHRRNLALMGALDSMLPTYLESSRDLVDTHSILYCAAVAACRVANVQFPKEHRATRGVAAVPAWQLRIEDRVNRARTLIGKLISFSEGNSRPRIMRFVTQAFSGTNISPQNYRLCVTERIDFYKQKVYAWANRIRRYRRRWDRFQQNRMFQSDQKRVYRCWEDSSQGVVDGRLPGAHEMREYWTNIWSSPVSHTEASWFSVVDRACESIPAMETILISSEDVQTAIRRTQNWKSPGPDGLHNFWLKWFPSSHARLAAQFQDALEAGSLPAFMTKGVTHLLFKSGCTTEPKNYRPITCLPTIYKILTSIIRSKITDHITSNQILFPGQTGCMNGSRGTKELLLINMTICQQARHNRRNLSAAWIDYKKAYDSVPHTWLMRVLNLYKINTNLCNFLGSCMGQWTTVLRYPGGTAPPDCDEPIRIKRGIFQGDSLSPLWFCMALNPLSTLLLDSGLGYRLRRGSEPISHLLYMDDLKLFASKQTELVELLKITERFSNSINMEFGVDKCAVIHVKRGEVAVSDDIQVSETVRLRPLSVTETYKYLGMPEALGIMGANVKQSLKERFFSRLTKVLNSFLSGGNKIRAFNGWVMPVLMYSFGILKWTQTELDALDRKVRTLLTAHRMHHPRSSVMRLYIPRRCGGRGILNAKDLHNREVCNLRDYFLHSDVDMHGVVVMVDKGFTPLSLAIENWRKPLVVGTKDREDIWKSKELHGRFYRALHGPDVDRLASVSWLRFGNLFGETEGFVFAIMDEVIKTNNYRKYILKDGTIDICRACHRPGESIRHVISGCSYLANGEYLHRHNLVAKIIHQQIALRYGLVTPEVPYYQYVPQPVLENGHATLYWDRSIITDRTILANKPDIVIIDRLARRAILVDVTIPHDDNLVKAEKDKMSKYLDLAHEVTDMWDVDSTIIVPIVVSAHGLIPKSLDQHLQRLSIGVWVRSQIQKAVLLDTARIVRRFLTLGS

SEQ ID NO: 27202 - protein, 1111 aa, Dendrolimus kikuchii
MRWTQELNECVMRAYYEATEGETNLTSYRGRLLSLFQTLQPASTVTAQRLSDQVRAIQRLHLLDESTLDRLRNAVRINREVTDTPQPTSPAPPADSQRPVNFTMDDVSDGLAVGDVSIQINEQLRRTLEHSIQEFRDQPILNRPRVPKLPMHRNNLLLMGTLDCLLAPYFRSSTDLADTHSILYCGAVAVCRVAGVKFPNTQPTRPASGKPAWQIRIERRIDRARVLIAKLICFRAGNCRPRVMRFVAQAFAGTNISPSEHMARATERIDFWKQKVYAWANRIRRYKERADRYFLNRTFQSEEKRVYRGWEKSSDSVADRQIPNTDAMASFWRSIWSVPVSHTEGDWIEVIKQSCEQVPDMEPITIEPLDVGNAIRSAHNWKSPGPDGLHNFWIKWFKSSHGCLANQFQEAVDRGSLPTFMTTGVTHLLFKSGCTTEPKNYRPITCLPTIYKLLTSILEKKLSNYFYNNNILAITQNGCKAGSRGTKELLLIDTTVSQQARRNRRNLSVAWIDYKKAYDSVPHTWLMRVLELYKVDATLRTFLQACMRQWVTYLRVPGGGGVPLPEGEINIERGIFQGDSLSPLWFCLALNPLSTLLESSKLGYRFRRGGEIVSHLLYMDDLKLFASNEPDLIELLKTTEHFSKSINMEFGIEKCAVMHVRRGKVVNSPNLQLSENMYLKSLSETETYKYLGMSESLGIADADVKQTVKDRFFCRLRKVLTSLLSGGNKVRAFNSWVMPVLAYSFGILRWTQTELDALDRRVRCLLTKHRMHHPRSSVMRLYISRRCGGRGFLNAKDLHNREVNNLRAYFLKMNVGLHKDVVAVDKGLTTLALAKENWCNLAVLSTSDRINVWKSKELHGRFYRALTGPDVDLSASVNWLRFGNLFGETEGFVFAIMDEVIKTNNYRKYILKDGTLDICRACHRPGESLRHIVSGCSHLSNGEYLHRHNLVARIIHQQLALRYGLVETEVPYYQYSPEPVLENSRATLYWDRSVITDRTIVANKPDIVIIDRSARRAILVDISIPHDDNLVKKEKEKLSKYLDLAHEVTAMWRLESTSIVPIVVTVNGLIAKSLDRHLERLSLGSWVKGQIQKAALLDTARIVRRFLSLEP

SEQ ID NO: 27203 - protein, 1196 aa, Deilephila porcellus
MIRKTTRQRNARKTSPSSSSSASWASASDVFEVTPDIDASSQRDELQSSPPPPRPARRRGRPPPVVGLGPVGPSVPPTVPATGGVVRRMRWTHQINENVMRAYFGATRGGTHLTAYRAKMLSLFQALEPTVEVSSQRLSDQVRFIQRRKLLDDQALERLRTDLRVVQDNNVQPVNGDQAADPTPIPIAVIEVTDNLDDNVSPQDEQRLRGALERAISEFMPLSTSCRPRLPRLPTHRRNLALMGAMDSMLPIYLESSRDLVDTHSILYCAAVAACRVANVNFPNERRATRGVAAVPAWQRRIEERINRARTLIGKLISFKEGNSRPKIMRFVAQAFSGTNTSPRNYRLCVTERIDFYKQKVYAWANRIRRYRRRWDRFQQNRMFQSDQKRVYRCWENSPQSVVDGRLPSAHEMREYWTNIWSSPVSHTEAPWFSVVDRACKVIPAMEAILISPEDVLTAIRPTQNWKSPGPDGLHNFWLKWFPSSHARLATQFQDALEGGSLPTFMTTGVTHLLFKSGSTTEPKNYRPITCLPTIYKVLSSIIRSKIQYHITTNQILYSGQTGCKSGSRGTKELLLIDMAICQQARQNRRNLSAAWIDYKKAYDSVPHTWLMRVLNLYKVDTKLSTFLGACMGQWTTVLKYPGATNPSVNDEPIKIKRGIFQGDSLSPLWFCMALNPLSTLLLDSGLGYRLRRGSEPISHLLYMDDLKLFTSKQSELIELLKIAERFSNSINMEFGVDKCAVIHVKRGVVAVSDDIRVSETVRLRSLSPTETYKYLGMPEALGIMGADVKQSIRERFFSRLTKVLNSFLSGGNKIRAFNGWVMPVLTYSFGILRWTQTELDALDRKVRTLMTAHRMHHPRSSVMRLYIPRRCGGRGILNAKDLHNREVCNLRDYFLHSDVDMHGIVAMVDKGLTPLSLANENWRKPLVVSIRDRLDIWKSKELHGRFYRALHGPDVDRLASVSWLRFGNLFGETEGFVFAIMDEVIKTNNYKKYILKDGTVDICRACHRPGESIRHVISGCSYLANGEYLHRHNLVAKIIHQQIALRYGLVTPEVPYYQYVPQPVLENGHATLYWDRSVITDRTIVANKPDIVIIDRLARRAILVDVTIPHDDNLVKAEKDKMSKYLDLAHEVTDMWNVDSTIIVPIVVSAHGLIPKSLDQHLQRLSIGCWAKSQIQKAVLLDTARIVRKFVTLGS

SEQ ID NO: 27204 - protein, 1197 aa, Hyles vespertilio
MFHNKARKKRNAHLTSPSSSSSASWASASDVFEVTPDNDASSQHGELQSSPPPPRPAQRRGRPPPAVGLGPVGPSVPPTVPATGGVVRRMRWTREINENVMRAYFGATNGGINLTAYRVKMLSLFQALEPTVDVSSQRLSDQVRFIQRRKLLDDDTLERLRTVLCFVQEDHVSPVSGDQAAGPTPTPVADFELTDNLDDNVSPQDKQQLRGALECAILEFASLSASCRPRLPRLPTHRRNLALMGALDSMLPTYLESSRDLVDTHSILYCAAVAACRVANVQFPKEYRATRGVVTVPAWQRRIEDRINRARTLIGKLISFKEGNSRPKIMRFVTQAFSGTNTSPRNYRLCVTERIDFFKQKVYAWANRIRRYRRRWDRFQQNRKFQTDQKRVYRCWENPPQGVVDGRLPSAHEMREYWTNIWSSPVSHTEASWFSVVDRACEAIPAMETILINPEDVLTAIRQTQNWKSPGPDGLHNFWLKWFPSSHARLAVQFQDALERGSLPAFMTTGVTHLLFKSGCTTEPKNYRPITCLPTIYKVLTSIIRSKITDHINSNQILFSGQTGCMNGSRGTKELLLINMTICQQARHNRRNLSAAWIDYKKAYDSVPHTWLMRVLNLYKINTNLCNFLGSCMGQWTTVLRYPGGTVPPDCDEPIRIKRGIFQGDSLSPLWFCMALNPLSTLLLDSGLGYRLRRGSEPISHLLYMDDLKLFASKQTELIELLKITERFSNSINMDFGVDKCAVIHVKRGEVAVSDDILVSETVRLRSLSVTETYKYLGMPEALGIMGADVKRSLKERFFSRLTKVLNSFLSGGNKIRAFNGWVMPVLIYSFGILKWTQTELDALDRKVRTLLTAHRMHHPRSSVMRLYIPRRCGGRGILNAKDLHNREVCNLRDYFLHSDVDMHRVVVMVDKGFTPLSLAIENWRKPLVVGIKDREDIWKSKELHGRFYRALHGPDVDRLASVSWLRFGNLFGETEGFVFAIMDEVIKTNNYRKYILKDGTVDICRACHRPGESIRHVISGCSYLANGEYLHRHNLVTKIIHQQIALRYGLVTPEVPYYQYVPQPVLENGHATLYWDRSIITDRTILANKPDIVIIDRLARRAILVDVTIPHDDNLVKAEKDKMSKYLDLAHEVTDMWDVDSTIIVPIVVSAHGLIPKSFDQHLQRLSIGVWVRSQIQKAVLLDTARIVRRFLTLGS

SEQ ID NO: 27205 - protein, 1197 aa, Hyles vespertilio
MFHNKARKKRNAHLTSPSSSSSASWASASDVFEVTSDNDASSQHGELQSSPPPPRPAQRRGRPPPAVGLGPVGPSVPPTVPATGGVVRRMRWTREINENVMRAYFGATNGGINLTAYRVKMLSLFQALEPTVDVSSQRLSDQVRFIQRRKLLDDDTLERLRTDLCFVQEDHVSPVSGDQAAGPTPTPVADFELTDNLDDNVSPQDKQQLRGALECAILEFASLSASCRPRLPRLPTHRRNLALMGALDSMLPTYLESSRDLVDTHSILYCAAVATCRVANVQFPKEYRATRGVVTVPAWQRRIEDRINRARTLIGKLISFKEGNSRPKIMRFVTQAFSGTNTSPRNYRLCVTERIDFFKQKVYAWANRIRRYRRRWDRFQQNRKFQTDQKRVYRCWENPPQGVVDGRLPSAHEMREYWTNIWSSPVSHTEASWLSVVDRACEAIPAMETILINPEDVLTAIRQTQNWKSPGPDGLHNFWLKWFPSSHARLAVQFQDALERGSLPAFMTTGVTHLLFKSGCTTEPKNYRPITCLPTIYKVLTSIIRSKITDHINSNQILFSGQTGCMNGSRGTKELLLINMTICQQARHNRRNLSAAWIDYKKAYDSVPHTWLMRVLNLYKINTNLCNFLGSCMRQWTTVLRYPGGTVPPDCDEPIRIKRGIFQGDSLSPLWFCMALNPLSTLLLDSGLGYRLRRGSEPISHLLYMDDLKLFASKQTELIELLKITERFSNSINMDFGVDKCAVIHVKRGEVAVSDDILVSETVRLRSLSVTETYKYLGMPEALGIMGADVKRSLKERFFSRLTKVLNSFLSGGNKIRAFNGWVMPVLIYSFGILKWTQTELDALDRKVRTLLTAHRMHHPRSSVMRLYIPRRCGGRGILNAKDLHNREVCNLRDYFLHSDVDMHRVVVMVDKGFTPLSLAIENWRKPLVVGIKDREDIWKSKELHGRFYRALHGPDVDRLASVSWLRFGNLFGETEGFVFAIMDEVIKTNNYRKYILKDGTVDICRACHRPGESIRHVISGCSYLANGEYLHRHNLVTKIIHQQIALRYGLVTPEVPYYQYVPQPVLENGHATLYWDRSIITDRTILANKPDIVIIDRLARRAILVDVTIPHDDNLVKAEKDKMSKYLDLAHEVTDMWDVDSTIIVPIVVSAHGLIPKSLDQHLQRLSIGVWVRSQIQKAVLLDTARIVRRFLTLGS

SEQ ID NO: 27206 - protein, 1197 aa, Hyles vespertilio
MIKRKARTTQNARIRSPSSSSSASWASASDVFEVTPDNDALSQRDELQSSPPPPRPARRRGRPPPAVGLGPVGPSVPPTVPATGGVVRRMRWTCEINENVMRAYFGATKGGINLTAYRAKMLSLFQALEPTIDVSSQRLSDQVRFIQRRKLLDDDTLERLRTDLCVVQDDNVSPVSGDQAVGPTPTPVADFELTDNLDDNVSPQDKQHLRGALVRAISDFVSVSASCRPRLLRLPTHRRNLALMGALDSMLPTYLESSRDLVDTHSILYCAAVAACRVANVQFPKEHRATRGVAAVPAWQLRIEDRVNRARTLIGKLISFSEGNSRPRIMRFVTQAFSGTNISPQNYRLCVTERIDFYKQKVYAWANRIRRYRRRWDRFQQNRMFQSDQKRVYRCWEDSSQGVVDGRLPGAHEMREYWTNIWSSPVSHTEASWFSVVDRACESIPAMETILISSEDVQTAIRRTQNWKSPGPDGLHNFWLKWFPSSHARLAAQFQDALEAGSLPAFMTKGVTHLLFKSGCTTEPKNYRPITCLPTIYKILTSIIRSKITDHITSNQILFPGQTGCMNGSRGTKELLLINMTICQQARHNRRNLSAAWIDYKKAYDSVPHTWLMRVLNLYKINTNLCNFLGSCMGQWTTVLRYPGGTAPPDCDEPIRIKRGIFQGDSLSPLWFCMALNPLSTLLLDSGLGYRLRRGSEPISHLLYMDDLKLFASKQTELVELLKITERFSNSINMEFGVDKCAVIHVKRGEVAVSDDIQVSETVRLRPLSVTETYKYLGMPEALGIMGANVKQSLKERFFSRLTKVLNSFLSGGNKIRAFNGWVMPVLMYSFGILKWTQTELDALDRKVRTLLTAHRMHHPRSSVMRLYIPRRCGGRGILNAKDLHNREVCNLRDYFLHSDVDMHGVVVMVDKGFTPLSLAIENWRKPLVVGTKDREDIWKSKELHGRFYRALHGPDVDRLASVSWLRFGNLFGETEGFVFAIMDEVIKTNNYRKYILKDGTVDICRACHRPGESIRHVISGCSYLANGEYLHRHNLVAKIIHQQIALRNGLVTPEVPYYQYVPQPVLENGHATLYWDRSIITDRTILANKPDIVIIDRLARRAILVDVTIPHDDNLVKAEKDKMSKYLDLAHEVTDMWDVDSTIIVPIVVSAHGLIPKSLDQHLQRLSIGVWVRSQIQKAVLLDTARIVRRFLTLGS

SEQ ID NO: 27207 - protein, 1045 aa, Eilema sororculum
MLNETVLETLRLECLRNICVTPAPAPAPASTAGINDVTYVAPDDTPIPVSIQYNEEIKEALECALREYRSMPVHVRPRLPRLPIHRRNIALVSALDSLLPRYLENSENLGDTHSILYCTAVAACRIAGAKFPIKHPAIRPKPVIPAWQCRIERRVAEARVLIGKLICFRSGNTRPRVMRYVTRAFAGTDISPQDYTSRVTERIDFLKQKVYAWANRIRRYKKRVDRYTINCMFQRDQRWVYRSWERTEESVDDVRRPDAEATNAFWRSIWSVPVSHTEGDWMREVERACETIPEMEDINIDAIDVDCAVRSLSNWKSPGPDGLHNFWLKWLRSSHVVLASQFQSAIESGTLPAFMTTGVTHLLHKTGSTLEPNNYRPITCLPTVYKLLTSILRAKINNHINNNSIMCASQNGCRNGARGTKELLLIDMTISQQARRNRKDLAACWIDYKKAFDSVPHTWLLRVLELYKVNTTLCTFLRSCMGQWRTVLFYPGCRQALGSGVPITIERGIFQGDSLSPLWFCLALNPLSTLLVNSGLGYRLRREGQMVSHLFYMDDLKLFAHTNPQLIALLKITETFSNSIKMAFGVDKCAVIHVKRGRVVESEGIQLSDSTNLRSLLVTETYKYLGMSQALCINEAGMKQMLQDRFFGRLKKVLNSLLSGGNKVRACNSWVMPLLMYSFGILKWTQTELDTIDRKVRAQLTAFRMHHPRSSVMRLYIPRKCGGRGFLNAKTLHNREVCNLRDYFLKSNVDMHRDVVNVDTGLTPLGLAKENWRRPTIVGTDSRREVWQSKELHGRFYRALHRPEVDLLASVSWLRFSDLFGETEGFVCAIADEVIKTNNYRKYIMRDGTIDICRACHQPGESLRHITSGCSRLANGEYLHRHNQVARIIHQRLALKYNLVEVEVPYYRYVPEPVLENSHITLYWDRSIITDRTVVANKPDIVVIDRSERRALIVDVTIPHDENLVKAEKDKQVKYLDLAHEIVDMWNVDSAIIVPIVVSVNGLIAKSLDQHLKRLGLDGWVKGQMQKAVLLDTARIVRKFLSLEP

SEQ ID NO: 27208 - protein, 1192 aa, Eilema sororculum
MLTRAQAKRNRSAPITSPDSSLSSAAQPPAVEPAASSSSSSDEFFSPPTSPTPVRRPGRGRPPTCLGPRRPPASNGATATGGYVHRMRWTNSINENVMRAYFAATEGGTNLSAYRTRMLPLFQALEPSINVSAQRLSDQVRVIQRNRMLNETVLETLRLECLRNICVTPAPVPVPASTVELNDDTCVAPDDTPIPVSIQYNEEIKEALECALREYRSMPVHVRPRLPRLPIHRRNIALVSALDSLLPRYLENSENLGDTHSILYCTAVAACRMAGAKFPIKDPAIRPKSAIPAWQCRIERRVAEARVLIGKLICFRSGNTRPRVMRYVTRAFAGTDISPQDYTSRVTERIDFLKQKVYAWANRIRRYKKRVDRYTVNRMFQRDQRWVYRSWERTEESVDDVRRPDAEVTNAFWRSIWSVPVSHTEGDWMHEVERACETIPEMEEINIDAIDVDCAVRSLSNWKSPGPDGLHNFWLKWLRSSHVVLASQFQSAVESGTLPAFMTTGVTHLLHKTGSTLEPNNYRPITCLPTVYKLLTSILRAKINNHINNNYIMCASQNGCRNGARGTKELLLIDMAISQQARRNRKDLTACWIDYKKAFDSVPHTWLLRVLELYKVNTTLCTFLRSCMGQWRTVLFYPGCRQALDGGVPITIERGIFQGDSLSPLWFCLALNPLSTLLVNSGLGYRLRREGQMVSHLFYMDDLKLFAHTNPQLIALLKITETFSNSIKMAFGVDKCAVIHVKRGRVVESEGIQLSDSTNLRSLLVTETYKYLGMSQALCINEVDVKQMLQERFFGRLKKVLNSLLSGGNKVRACNSWVIPLLMYSFGILKWTQTELDTIDRKVRTQLTAFRMHHPRSSVMRLYIPRKCGGRGFLNAKTLHNREVCNLRDYFLKSNVDMHRDVVNVDTGLTPLGLAKENWRRPTIVSTDSRREVWQSKELHGRFYRALHRPEVDLLASVSWLRFSDLFGETEGFVCAIADEVIKTNNYRKYIMRDGTIDICRACHQPGESLRHITSGCSRLANGEYLHRHNQVARIIHQRLALKYNLVEFEVPYYRYVPEPVLENTHITLYWDRSIITDRTVVANKPDIVVIDRSERRALIVDVTIPHDENLVKAEKDKQVKYLDLAHEVVDMWNVDSAIIVPIVVSVNGLIAKSLDQHLKRLGLNGWVKGQMQKAVLLDTARIVRKFLSLEP

SEQ ID NO: 27209 - protein, 1193 aa, Laothoe populi
MTTRNRVRCARLPSPSSSSSSASWASASEAPEPLPVTDASSQRDGLQSSPPTLTPARRRGRQHPPSVGLGPVGPCAPPMAPAAGGVVRRMRWTHSINENVMRAYFGATEGGTKLTAYRPKMLALFQDLEPTIDVSAQRLSDQVRYIQRRKLLDDAALDRLRANLCVVQDVVQRTVDTPSVPTDDVNIELVDDLDNNVSSHDIQCLRGALESAILEFKLVPACLRPRLPRLPTHKRNLALMGALDSMLPEYMESSRDLVDTHAILYCAAIAACRVANVRFPNDYRAARDATHVPAWQRRIEERIDRTRTLISKLICFKAGNNRPKVMRFVTQAFLGSSIRPQDYRFCVTERIDLLKQKVYAWANRIRRYKKRWNRFQQNRAFQSDQKRVYRCWEHSQQGVGDGRLPDVRDMRTYWANIWSSPVSHTEGAWIGVVERACEAISPMETISISPDDVLRAVRPTQNWKSPGPDGLHNFWLKWFVTSHSRLAAQFQSALESGSLPTFMTTGVTHLLFKSGSTTDPKNYRPITCLPTIYKLFTSIIRFKIAYHIDNNNILFSAQTGCKIGSRGTKELLLIDMAICQQVRHNRRNLSAAWIDYKKAYDSVPHTWLMRVLDLYKIHSNLRTLLGACMRQWTTVLKYPGGASPLDCDEPIKIDRGIFQGDSLSPLWFCLALNPLSTLLLDSGLGYRLRRGSVPISHLLYMDDLKLFAPKKSDLIELLKITKSFSNSISMEFGVDKCAVIHVGRGAVRVSDDVYLSETERLRSLSESETYKYLGMSEALGIMGADMKQSLKERFFCRLTKVLNSFLSGGNKIRAFNGWVMPVLMYSFGILKWTQTELDALDRRVRTLMTAHRMHHPRSSVMRLYIPRRCGGRGLLNAKDLHNREVRNLRDYILHSDVDVHREVVKVDKGFTPLSLANENWRVPVVMSTGDRKGVWKSKELHGRFYRALNGPDVDQLASVSWLRFGDLFGETEGFVFAIMDEVVKTNNYRKYILKDGTVDICRACHRPGESIRHVISGCSYLANGEYLHRHNLVAKIIHQQLALRYHLVISEVPYYQYVPQPVLENGHTTLYWDRSIITDRTIVANKPDIVVIDRLARRVILVDVTIPHDDNLVKAEKDKMSKYLDLAHEVVDMWNVDSAIIVPIVVTANGLIPKSLDQHLQRLSIGRWVKSQIQKAVLLDTARIVRRFLTLGS

SEQ ID NO: 27210 - protein, 1196 aa, Deilephila porcellus
MIRKTTRQRNARKTSPSSSSSASWASASDVFEVTPNIDASSQRDELQSSPPPLRPARRRGRPPPAVGLGPVGQSVPSTVPATGGVVRRMRWTREINENVMRAYFGATKGGTHLTAYRVKMLSLFQAFEPTVVVSSQRLSDQVRFIQRRKLLDDEALERLRTDLCVVQGVNVTPVSRGPVADSTSTPVADIELADNLDDNVSPQDEQCLRGALERAISEFVSLSASCRPRLPRLPTHRRNLALVGALDSMLPTYLESSRDLVDTHSILYCAAVAACRVANITFPNEYRATRGVATVPAWQRRIEDRINRARTLIGKLVSFREGNNRPRVMRFVTQAFSGTNTSPRDYRLCVTERIDFFKQKVYAWANRIRRYRKRWDRFQQNRMFQSDQKRVYRCWESSPQSVMDGRLPSAREMREYWANIWASPVSHTEAAWFSVVNQACEALPTMETISISPEDVLAAIRPTQNWKSPGPDGLHNFWLKWFPSSHARLAIQFQDALERGSLPTFMTTGVTHLLFKSGCTTDPKNYRPITCLPTIYKILTSIIRSKITCHITTNKILFSGQTGCKSGSRGTKELLLIDMTICQQVRHNRRNLSAAWIDYKKAYDSVPHTWLMRVLNLYKIDTKLCTFLEVCMGQWTTVLKYPGATSPSDCDEPIAIRRGIFQGDSLSPLWFCMALNPLSTLLLDSGLGYRLRRGTEPISHLLYMDDLKLFASKQSELIELLKITEIFSKSINMEFGVNKCAVIHVKRGEVAVSDDIQVSETVRLRSLSEMETYKYLGMPEALGIMGVDVKQSLKERFFSRLTKVLNSFLSGGNKIRAFNGWVMPALMYSFGILRWTQTELDALDRKVRTLLTAHRMHHPRSSVMRLYIPRRCGGRGMLNAKDLHNREVCNLRDYFLNSDVDMHGVVVMVDKGFTPLSLANENWRKPLVMGIKDREEIWKGKELHGRFYRALHGPDVDRLASVSWLRFGNLFGETEGFVFAIMDEVIKTNNYRKYILKDGTVDICRACHRPGESIRHVISGCSYLANGEYLHRHNLVAKIIHQQIALRYGLVTPEVPYYQYVPQPVLENGHATLYWDRSVITDRTIVANKPDIVIIDRLARRAILVDVTIPHDDNLVKAEKDKLTKYLDLAHEVTELWDVDSTIIVPIVVSAHGLIPKSLDQHLQRLSMGRWVMSQIQKAVLLDTARIVRRFLTLGS

SEQ ID NO: 27211 - protein, 953 aa, Hyles vespertilio
MGDLDSMLTTYLESSRDLVDTHSILYCAAVAACRVANIKFPNEYKATRGVVIVPAWQRRIEDRINRARTLIGKLISFKEGNSRPKIMRFVTHAFSGTNTGPRNYRLCVTERIDFFKQKVYAWANRIRRYRRRWDRFQQNRKFQTDQKSVYRCWENPPQGVVDGRLPSAHEMREYWTNIWSSPVSHTEASWFSVVDRACEAIPAMETILISPEDVLTAIRQTQNWKSPGPDGLHNFWLKWFPSSHARLAAQFQNALERGSLPTFMTTGVTHLLFKSGCTTEPKNYRPITCLPTIYKVLTSIIRSKITDHINSNQILFSGQTGCMNGSRGTKELLLINMTICQQARHNRRNLSAAWIDYKKAYDSVPHTWLMRVLNLYKINTNLCNFLGSCMGQWTTVLRYPGGTVPPDCDEPIRIKRGIFQGDSLSPLWFCMALNPLSTLLLDSGLGYRLRRGSEPISHLLYMDDLKLFASKQTELIELLKITERFSNSINMDFGVDKCAVIHVKRGEVAVSDDILVSETVRLRSLSVTETYKYLGMPEALGIMGADVKRSLKERFFSRLTKVLNSFLSGGNKIRAFGWVMPVLIYSFGILKWTQTELDALDRKVRTLLTAHRMHHPRSSVMRLYIPRRCGGRGILNAKDLHNREVCNLRDYFLHSDVDMHRVVVMVDKGFTPLSLAIENWRKPLVVGIKDREDIWKSKELHGRFYRALHGPDVDRLASVSWLRFGNLFGETEGFVFAIMDEVIKTNNYRKYILKDGTVDICRACHRPGESIRHVISGCSYLANGEYLHRHNLVAKIIHQQIALRYGLVTPEVPYYQYVPQPVLENGHATLYWDRSIITDRTILANKPDIVIIDRLARRAILVDVTIPHDDNLVKAEKDKMSKYLDLAHEVTDMWDVDSTIIVPIVVSAHGLIPKSLDQHLQRLSIGCWVRSQIQKAVLLDTARIVRRFLTLGS

SEQ ID NO: 27212 - protein, 1193 aa, Hyles vespertilio
MTTRARRRNARSRSPSSSSSASWASASEVFESTPNFDVSSQHGELQSSPPPPRPARRRGRPPPAVGLGPVGPRVPPTVPATGGVVRRMRWTQELNENVMRAYFGATKGGTKLTAYRAKMLSLFQALEPTVDVSSQRLSDQVRFIQRRKLLDDQVLERLRTDLCVVQDVNVPSVTVDQAADTPPTPAADIDQTDNMNSNVSPQDEQRLRGALERAISEFVSLPASCRPRLPRLPTHRRNLMLVGALDSMLPTYLESSRDLVDTHSILFCAAVAACRVANVKFPSDFEATRGVVTVPAWQRRIEDRINRARILIGKLISFREGNSRPKIMRFVTQAFSGTNTSPRNYRLCVTERIDFYKQKVYAWANRIRRYRKRWDRFQQNRMFQSDQKRVYRCWENSQQGVGDRRLPSAHEMREYWANIWSSPVSHTEAPWFGVVDRACEAIPAMETILISPEDVLAAIRPTQNWKSPGPDGLHNFWLKWFPSSHARLATQFQDALERGSLPTFMTTGVTHLLFKSGVTTEPKNYRPITCLPTIYKVLTSIIRSKITDHISSNQILFSGQTGCMNGSRGTKELLLIDMTICQQARHNRRNLSAAWIDYKKAYDSVPHTWLMRVLNLYKIDTNLCNFLGSCMGRWTTVLRYPDGTGPPDCDEPIRIKRGIFQGDSLSPLWFCMALNPLSTLLLDSGLGYRLRRGSEPISHLLYMDDLKLFASKQSELIELLKITERFSNSINMEFGVDKCAVIHVKRGEVAVSDNIQVSETLSLRSLSVTETYKYLVMPEALGIMGADVKQSMKERFFSRLTKVLNSFLSGGNKIRAFNGWVMPVLMYSFGILKWTQTELDALDRKVRTLLTAHRMHRSSVMRLYIPRRCGGRGILNAKDLHNREVCNLRDYFLHSNVDMHRVVVMVDRGFTPLSLAIENWRKPLVVGIRDREDIWKSKELHGRFYRALHGPDVDRLASMSWLRFGNLFGETEGFVFAIMDEVIKTNNYRKYILKDGTVDICRACHRPGESIRHVISGCSYLANGEYLHRHNLVAKIIHQQIALRYELVTSEMPYYQYVLQPVLENGHATLYWDRSVITDRTIVANKPDIVIIDRLARRAILVDVAMPHDDNLVKAEKDKMSKYLDLAHEVTDMWDVDSTIIVPIVVSAHGLIPKSLDQHLQRLSIDCWVKGQIQKAVLLDTARIVRRFLTLSP

SEQ ID NO: 27213 - protein, 1117 aa, Hyles vespertilio
MTTRASRRNAQMRSPSSSSSASWASASDVFEVTPDIDVSSQHDELQSSPPPPRPARRRGRPPPAVGLGPTGPSVPPTVLATGGVVRRMRWTHQMNENVMRAYFRATKGGTNLTAYRAQMLSMFQVLEPTVNVSSQRLSDQVRFIQRRKLLDDEALERLRTEACVALDVITPITQRAAETPSIPAADIELVDNLDNTVSPQDQQRLRRTLESAILEYKSIPASCRPRVPRLPTHRRNLALMGALDSIVSTYMESSRDLVDTHSILYCAAVAACRVANVKFPINNVTTTRDVATVPAWQRRIEDRINRARTLIGKLIAFRNGNNRQRVMRFVAQAFSETNISPRDYGLWVTERIDYYKQKVYAWANRIRRYRKRWDRFQQNRTFQSDQKRVYRCWERSPQCVVDGRLPSVHDMRTYWTNIWSSSISHTEADWFGVVERARKSTPIMEAISISPEDVLVAIRPTQNWKSPGPDGLHNFWLKWLPCSHARLAAQFQDALDGGSLPTFMTTGVTHLLYKSGSATDPKNYRPITCLPTTYKLFTSILRAKIANHFTSNNILFPGQTGCKSGSRGTKELLLIDMTICQQARQNRRNLSAAWIDYKKAFDSVPHTWLMRVLSLYKIDTNLCTFLGSCMGQWTTVLRYPGGMVSPDCDEPIRIKRGIFQGDSLSPLWFCMALNPLSTLLVDSGLGYRLRRGTEPISHLLYMDDLKLFASKQTELIELLKITEKFSNSINMEFCVDKCAIIHVKRGEVAVSDGVQISDAVRLRALSETETYKYLGMPEALGILSADVKQSLKERFFGRLAKVLNSLLSGGNKIRAFNGWVMPVLMYSFGILRWTQTELDALDRKVRTLLTDSTAHRMHHPRSSVMRLYIPRRCGGRGILNAKDLHNREVCNLRDYFLHSDVDMHRVVVKIDKGLTPLSLANENWRKPLVMSTKDREEVWKSKELHGRFYRALHGPDVDRPASVSWLRFGNLFGETEGFVFAIMDEVIKTNNYRKYILKDGTVDICRACHRPGESIRHVISGCSYLANGEYLHRHNLVAKIIHQQIALRYGLVTLEMPYYQYVPQPVLENGHATLYWDRSIITDRTIVANKPDIVIIDRLARMTLTSLKLKKTNCLSI

SEQ ID NO: 27214 - protein, 1189 aa, Eilema sororculum
MLTRAQAKRHRNAPTTSPDSSLSSAAQPPAVEPAASSSSSSDEFFSPPTSPTPVRRPGRGRPPTCLGPRRPPASIGAPATGGDVHRMRWTTSINENVMRAYFAATEGGTNLSAYRTRMLPLFQALEPSINTSAQRLSDQVRVIQRNRMLNETVLETLRLECLRNICVTPAPAPAPASTAERNDDTRVAPDDTPVSIQYNEEIKEALECALREYRSMPVHVRPRLPRLPIHRRNIALVSALDSLLPRYLENSENLGDTHSILYCTAVAACRMAGAKFPIKDPAIRPKFTIPAWQCRIERRVAEARVLIGKLICFRSGNTRPRVMRYVTRAFAGTDISPQDYTSRVTERIDFLKQKVCAWANRIRRYKKRVDRYTVNRMFQRDQRWVYRSWERTDESVDDVRRPDAEATNAFWRSIWSVPVSHTEGDWMREVERACETIPEMEEIYIDATDVDCAVRSLSNWKSPGPDGLHNFWLKWLRSSHVVLASQFQSAVESGTLPAFMTTGVTHLLHKTGSTLEPNNYRPITCLPTVYKLLTSILRAKINNHINNNSIMCASQNGCRNGARGTKLLLIDMAISQQARRNRKDLTACWIDYKKAFDSVPHTWLLRVLELYKVNTTLCTFLRSCMRQWRTVLFYPGCRQALGGGVPITIERGIFQGDSLSPLWFCLALNPLSALLVNSGLGYRLRREGQVVSHLFYMDDLKLFAHTNPQLIALLKVTETFSNSIKMAFGVDKCAVIHVKRGRAVESEGIQLSDSTNLRSLLVTETYKYLGMSQALCINEVDMKQLLQERFFGRLKKVFNSLLSGGNKVRACNSWVMPLLMYSFGILKWTQTELDTIDRKVRTQLTAFRMHHPRSSVMRLYIPRKCGGRGFLNAKTLHNREVCNLRDYFLKSNVDMHRDVVNVDTGLTPLGLAKENWRRPTIVSTDSRREVWQSKELHGRFYRALHRPEVDLLASVAWLRFSDLFGETEGFVCAIADEVIKTNNYRKYIMRDGTIDICRACHQSGESLRHITSGCSRLANGEYLHRHNQVARIIHQRLALKYNLVEVEVPYYRYVPEPVQENSHITLYWDRSIITDRTVVANKPDIVVIDRSERRALIVDVTIPHDENLVKAETDKQVKYLDLAHEVVDMWNVDSAIIVPIVVSVNGLIAKSLDQHLKRLGLDGWVKGQMQKAVLLDTARIVRKFLSLEP

SEQ ID NO: 27215 - protein, 975 aa, Eilema sororculum
MPVHVRPRLPRLPIHRRNIALVSALDSLLPRYLENSENLGDTHSILYCTAVAACRMAGAKFPIKDPAIRPKFTIPAWQCRIERRVTEARVLIGKLICFRSGNTRPRVMRYVTRAFAGTDISPQDYTSRVTERIDFLKQKVCAWANRIRRYKKRVDRYTVNRMFQRDQRWVYRSWERTDESVDDVRRPDAEATNAFWRSIWSVPVSHTEGDWMREVERACETIPEMEEIYIDATDVDCAVRSLSNWKSPGPDGLHNFWLKWLRSSHVVLASQFQSAIESGTLPAFMTTGVTHLLHKTGSTLEPNNYRPITCLPTVYKLLTSILRAKINNHINNNSIMCASQNGCRNGARGTKELLLIDMAISQQARRNRKDLTACWIDYKKAFDSVPHTWLLRVLELYKVNTTLCTFLRSCMRQWRTVLFYPGCRQALGGGVPITIERGIFQGDSLSPLWFCLALNPLSALLVNSGLGYRLRREGQVVSHLFYMDDLKLFAHTNPQLIALLKVTETFSNSIKMAFGVDKCAVIHVKRGRVVESEGIQLSDSTNLRSLLVTETYKYLGMSQALCINEVDMKQLLQERFFGRLKKVLNSLLSGGNKVRACNSWVMPLLMYSFGILKWTQTELDTIDRKVRTQLTAFRMHHPRSSVMRLYIPRKCGGRGFLNAKTLHNREVCNLRDYFLKSNVDMHRDVVNVDTGLTPLGLAKENWRRPTIVSTDSRREVWQSKELHGRFYRALHRPEVDLLASVAWLRFSDLFGETEGFVCAIADEVIKTNNYRKYIMRDGTIDICRACHQPGESLRHITSGCSRLANGEYLHRHNQVARIIHQRLALKYNLVEVEVPYYRYVPEPVQENSHITLYWDRSIITDRTVVANKPDIVVIDRSERRALIVDVTIPHDENLVKAETDKQVKYLDLAHEVVDMWNVDSAIIVPIVVSVNGLIAKSLDQHLKRLGLDGWVKGQMQKAVLLDTARIVRKFLSLEP

SEQ ID NO: 27216 - protein, 1138 aa, Eilema sororculum
MHFINNNNNKKKTTKKTTSPDSSLSSAAQPPAMEPAASSSSSSDEFFSPPTSPTPVRRPGRGRPPTCLGPRRPPASNRAPAAGGNVHRMRWTNSINENVMRAYFAATEGGTNLSAYRTRMLPLFQALEPSINTSAQRLSDQVRVIQRNRMLNETVLETLRQECLRNICVTPAPASAPASTAEINDDTCVAPDDTPIPVSIQYNEEIKEALECALREYRSVPLHVRPRLPRLPIHRRNIALVSALDSLLPRYLENSENLGDTHSILYCTAVAACRMVGAKFPIKDPAIRPKSAIPAWQCRIERRVAEARVLIGKLICFRSGNTRPRVMRYVTRAFAGTDISPQDYTSRVTERIDFLKQKVYAWANRIRRYKRRVDRYTVNHMFQRDQRWVYRSWERTDESVDDVRRPDAEATNAFWRSIWSVPVSHTEGDWMREVERACETIPEMEEIYIDATDVDCAVRSLSNWKSPGPDGLHNFWLKWLRSSHVVLASQFQSAIESGTLPAFMTTGVTHLLHKTGSTLEPNNYRPITCLPTVYKLLTSVLRAKINNHINNNSIMCASQNGCRNGARGTKELLLIDMAISQQARRNRKDLTACWIDYKKAFDSVPHTWLLRVLELYKVNTTLCTFLRSCMGQWRTVLFYPGCRQALGGGVPITIERGIFQGDSLSPLWFCLALNPLSTLLVNSGLGYRLQREGQMVSHLFYMDDLKLFAHTNPQLIALLKVTETFRSSIKMAFGVDKCAVIHVKRGRVVESEGIQLSDSTNLRSLLVTETYKYLGMSQALCINEVDMKQMLQERFFGRLKKVLNSLLSGGNKVCACNSWVMPLLMYSFGILRWTQTELDTIDRKVRTQLTAFRMHHPRSSVMRLYIPRKCGGRGFLNAKTLHNREVCNLRDYFLKSNVDMHRDVVNVDTGLTPLGLAKENWRRPTIVSTDSRREVWQSKELHGRFYRALHRPEVDLLASVSWLRFSDLFGETEGFVCAIADEVIKTNNYRKYIMRDGTIDICRACHQPGESLRHITSGCSRLANGEYLHRHNQVARIIHQRLALKYNLVEVEVPYYKYVPEPVLENSHITLYWDRSIITDRTVVANKPDIVVIDRSERRALIVDVTIPQLRKINKLNTWTWPTRLSTCGMLTQQSLYR

SEQ ID NO: 27217 - protein, 1192 aa, Deilephila porcellus
MMKRARSKHARRTSSSSSNSASWASASDVFEVTPDIDASSQRDELQSSPPPPRPARRRGRPPPVVGLGPVGPSVPPTVPATGGVVRRMRWTQQINENVMRAYFGATKGGTYLTAFRAQMLSVFQVLEPTINVSSQRLSDQVRFIQRRKLLDDEVLERLRTEACVVLDVVTPTTQRAADSPPSPAADIEVVDNLDNTVSPHQEQRLRRTLESAILEYKSIPASCRPRVPRLPTHRRNLALMGALDSMLATYMESSRDLVDTHSILYCAAVAACRVANVKFPNNFTTTRDVTTVPAWQRRIEDRINWARTLIGKLTAFQNGNNRPRVMRFVTQAFSGTNISSRDYGLWVTERIDYYKQKIYAWANRIRRYRRRWDRFQQNRTFQSDQKRVYRCWERSSQSVVDGRLPSVHDMRSYWENIWSSSVPHTEADWFGVVERACECIPTMEAISISPEDVQIAIRPAQNWKSPGPDGLHNFWLKWFPSSHVRLAAQFQDALDGGSLPTFMTTGVTHLLYKSGNTTDPKNYRPITCLPTIYKLFTSILRAKISDHFTLNNILFSGQTGCKSGSRGTKELLLIDMTICQQARHNRRNLSAAWIDYKKAFDSVPHTWLRRVLSLYKIDTNLCTFLGSCMGQWTTVLRYPGGMVPPDCDEPIRIKRGIFQGDSLSPLWFCMALNPLSTLLLHSGLGYRLRRGSEPISHLLYMDDLKLFASKQSELIELLKITEKFSNSINMEFGVDKCAVIHVKRGKVTVSDDIQVSETVRLRSLSETETYKYLGMSESLGILSADVKQSLKERFFSRLTKVLNFLSGGNKIRAFNGWVMPVLMYSFGILRWTQTELDALDRKVRTLLTTHRMHHPRSSVMRLYIPRRCGGRGILNAKVLHNREVCNLRDYFLHSDVGMHRAVVSVDKGLTPLSLANENWRKPLVMSVRDREEIWKSKELHGRFYRALHGPDVDRPASVSWLRFGNLFGETEGFIFAIMDEVIKTNNYRKYILKDGTVDICRACHRPGESIRHVISGCPYLANGEYLHRHNLVAKIIHQQIALRYKLVTPEVPYYQYVPQPVLENGHVTLYWDRSVMTDRTIVANKPDIVIIDRCARRAILVDVTVPHDDNLVKAEKDKLSKYLDLAHEVTDMWDVDSTIIVPIVVSAHGLIAKSLDQHLQRLSIGRWVKSQIQKAVLLDTARIVRRFLTLDP

SEQ ID NO: 27218 - protein, 924 aa, Adoxophyes honmai
MCRAGPPADMEDRADISVSTQANEQLRRALEDAIQQYRSTPASRPRLPRLPPNRRNLALMGALNELLEPYIRASNDLSDTHSILYCGAIAACRVAGLRFPDPEQAPRRLGDVPAWQVRIERRITTFRTLIAKLICFKEGNNRPRVMRYVNQAFSGTDIRPQNYLACVTERIEFLKQKVYAWANRIRRYRARVDRYRVNRLFQSDQRKVYREWEGNDKRMSDGQPPDSTTMINFWRGIWSAPIDHTEGDWMNVVNRACESIEPMGAITISPDDVSCAIRSAQNWKSPGPDGLHNFWIKWFRCSHERLATQFQEALVSGSLPSFLTTGVTFLLYKSGSTTEAKNYRPITCLPTLYKLLTSILRAKINSHVVENNILAYAQNGCRVGSRGTKELLLIDMTIGQHVRRSKGTMSVAWIDYKKAYDSVPHTWLKRVLELYKIDATLRFFLSTCMGQWNTVLRLPGNRDGLIDPQDFIRIERGIFQGDSLSPLWFCLALNPLSTLLRDSKLGCRLLRGGEIISHLLYMDDLKLFAPKSQDLIKLLKTTEAFSNGIKMEFGGDKCAVMHVQRGKVVNSTNLQLSETITLKSLSEAETYKYLGMSQSLGIVDSDIKQAVSERFFWRVTKVLNSLLSGGNKIRALNAWVIPLLTYSFGVLKWTQTELDALDRRVRHLLTTHRMLHPRSSVMRLYIPRKCGGRGILNAKNLHNREVCSLREYFLHNECGMHRDVVAVDRNFTPLSLATENWRKPKVLSTEDRMDVWKSKELHGRFYRALHGPDVDLLASVNWLRFGNLFGETEGFVCAIADEVVKTNNYRKYILKDGTVDICRACHRPGESIRHIISGCSHLANGEYLHRHNLVARIIHQQLALQYGLVESEVPYYKYTPTPVIENGRATLYWDRSVITDRTIVANKPDNYRDNRPITAPCSAR

SEQ ID NO: 27219 - protein, 869 aa, Adoxophyes honmai
MRYVNQAFSGTDIRPQNYLACVTERIDFLKQKVYAWANRIRRYRARVDRYRVNRLFQSDQRKVYREWEGTDKRMNDGQPPDSTAMVNFWRGIWSAPVDHTEGDWMNVVNRACETIEPMGAITISPDDVSCAIRSAQNWKSPGPDGLHNFWIKWFSCSHERLATQFQEALVSGSLPSFLTTGVTFLLYKSGSTTEAKNYRPITCLPTLYKLLTSILRAKINSHVVENNILAYAQNGCRVGSRGTKELLLIDMTIGQHVRRTKGTMSVAWIDYKKAYDSVPHTWLKRVLELYKIDATLRFFLSTCMGQWNTVLRLPGNRDGLIDPQDFIRIERGIFQGDSLSPLWFCLALNPLSTLLRDSKLGCQLLRGGEIISHLLYMDDLKLFAPKSQDLIKLLKTTEAFSNGIKMEFGVDKCAVMHVQRGKVVNSTNLQLSETITLKSLSEAETYKYLGMSQSLGIVDSDIKQAVSERFFCRVTKVLNSLLSGGNKIRALNAWVIPLLTYSFGVLKWTQTELDALDRRVRHLLTTHRMLHPRSSVMRLYIPRKCGGRGILNAKNLHNREVCSLREYFLHNECRMHRDVVAVDRNFTPLSLATENWRKPKVLSTEDRMDVWKSKELHGRFYRALHGPDVDLLASVNWLRFGNLFGETEGFVCAIADEVVKTNNYRKYILKDGTVDICRACHRPGESIRHIISGCSHLANGEYLHRHNLVARIIHQQLALQYGLVESEVPYYKYTPTPVLENGRTTLYWDRSVITDRTIVANKPDIVIIDRSQRRAVLVDITIPHDENLVKAEKDKLSKYLDLAHEVTDMWDVDSTIIVPIVVTANGLIAKSLDYHLRRLSLYGWLKGLIQKAVLLDTARIVRRFLTLQP

SEQ ID NO: 27220 - protein, 869 aa, Adoxophyes honmai
MRYVNQAFSGTDIRPQNYLTCVTERIDFLKQKVYAWANRIRRYRARVDRYRVNRLFQNDQRKVYREWEGNDKRMSDGQPPDSTTMINFWRGIWSAPVDHTEGDWMNVVNRACESIEPMGAITISPDDVSCAIRSAQNWKSPGPDGLHNFWIKWFRCSHERLATQFQEALVSGSLPSFLTTGVTFLLYKSGSTTEAKNYRPITCLPTLYKLLTSILRAKINSHVVENNILAYAQNGCRVGSRGTKELLLIDMTIGQHVRRSKGTMSVAWIDYKKAYDSVPHTWLKRVLELYKIDATLRFFLSTCMGQWNTVLRLPGNRDGLIDPQDFIRIERGIFQGDSLSPLWFCLALNPLSTLLRDSKLGCRLLRGGEIISHLLYMDDLKLFAPKSQDLIKLLKTTEAFSNGIKMEFGVDKCAVMHVQRGKVVNSTNLQLSETITLKSLSEAETYKYLGMSQSLGIVDSDIKQAVSERFFCRVTKVLNSLLSGGNKIRALNAWVIPLLTYSFGVLKWTQTELDALDRRVRHLLTTHRMLHPRSSVMRLYIPRKCGGRGILNAKNLHNREVCSLREYFLHNECGMHRDVVAVDRNFTPLSLATENWRKPKVLSTEDRMDVWKSKELHGRFYRALHGPDVDLLASVNWLRFGNLFGETEGFVCAIADEVVKTNNYRKYILKDGTVDICRACHRPGESIRHIISGCSHLANGEYLHRHNLVARIIHQQLALQYGLVESEVPYYKYTPTPVLENGRATLYWDRSVITDRTIVANKPDIVIIDRSQRRAVLVDITIPHDENLVKAEKDKLSKYLDLAHEVTDMWDVDSTIIVPIVVTANGLIAKSLDHHLRRLSLDGWLKGLIQKAVLLDTARIVRRFLTLQP

SEQ ID NO: 27221 - protein, 968 aa, Hyles vespertilio
MLSLFQALEPTVDVSSQRLSDQVRFIQRRKLLDDDTLERLRTDLCFVQDDHVSPVSGDQTAGPTPTPVADFELTDNLDDNVSPQVKQQLRGALERAILEFASLSASCRPRLPRLPTHRRNLALMGALDSMLTTYLESSLVDTRSILYCAAVAACRVANIKFPNEYKATRGVVIVPAWQRRIEDRINRARTLIGKLISFKEGNSRPKIMRFVTQAFSGTNTSPRNYRLCVTERIDFFKQKVYAWANRIRRYRRRWDRFQQNRKFQTDQKSVYRCWENPPQGVVDGQLPSAHEMREYWTNIWSLPVSHTEASWFSVVDRACEAIPAMETILISPEDVLTAIRQTQNWKSPGPDGLHNFWLKWFPSSHARLAAQFQDALERGSLPTFMTTGVTHLLFKSGCTTEPKNYRPITCLPTIYKVLTSIIRSKITDHINSNQILFCGQTGCMNGCRGTKELLLINMTICQQVRHNRRNLSAAWIDYKKAYDSVPHTWLMRVLNLYKINTNLCNILGSCMGQWTTVLRYPGGTVPPDCDEPIRIKRGIFQGDSLSPLWFCMALNPLSTLLLDSGLGYHLRRDDGSEPISHLLYMDDLKLFALKQTELIELLKITERFSNSINMDFGVDKCAVIHVKRREVAVSDDILVSETVRLRSLSVTETYKYLGMPEALGIMGADVKRSLKERFFSRLTKVLNSFLSGGNKIRAFNGWVMPVLIYSFGILKWTQTELDALDRKVRTLLTAHRMHHPRSSVMRLYIPRRCGGRGILNVKDLHNREVCNLRDYFLHSDVDMHRVVVMVDKGYTPLSLAIENWRKPLVVGIKDREDIWKSNELHGRFYRALHGPDVDRLASVSWLRFGNLFGETEGFVFAIMDEVIKTNNYRKYILKDGTVDICRACHRPGESIRHVISGCSYLANGEYLHRHNLVAKIIHQQIALRYGLVTPEVPYYQYVPQPVLENGHATLYWDRSIITDRTISQ

SEQ ID NO: 27222 - protein, 1096 aa, Hyles vespertilio
MRMSCGPSLGQQREELNSLRIVLKCCLCFRLWNQQLMSDQVRFIQRRKLLDDQVLERLRTDLCVVQDVNVPSVTVDQAADTPPTSAADIDQTDNMNSNVSPQDEQRLRGALERAISEFVSLPASCRPRLPRLPTHRRNLMLVGALDSMLPTYLESSRDLVDTHSILFCAAVAACRVANVKFPSDFEATRGVVTVPAWQRRIEDRINRARILIGKLISFREGNSRPKIMRFVTQAFLGTNTSPRNYRLCVTERIDFYKQKVYAWANRIRRYRKRWDRFQQNRMFQSDQKRVYRCWENSQQGVGDRRLPSAHEMREYWANIWSSPVSHTEAPWFGVIDRACEAIPAMETILISPEDVLAAIRPTQNWKSPGPDGLHNFWLKWFPSSHAPLATQFQDALESGSLPTFMTTGVTHLLFKSGVTTEPKNYRPITCLPTIYKVLTSIIRSKITDHISSNQILFSGQTGCMNGSRGTKELLLIDMTICQQARHNRRNLSAAWIDYKKAYDSVPHTWLMRVLNLYKIDTNLCNFLGSCMGRWTTVLRYPGGTGPPDCDEPIRIIKRGIFQGDSLSPLWFCMALNPLSTLLLDSGLGYRLRRGSEPISHLLYMDDLKLFASKQSELIELLKITERFSNSINMEFGVDKCAVIHVKRGEVAVSDDIQVSETLSLRSLSVTETYKYLGMPEALGIMGADVKQSMKERFFSRLTKVLNSFLSGRNKIRAFNGWVMPVLMYSFGILKWTQTELDALDRKVRTLLTAHRMHHPRSSVMRLYIPRRCGGRGLLNAKDLHNREVCNLRDYFLHSNVDMHRVVVMVDRGFTPLSLAIENWRKPLVVGIRDREDIWKSKELHGRLYRALHGPDVDRLASGSWLRFGNLFGETEGFVFAIMDEVIKTNNYRKYILKDGTVDICRACHRPGESIRHVISGCSYLANGEYLHGHNLVAKIIHQQIALRYGLVTSEMPYYQYVPQPVLKKGHATLYWDRSVITDRTIVANKPDIVIIDRLARRAILIDVAIPHDDNLVKAEKDKMSKYLDLAHEVTDMWDVDSTIIVPIVVSAHRLIPKSLDQHLQRLSIDCWVKGQIQKAVLLDTAPLLRRFLTLSP

SEQ ID NO: 27223 - protein, 1043 aa, Eilema sororculum
MLNETVLETLRQECLRNICVTPAPAPAPASTAEINNDTYVAPDDTPIPVSIQYNEEIKEALECALREYRSVPVHVRPRLPRMPIHKRNIALVSALDSLLPRYLENSENLGDTHSILYCTAVAACRMAGAKFPIKDPAIRPKSAIPAWQCRIERRVAEARVLIGKLICFRSGNTRPRVMRYVTRAFAGTDISPQDYTSRVTERIDFLKQKVYAWANRIRRYKRRVDRYTVNHMFQRDQRWVYRSWERTDESVDDVRRPDAEATNAFWRSIWSVPVSHTEGDWMREVERACETIPEMEEIYIDATDVDCAVRSLSNWKSPGPDGLHNFWLKWLRSSHVVLASQFQSAIESGTLPAFMTTGVTHLLHKTGSTLEPNNYRPITCLPTVYKLLTSILRAKINNHINNNSIMCASQNGCRNGARGTKELLLIDMAISQQARRNRKDLTACWIDYKKAFESVPHTWLLRVLELYKVNTTLCTFLRSCMGQWRTVLFYPGCRQALGGGVPITIERGIFQGDSLSPLWFCLALNPLSTLLVNSGLGYRLRREGQMVSHLFYMDDLKLFAHTNPQLIALLKVTETFSNSIKMAFGVDKCAVIHVKRGRVVESEGIQLSDSTNLRSLLVTETYKYLGMSQALCINEVDMKQMLQERFFGRLKKVLNSLLSGGNKVRACNSWVMPLLMYSFGILRWTQTELDTIDRKVRTQLTAFRMHHPRSSVMRLYIPRKCGGRGFLNAKTLHNREVCNLRDYFLKSNVDMHRDVVNVDTGLTPLGLAKENWRRPTIVSTDSRREVWQSKELQGRFYRALHRPEVDLLASVSWLRFSDLFGETEGFVCAIADEVIKTNNYRRYIMRDGTIDICRHQPGESLRHITSGCSRLANGEYLHRHNQVARIIHQRLALKYNLVEVEVPYYRYVPEPVLENSHITLYWDRSIITDRTVVANKPDIVVIDRSERRALIVDVTIPHDENLVKAEKDKQVKYLDLAHEVVDMWNVDSAIIVPIVVSVNGLIAKSLDQHLKRLGLDGWVKGQMQKAVLLDTARIVRKFLSLEP

SEQ ID NO: 27224 - protein, 1067 aa, Hyles vespertilio
MLSLFQALEPTVDVSSQRLSDQVRFIQRRKLLDDDTLERLRTDLCFVQDDHVSPVSGDQAAGPTPTPVADFELTDNLDDNVSPQAKQQLRGALECAILEFASLSASCRPRLPRLPTHRRNLALMGALDSMLTTYLESSRDLVDTHSILYCAAVAACRVANIKFPNEYKATRGVVIVPAWQRRIEDRINRARTLIGKLIYFKEGNSRPKIMRFVTQAFSGTNTSPRNYRLCVTERIDFFKQKVYAWANRIRRYRRRWDRFQQNRKFQTDQKSVYRCWENPPQGVVDGRLPSAHEMREYWTNIWSSPVSHTEASWFSVVDRACEAIPAMETILISPEDVLTAIRQTQNWKSPGPDGLHNFWLKWFPSSHARLAAQFQNALERGSLPTFMTTGVTHLLFKSGCTTEPKKYRPITCLPTIYKVLTSIIRSKITDHINSNQILFSGQTGCMNGSRGTKELLLINMTICQQARHNRRNLSAAWIDYKKAYDSVPHTWLMRVLNLYKINTNLCNFLGSCMGQWTTVLRYPGGTVPPDCDEPIRIKRGIFQGDSLSPLWFCMALNPLTTLLLDSGLGYRLRRGSEPISHLLYMDDLKLFASKQTELIELLKITERFSNSINMDFGVDKCAVIHVKLVSETVRLRSLSVTETYKYLGMPEALGIMGADVKRSLKERFFSRLTKVLNSFLSGGNKIRAFNGWVMPVLIYSFGILKWTQTELDALDRKVRTLLTAHRMHHPRSSVMRLYIPRRCGGRGILNAKDLYNREVCNLRDYFLHSDVDMHRVVVMVDKGFTPLSLAIENWRKPLVVGIKDREDIWKSKELHGRFYRALHGPDVDRLASVSWLRFGNLFGETEGFVFAIMDEVIKTNNYRKYILKDGTVDICRACHRPGESIRHVISGCSYLANGEYLHRHNLVAKIIHQQIALRYGLVTPEVPYYQYVPQPVLENGHATLYWDRSIITDRTILANKPDIVIIDRLARRAILVDVTIPHDDNLVKAEKDKMSKYLDLAHEVTDMWDVDSTIIVPIVVSAHGLIPKSLDQHLQRLSIGCWVRSQIQKAVLLDTARIVRRFLTLGS

SEQ ID NO: 27225 - protein, 1192 aa, Hyles vespertilio
MFHNKARKKRNAHLTSPSSSSSASWASASDVFEVTPDNDASSQHGELQSSPPPPRPAQRRGRPPPVVGLGPVGPSVPPTVPATGGVVRRMRWTREINENVMRAYFGATNGGINLTAYRVEMLSLFQALEPTVDVSSQRLSDQVRFIQRRKLLDDDTLERLRTDLCFIQDDHVSPVSGDQAAGPTPTPVADFELTDNLDDNVSPQDKQQLRGALECAILEFASLSASCRPRLPRLPTHRRNLALMGALDSMLPTYLESSRDLVDTHSILYCAAVAACRVANVQFPKEYRATRGVVTVPAWQRRIEDRINRARTLIGKLISFKEGNSRPKIMRFVTQAFSGTNTSPRNYRLCVTERIDFFKQKVYAWANHIRRYRRRWDRFQQNRKFQTDQKRVYRCWENPPQGVVDGRLPSAHEMREYWTHIWSSPVSHTEASWFSVVDRACEAIPAMETILISPEDVLTAIRQTQNWKSPGPDGLHNFWLKWFPSSHARLAVQFQDALERGSLPAFMTTGVNHLLFKSGCTTEPKNYRPITCLPTIYKVLTSIIRSKITDHINSNQILFSGQTGCMNGSRGTKELLLINMTICQQARHNRRNLSAAWIDYKKAYDSVPHTWLMRVLNLYKINTNLCNFLGSCMGQWTTVLRYPGGTVPPDCDEPIRIKRGIFQGDSLSPLWFCMALNPLSTLLLDSGLGYRLRRGSEPISHLLYMDDLKLFASQQTELIELLKTTDRFSKSINMDFGVDKCAVIHVKRGEVAVSDDILVSETVRLRSLSVTETYKYLGMPEALGIMGADVKRSLKERFFSRRSFLSGGNKIRAFNGWVMPVLMYSFGILKWTQTELDALDRKVRTLLTAHRMHHPRSSVMRLYIPRRCGDRGILNAKDLHNREVCNFRDYFLHSDVDMHRVVVMVDKGFTPLSLAIENWRKPLVVGIKDREDIWKSKELHGRFYRALHGPDVDRLASVSWLRFGNLFGETEGFVFAIMDEVIKTNNYRKYILKDGTVDICRACHRPGESIRHVISGCSYLANGEYLHRHNLVAKIIHQQIALRYGLVTPEVPYYQHVPQPVLENGHATLYWDRSIITDRTIPANKPDIVIIDRLARRAILVDVTIPHDDNLVKAEKDKMSKYLDLAYEVADMWDVDSTIIVPIVVSAHGLIPKSLDQHLQRLSIDCWVRSQIQKAVLLDTARIVRRFLTLGS

SEQ ID NO: 27226 - protein, 1194 aa, Autographa pulchrina
MLTRSRSRRPAPPPSPDSSPSSASQLPDHVPAPAPAVASSSSDEYYSPPTSPTPVRRQGRRRPPSSLAPAGQPASNRAPAPGGDVRRMKWTQGINENVMRAYYGATEGGTNLTAYRARMLSLFQGLEPDVNVSAQRLSDQVRVIQRNHRLDDATLDRLRSEVQRSPAASTPSPAVVPVIGSPPTNPADGEEEDGAITVSTQCSEHIWSTLEDTIREFRSTPPGLRPRLPRLPMHNRNKAIMGVLDSLLLVYFGSSEDLSDTHSILYCAALAACRVANVKINNINLDTRPKPAVPAWQCRIERRVAEARALIGKLIAFKDGNSRPRVMRFVRRAFTGTNISPSEYTARVTERIDFFKQKVCAWASRIRRYKCRVDKFHQNRMFQRDQRWVFRTWERPVLGMDDRRLPDEDATNSFWRNIWSVPVSHSEGVWMRDVEESCEPIQEMRAITIGPQDVANAIRPMSNWKAPGPDGLQNFWLKWFRSSHGCLASQFQYAIESDALPQFFTTGSTHLLHKTGSTTDPKNYRPITCLPTIYKLLTSILRVKINEHIDSHSIMSASQNGCRNGSRGTKELLLIDMTICQQVRRSKKNLSTCWIDYKKAYDSVPHSWLMRVLELYKINTTLRAFLSSCMRRWTTVLRYPGCRDIQQSGEPIRIERGIFQGDSLSPLWFCLALNPLSTLLENSRLGYSLRRGSQVISHLLYMDDLKLFASNELQLMGLLKITESFSNSIRMEFGVDKCAVMHVKQGGIVESQGIQLSDSINLRSLSAADTYKYLGMSEALGIDVADMKQSLLTRFFGRLNKVLKSLLSGGNRVRAFNGWVMPVLMYSFGILKWTQTELDALDRRVRTLLTANRMHHPRSSVMRLYIPRKCGGRGFLNAKTLHNREVCNLREYFLQVDVGMHRDVVVVDKGFTPLSLGKENWHKPVVLSVKDRRDVWQSKELHGRFYRSLHGPDVDFLASVAWLRFGDLFGETEGFVCAIMDEVIMTNNYRKYIIKDGTVDICRACHCPGESIRHIISGCSRLANGEYLHRHNQVARIIHQQLALRYKLVEAEVPYYRYVPDPVLDNGHVTLYWDRSIITDRTIVANKPDIVVIDRPERRAMIVDVTIPHDENLVKAEKEKQMKYLDLAHEVVDMWEVDSAIIVPIVITANGIIAKSLDQHLKRLSLGIWVKGLIQKAVLLDTARIVRRFLSLEP

SEQ ID NO: 27227 - protein, 1194 aa, Autographa pulchrina
MLTRSRSRRPAPPPSPDSSPSSASQLPDHVPAPAPAVASSSSDEYYSPPTSPTPVRRQGRRRPPSSLAPAGQPASNRAPAPGGDVRRMKWTQGINENVMRAYYGATEGGTNLTAYRARMLSLFQGLEPDVNVSAQRLSDQVRVIQRNHRLDDATLDRLRSEVQRSPAASTPSPAVVPVIGSPPTNPADGEEEDGAITVSTQCSEHIRSTLEDMIREFRSTPPGLRPRLPRLPMHNRNKAIMGVLDSLLLVYFGSSEDLSDTHSILYCAALAACRVANVKINNINLDTRPKPAVPAWQCRIERRVAEARALIGKLIAFKDGNSRPRVMRFVRRAFTGTNISPSEYTARVTERIDFFKQKVCAWASRIRRYKCRVDRFHQNRMFQRDQRWVFRTWERPVLGMDDRRLPDEDATNSFWRNIWSVPVSHSEGVWMRDVEESCEPIQEMRAITIGPQDVANAIRPMSNWKAPGPDGLQNFWLKWFRSSHGCLASQFQYAIESDALPQFFTTGSTHLLHKTGSTTDPKNYRPITCLPTIYKLLTSILRVKINEHIDSHSIMSASQNGCRNGSRGTKELLLIDMTICQQVRRSKKNISTCWIDYKKAYDSVPHSWLMRVLELYKINTTLRAFLSSCMRRWTTVLRYPGCRDIQQSGEPIRIERGIFQGDSLSPLWFCLALNPLSTLLENSRLGYSLRRGSQVISHLLYMDDLKLFASNELQLMGLLKITESFSNSIRMEFGVDKCAVMHVKQGGIVESQGIQLSDSINLRSLSAADTYKYLGMSEALGIDVADMKQSLLTRFFGRLNKVLKSLLSGGNRVRAFNGWVMPVLMYSFGILKWTQTELDALDRRVRTLLTANRMHHPRSSVMRLYIPRKCGGRGFLNAKTLHNREVCNLREYFLQVDVGMHRDVVVVDKGFTPLSLGKENWHKPVVLSVKDRRDVWQSKELHGRFYRSLHGPDVDFLASVAWLRFGDLFGETEGFVCAIMDEVIMTNNYRKYIIKDGTVDICRACHCPGESIRHIISGCSRLANGEYLHRHNQVARIIHQQLALRYKLVEAEVPYYRYVPDPVLDNGHVTLYWDRSIITDRTIVANKPDIVVIDRSERRAMIVDVTIPHDENLVKAEKEKQMKYLDLAHEVVDMWEVDSAIIVPIVITANGIIAKSLDQHLKRLSLGIWVKGLIQKAVLLDTARIVRRFLSLEP

SEQ ID NO: 27228 - protein, 1194 aa, Autographa pulchrina
MLTRSRSRRPARPPSPDSSPSSASQLPDHVPAPAPAVASSSSDEYYSPPTSPTPVRRQGRRRPPSSLAPAGQPASNRAPAPGGDVRRMKWTQGINENVMRAYYGATEGGTNLTAYRARMLSLFQSLEPDVNVSAQRLSDQVRVIQRNHRLDDITLDRLRSEVQRSPAASTPSPAVVPVIGSPPTNPADGEEEDGAITVSTQCSEHIRSTLEDTIREFRSTPPGLRPRLPRLPMHNRNKAIMGVLDSLLLVYFGSSEDLSDTHSILYCAALTACRVSNVKINNINLDTRPKPAVPAWQCRIERRVAEARALIGKLIAFKDGNSRPRVMRFVRRAFTGTNISPSEYTARVTERIDFFKQKVCAWASRIRRYKCRVDRFHQNRMFQRDQRWVFRTWERPVLGMDDRRLPDEDATNSFWRNIWSVPVSHSEGDWMRDVEESCEPIQEMGAITISPQDVANAIRPMSNWKAPGPDGLQNFWLKWFRSSHGCLASQFQYAIESDALPQFFTTGSTHLLHKTGSTTDPKNYRPITCLPTIYKLLTSILRVKINEHIDSHSIMSASQNGCRNGSRGTKELLLIDMTICQQVRRSKKNLSTCWIDYKKAYDSVPHSWLMRVLELYKINTTLRAFLSSCMRRWTTVLRYPGCRDIQQSGEPIRIERGIFQGDSLSPLWFCLALNPLSTLLENSRLGYSLRRGSQVISHLLYMDDLKLFASNELQLMGLLKITESFSNSIRMEFGVDKCAVMHVKQGGIVESQGIQLSDSINLRSLSAADTYKYLGMSEALGINVADMKQSLLTRFFGRLNKVLKSLLSGGNRVRAFNGWVMPVLMYSFGILKWTQTELDALDRRVRTLLTANRMHHPRSSVMRLYIPRKCGGRGFLNAKTLHNREVRNLREYFLQVDVGMHRDVVAVDKGFTPLSLGKENWHKPVVLSVKDRRDVWQSKELHGRFYRSLHGPDVDFLASVAWLRFGDLFGETEGFVCAIMDEVIMTNNYRKYIIKDGTVDICRACHCPGESIRHIISGCSRLANGEYLHRHNQVARIIHQQLALRYKLVEAEVPYYRYVPDPVLDNGHVTLYWDRSIITDRTIVANKPDIVVIDRSERRAMIVDVTIPHDENLVKAEKEKQMKYLDLAHEVVDMWEVDSAIIVPIVITANGIIAKSLDQHLKRLSLDIWVKGLIQKAVLLDTARIVRRFLSLEP

SEQ ID NO: 27229 - protein, 1064 aa, Phlogophora meticulosa
MLTRSRARVLNAPKTSSGSSLSSASQLPGPAPDVSPVTPAAAVASSSSDEYYSPPTSPPPVRRCGRGRPPASLGLRGTPASARVPASGGSVQRMRWTQSINENVMRSYYGATEGGTNLTAYRGRMLSLFQVLEPAVNVSAQRLSDQVRVIQRNHMLDDTVLDRLRLNSRSIRVMPASPLVAVQLPTLPIVSPRPDYVGEEDDDAAISVSSQCNVRLRSALEDAFREYRSTPPGLRQRLPRLPMHKKNKALMCTLDSLLSNSFDNSKDLADTHSILYCAAAAACRVANVKFPNSKKATRPAVPAWQCRIERRIGEARVLIGKLICFREGNTRPRVMRFVRRAFSGTDISSRDYLTRVTERIDFLKQKICAWANRIRRYKRRVERYTQNRTFRSDERWVYRAWERPDQGVIDTCLPDDEAMYSFWRSIWSVPVSHTEGDWTREVERACEPLPVMGTINISPQDVACAVRPLPNWKSPGPDGLHNFWIKWLKSSHARLATQFQSALESGSLPQFLTTGITHLLHKSGSTAEPKNYRPITCLPTVYKVLTSILRSKINNHIETSLIMSVSQNGCKNGSRGTKELLLIDMAISQQVRRSRKDLSTCWIDYKKAYDSVPHTWLMRVLELYKIDTTLRTFLTSCMRQWRTVLHYPGCRQFRENSEPIRIERGIFQGDSLSPLWFCLALNPLSTLLEGSGLGYRLRRGAQVISHLLYMDDLKLFAPNNLQLMELLKVTETFSSAIRMDFGVDKCAVMHVKRGGIVESAGTQLSDSIYLRSLSSTETYKYLGMSEALGINAADMKQSLKERFFGRLNKVLNSLLSGGNKVRAFNGWVMPVLMYSFGILKWTQTELDALDRRVRTLLTANRMHHPRSSVMRLYISRKCGGRGFLNAKTLHNREVCSLREYFIEADVGMHRDVVAVDKGLTPLSLANENWRKPIVLDTTDRMEIWKNKELHGRFYRVLHGPDVDLLASISWLRFGDLFGETEGFVCAIMDEVIMTNNYRKYIVKDGTVDICRACHRPGESIRHIISGCSRLANGEYLHRHNLVARIIHQQLALKYNLVELEVPYY

SEQ ID NO: 27230 - protein, 1049 aa, Phlogophora meticulosa
MLDDAVLDRLRLNSRSNRVTPASPPVAVQLQNLPSVSPRPDYVGEEDDDAAISVSSQCNVRLRSALEDAFREYRSTPPGLRQRLPRLPMHKKNKALMCTLDSLLSNSFDSSRDLADTHSILYCAAVAACRVANVKFPNSVRSTRPAIPAWQCRIERRIGEARVLIGKLICFREGNTRPRVMRFVRRAFSGTDISSRHYLTRVTERIDFLKQKICAWANRIRRYKRRVERYTQNRTFRSDERWVYRTWERPDQGVTDTFLPDDEAMCLFWRSIWSVPVSHTEGDWTREVERTCEPLPEMGAINISPQDVACAVRPLPNWKSPGPDGLHNFWIKWLKSSHARLASQFQSALESGSLPQFLTTGITHLLHKSGSTTTAEPKNYRPITCLPTVYKVLTSILRSKINNHIDSTSIMSVSQNGCKNGSRGTKELLLIDMAISQQVRRSRKDLSTCWIDYKKAYDSVPHTWLMRVLELYKIDALRTFLKSCMGQWRTVLHYPGCRQFQENSEPIRIERGIFQGDSLSPLWFCLALNPLRTLLEGSGLGYRLRRGGQVISHLLYMDDLKLFAHNNLQLMKLLKVTETFSSAIRMDFGVDKCAVMHVKRGGIVESAGTQLSDSIYPRSLSSTETYKYLGMSEALGINTADMKQSLKERFFGRLNKVLNSLLSGGNKVRAFNSWVMPVLMYSFGILKWTQTELDALDRRVRTLLTANRMHHPRSSVMRLYISRKCGGRGFLNAKTLHNREVCSLREYFLEADVGIHRDVVVMDKALTPLSLANENWRKPIVLDTTDRMEIWKSKELHGRFYRVLHGPDVDLSASVSWLRFGDLFGETEGFVCAIMDEVVMTNNYRKYIVKDGTVDICRACHRPGESIRHIISGCSRLANGDYLHRHNLVAKIIHQQLALKYNLVESEVPYYKYVPDPVLENGNITLYWDRSIITDRTIVANKPDIVVIDRLERRTMIVDITVPHDENLVKAEKEKQIKYLDLAREVVDMWDVNTAVIVPIVVTANGIIAKSLDQHLRRLSLGSWIKGLIQKAVLLDTARIVRRFLSQEP

SEQ ID NO: 27231 - protein, 986 aa, Phlogophora meticulosa
MDTIHQRKCNALILWGYRGRLPRLPMHKKNKALMCTLDSLLSNSFDSSRDLADTHSILYCAAVAACRVANVKFPNSVRSTRPAIPAWQCRIERRIGEARVLIGKLICFREGNTRPRVMRFVRRAFSGTDISSRDYLTRVTERIDFLKQKICAWANRIRRYKRRVERYTQNRTFRSDERWVYRTWERPDQGVTDTFLPDDEAMCLFWRSIWSVPVSHTEGDWTREVERTCEPLPEMGAINISPQDVACAVRPLPNWKSPGPDGLHNFWIKWLKSSHGRLASQFQSALESGSLPQFLTTGITHLLHKSGSTAEPKNYRPITCLPTVYKVLTSILRSKINNNHIDSTSIVSVSQNGCKNGSRGTKELLLIDMAISQQVRRSRKDLSTCWIDYKKAYDSVPHTWLMRVLELYKIDATLRTFLKSCMGQWRTVLHYPGCRQFQENSEPIRIERGIFQGDSLSPLWFCLALNPLSTLLEGSGLGYRLRRGGQVISHLLYMDDLKLFAHNNLQLMKLLKVTETFSSAIRMDFGVDKCAVMHVKRGGIVESAGTQLSDSIYLRSLSSTETYKYLGMSEALGINTADMKQSLKERFFGRLNKVLNSLLSGGNKVRAFNSWVMPVLMYSFGILKWTQTELDALDRRVRTLLTANRMHHPRSSVMRLYISRKCGGRGFLNAKTLHNREVCSLREYFLEADVGIHRDVVAMDKALTPLSLANENWHKPIVLDTTDRMEIWKSKELHGRFYRVLHGPDVDLSASVSWLRFGDLFGETEGFVCAIMDEVIMTNNYRKYIVKDGTVDICRACHRPGESIRHIISGCSRLANGDYLHRHNLVAKIIHQQLALKYNLVESEVPYYKYVPDPVLENGNITLYWDRSIITDRTIVANKPDIVVIDRSDRRTMIVDITVPHDENLVKAEKEKQIKYLDLAREVVDMWDVNTAVIVPIVVTANGIIAKSLDQHLRRLSLGSWIKGLIQKAVLLDTARIVRRFLSQEP

SEQ ID NO: 27232 - protein, 1066 aa, Xestia xanthographa
MITRSRAKQHQEAHPPSPGSSLSSASQRPGRTTPVSTVSPVAAVASSSSDEFFSPPSTPSPSPRRGRRRGRGRPPAGLGPRGQQAPSRVPAAGGNVSRIRWTQSMNENVMRAYYGATEGGINLTAYRGQMLSLFQVLEPGVSASAQRLSDQVRVIQRNHMLDDTVLDRLRSESRSNLVMPASPLLAVQVQNVSSAPPRSDRDGEEDDSEVISVSTQCNAQLRSALESAFREYRSTPPELRPRLPRLPMHNKNKALVCALDSQLSNCFDSSKDLADTHSILYCGAVAACRVAHVKFPNNDRATRPKLAAPAWQCRIERRIGEARALIGKLICFREGNTRPRVMRFVRRAFSGTDISFRDYLARVTERIDSLKQKICAWASRIRRYKRRVERYTQNHTFQSDERWVYRAWERPDQGVTDTCLPDDNAMCSFWRSIWSVPVSHTEGDWTREVEQACNPIPEMGAIVISPQDVARAVRPLPNWKSPGPDGLHNFWIKWFQRSHACLASQFQSALESGSLPQFLTTGITHLLHKSGSAAEPKNYRPITCLPTVYKVLTSILRAKINQHIESNSIMSASQNGCRNGSRGTKELLLIDMAISQQVRRSRKNLSTCWIDYKKAYDSVPHTWLMRVLELYKVDATLRTFLTSCMGQWRTVLRYPGCRPIQGTSEPIRIERGIFQGDSLSPLWFCLALNPLSTLLERSGLGYLLRRDGRVISHLLYMDDLKLFAPNNLQLMKLLKVTETFSSAIRMEFGVDKCAVMHVKRGEIMESVGTQLSDSIHLRSLSSTETYKYLGMSEALGINTADMKQSLRERFFGRLNKVLGSLLSGGNKVRAFNGWVMPVLMYSFGILKWTQTELDALDRRVRTLLTTNRMHHPRSSVMRLYIPRKCGGHGFLNAKALHNREVCSLREYFLEADGEMHRDVVSVDKGLTPLSLANENWRKPKVLNTNDRKEEWQSKELHGRFYRALHGPDVDFLASVSWLRFGDLFGETEGFVCAIMDEVMMTNNYRKYIVKDGTVDICRACHRPGESIRHIISGCSSLANGEYLHRHNLVARIIHQQLAMKYNLVES

SEQ ID NO: 27233 - protein, 1209 aa, Xestia xanthographa
MITRSREKQHQEAHPPSPGSSLSSASQRPGRATPVSTVSPVAAVASSSSDEFFSPPSTPSPSPRRGRRRGRGRPPAGLGPRGQQAPSRVPAAGGNVSRIRWTQSMNENVMRAYYGATEGGINLTAYRGQMLSLFQVLEPGVSASAQRLSDQVRVIQRNHMLDDTVLDRLRSESRSNLVMPASPLLAVQVQNVSSAPPRSDRDGEEDDNEVISVSTQCNAQLRRALESAFREYRSTPPELRPRLPRLPMHNKNKALVCALDSQLSNCFDSSKDLADTHSILYCGAIAACRVAHVKFPNNDRATRPKLAAPAWQCRIERRIGEARALIGKLICFREGNTRPRVMRFVRRAFSGTDISFRDYLARVTERIDSLKQKICAWASRIRRYKRRVEWYTQNRAFQSDERWVYRAWERPDQGVTDTRLPDDNAMCSFWRSIWSVPVSHTEGDWTREVEQACNPIPEMGAIVISPQDVPRAVRPLPNWKSPGPDGLHNFWIKWFQRSHACLASQFQSALESGSLPQFLTTGITHLLHKSGSAAEPKNYRPITCLPTVYKVLTSILRAKINQHIESNSIMSASQNGCRIGSRGTKELLLIDMAISQQVRRSRKNLSTCWIDYKKAYDSVPHTWLMRVLELYKVDATLRTFLMSCMGQWRTVLRYPGCRPIQGTSEPIRIERGIFQGDSLSPLWFCLAFNPLSTLLDRSGLGYLLRRDGQVISHLLYMDDLKLFAPNNLQLMKLLKVTETFSSAIRMEFGVDKCAVMHVKRGEIMESVGTQLSDSIHLRSLSSTETYKYLGMSEALGINTADMKQSLRERFFGRLNKVLGSLLSGGNKVRAFNGWVMPVLMYSFGILKWTQTELDTLDRRVRTLLTANRMHHPRSSVMRLYIPRKCGGRGFLNAKALHNREVCSLREYFLEADGEMHRDVVSVDKGLTPLSLANENWRKPKVLNTNDRKEEWQSKELHGRFYRALHGPDVDFLASVSWLRFGDLFGETEGFVCAIMDEVMMTNNYRKYIVKDGTVDICRACHRPGESIRHIISGCSSLANGEYLHRHNLVARIIHQQLALKYNLVESEVPYYRYAPDPVLDNGNITLYWDRPITTDRTVVANRPDIVVIDRLERRTMIVDITVPHDENLVKAEKDKQFKYLDLAREVVDMWDVNTAVIVPIVVSANGLIAKSLDQHLRRLSLGSWIKGLIQKAVLLDTARIVRRFLSQEP

SEQ ID NO: 27234 - protein, 1094 aa, Hecatera dysodea
MKMSCAHANLTAYRGRMLSQFQVLEPAVNVSAQRLSDQVRVIQRNRMLDDAVLDRLRLESRSSRVSPASLPAAVQIQPSISPRPDHVSEDVDDGTISVSTQCNERLRSALKDAFREYRSTPPELRPRLPRLPMHNKNRALVCALDSQLSIYFDSSENLTDTHSILYCGAAAACRVAHVKLPNSDRVARPAVPAWQCRIERRIAEARALIGKLICFREGNTRRRVMRFVRRAFSGTDINPRDYLTRVTERIDFLKQKVYAWANRIRRYKRRVERYTQNRIFQNNERWVYRAWERPDQDVTDTRLPDDEAMLSFWRNIWSVPVSHTEGDWTREVERACDSIPEMGAINISPQDVARAVRPLPNWKSPGPDGLHNFWIKWLTRSHARLASQFQSALESRSLPQFFTTGITHLLHKSGSTAEPKNYRPITCLPTVYKVLTSILRAKINDHIESNSIMSTSQNGCRSGARGTKELLLIDVAISQQVRRSRKDLSTCWIDYKKAYDSVPHTWLMRVLELYKVDAVLRAFLMSCMGQWRTVLHYPGCRQTQANSEPIRIERGIFQGDSLSPLWFCLALNPLSTLLEGSGQGYRLRRGGQVISHLLYMDDLKLFAPNNLQLMKLLKVTETFSSDISMEFGVDKCAVMHVKRGEIMESVGTQLSDSIHLRSLCSTETYVITYLGISEALGINATSVKQSLKERFFGRLNKVLNSLLSGGNKARAFNGWVMPVLMYSFGILKWTQTELDALDRRVRSLLTANRMHHPRSSVMRLYIPRKCGGRGFLNAKTLHNREVCSLREYFLEADVGMHRDVVAVDKGFTPLSLANENWRKPVVLDTNDRREVWQSKELHGRFYRVLHGPDVDFLASVAWLRFGDLFGETEGFICAITDEVMMTNNYRKYIVKDGTVDICRACHRPGESIRHIISGCSSLANGDYLHRHNLVARIIHQQLALKYNLVESEVPYYRYAPDPVLENGNCTLYWDRSIITDRTIVVNKPDIVVIDRLERRAMIVDIAVPHDENLVKAEKDKQSKYLDLAREVVDMWDVNTAVIVPIVVTANGIIAKSLDQHLKRLSLGSWIKGLIQKAVLLDTARIVRRFLSREP

SEQ ID NO: 27235 - protein, 1106 aa, Hecatera dysodea
MRWTQSINENVMRSYFGATEGGTNLTAYRGRMLSLFQVLEPAVNVSAQRLSDQVRVIQRNRMLDDAVLDRLRLESRSSRVSPASPPAAVQIQPSISPRPDHVSEDFDDGAITVSTQSNERLRSALEDAFREYRSTPPELRPRLPRLPMHNKNRALVCALDSQLENCFNSSKDLTDTHSILYCAAAAACRVAHVKFPNSDRVARPAVPAWQCRIERRIGEARALIGKLICFREGNTRRRVMRFVRRAFSGTDISPRDYLTRVTERIDFLKQKVYAWASRIRRYKRRVERYTQNRTFQSNERWVYRAWERPDQVVTDTHLPDDDAMCSFWRSIWSVPVSHTEGDWTREVERTCDPIPEMGAITISPQDVARAVRPLPNWKSPGPDGLHNFWIKWFTRSHARLASQFQSALESRSLPQFLITGITHLLHKAGSTAEPKNYRPITCLPTVYKVLTSILRAKINDHIESNSITSTSQNGCRNGARGTKELLLIDVAISQQVRRSRKDLSTCWIDYKAYDSVPHTWLMRVLELYKVNTVLRTFLLSCMGQWRTVLHYPGCRQTQANSEPIRIERGIFQGDSLSPLWFCLALNPLSTLQEGSGQGYRLRRGGQVISHLLYMDDLKLFAPNNLQLMKLLKVTETFSSDISMEFGVDKCAVMHVKRGEIMESVGTQLSDSIYLRSLCSTETYKYLGMSEALGINATSVKQSLKERFFGRLNKVLNSLLSGGNKVRAFNGWVMPVLMYSFGILKWTQTELDALDRRVRSLLTANRMHHPRSSVMRLYIPRKCGGRGFLNAKTLHNREVCSLREYFLEADVGMHRDVVAVDKGLTPLSLANENWRKPVVLDTNDRREVWQSKELHGRFYRVLHGPDVDFLASVAWLRFGDLFGETEGFICAITEEVMMTNNYRKYIVKDGTVDICRACHRPGESIRHIISGCSSLANGDYLHRHNLVARIIHQQLALKYNLVESEVPYYRYVPDPVLENGNCTLYWDRSIITDRTIVANKPDIVVIDRLERRAMIVDIAVPHDENLVKAEKDKQSKYLDLAREVVDMWNVNTAVIEPIIVTANGIIAKSLDQHLKRLSLGSWIKGLIQKAVLLDTARIVRRFLSREP

SEQ ID NO: 27236 - protein, 1200 aa, Hecatera dysodea
MLTRSRTRCQNTRLTPSDSSLSSASQPPGPTPAVSPEIPVAAAASSSSDEYFSPPTTPPPARRRGRGRPPTSLGPRGPPASDRVPAVGGSVQRMRWTHSINENVMRSYFGATEGGTNLTAYRGRMLSLFQVLEPAVNVSAQRLSDQVRVIQRNRMLDDAVLDRLRLESRSNRVSPASPPAAVQIQPSISPRPDHVSEDVDDGTISVSTQCNERLRSALEDAFREYRSTPPELRPRLPRLPMHNKNRALVCALDSQLSIYFDSSENLTDTHSILYCGAAAACRVAHVKLPNSDRVARPAVPAWQCRIERRIAEARALIGKLICFRESNTRRRVMRFVRRAFSGTDISPRDYLTRVTERIDFLKQKVYAWANRIRRYKRRVERYTQNRIFQNNERWVYRAWERPDQGVTDTRLPDDEAMLSFWRNIWSVPVSHTEGDWTREVERACDSIPEMGAINISPEDVARAVRPLPNWKSPGPDGLHNFWIKWLTRSHARLASQFQSALESRSLPQFFTTGITHLLHKSGSTAEPKNYRPITCLPTVYKVLTSILRAKINDHIESNSIMSTSQNGCRSGARGTKELLLIDVAISQQVRRSRKDLSTCWIDYKKAYESVPHTWLMRVLELYKVDAVLRAFLMSCMGQWRTVLHYPGCRQTQANSEPIRIERGIFQGDSLSPLWFCLALNPLSTLLEGSGQGYRLRRGGQVISHLLYMDDLKLFAPNNLQLMKLLKVTETFSSDISMEFGVDKCVVMHVKRGEIMESVGTQLSDSIYLRSLCSTETYKYLGMSEALGINATGVKQSLKERFFGRLNKVLNSLLSGGNKVRAFNGWVMPVLMYSFGILKWTQTELDALDRRVRSLLTANRMHHPRSSVMRLYIPRKCGGRGFLNAKTLHNREVCSLREYFLEAGVGMHRDVVAVDKGFTPLSLANENWRKPVVLDINDRREVWQSKELHGRFYRVLHGPDVDFLASVAWLRFGDLFGETEGFICAITDEVMMTNNYRKYIVKDGTVDICRACHRPGESIRHIISGCSSLANGDYLHRHNLVARIIHQQLALKYNLVESEVPYYRYAPDPVLENGNCTLYWDRSIITDRTIVANKPDIVVIDRLERRAMIVDIAVPHDENLVKAEKDKQSKYFDLAREVVDMWDVNTAVIVPIVVTANGIIAKSLDQHLKRLSLGSWIKGLIQKAVLLDTARIVRRFLSREP

SEQ ID NO: 27237 - protein, 1220 aa, Hecatera dysodea
MLTRSRTREQTAQATSSGSSLSSASQPPGPAPPVSPEIPVAAVASSSSDEYFSPPTTPPPARRRGRGRPPTSLGPRGPPASDRVPAIGGSVQRMRWTETINENVMRSYYGATEGGTNLTAYRGRMLSLFQVLEPAVNVSAQRLSDQVRVIQRNRMLDDAVLDRLRLESRNSRVSPASPPAAVQIQPSISPRPDHVSEDVDDGTISVSTQCNERLRSALEDAFREYRSTPPELRPRLPRLPMHKKNRALVCALDSQLSIYFDSSENLTDTHSILYCGAAAACRVAHVKFPNSDRVARPAVPAWQCRIERRIGEARALIGKLICFREGNTRRRVMRFVRRAFSGTDISPRDYLTRVTERIDFLKQKVYAWANRIRRYKRRVERYTQNRTFQGNERWVYRAWERPDQGVTDTRLPDDEAMLSFWRNIWSVPVSHTEGDWTREVERACDPIPEMGAINISPQDVARAVRPLPNWKSPGPDGLHNFWIKWFKGSHARLASQFQSALGSGSLPKFLTTGITHLLHKSGSTAEPKNYRPITCLPTVYKVLTSILRAKINNHIDSNSIMSASQNGCRNGSRGTKELLLIDVAISQQVRRSRRDLSTCWIDYKKAYDSVPHTWLMRVLELYKVDAVLRTFLMSCMGQWSTVLHYPGCRQTQANSEPIRIERGIFQGDSLSPLWFCLALNPLSTLLEGSGQGYRLRRGGQVISHLLYMDDLKLFAPNNLQLMKLLKVTETFSSDISMEFGVDKCAVMHVKRGEIMESVGTQLSDSILLRSLCSTETYKYLGMSEALGINATGVKQSLKERFFGRLNKVLNSLLSGGNKVRAFNGWVMPVLMYSFGILKWTQTELDALDRRVRSLLTANRMHHPRSSVMRLYIPRKCGGRGFLNAKTLHNREICSLREYFLEADVGMHRDVVAVDKGLTPLSLANENWRKPVVLDTNDRRVVWQSKELHGRFYRVLHGPDVDFLASVAWLRFGDLFGETEGFICAITDEVMMTNNYRKYIVKDGTVDICRACHRPGESIRHIISGCSSLANGDYLHRHNLVARIIHQQLALKYNLVESEVPYYRYAPDPVLENGNCTLYWDRSIITDRTIVANKPDIVVIDRLERRAMIVDIAVPHDENLVKAEKDKQSKYLDLAREVVDMWNVNTAVIVPIVVTANGIIAKSLDQHLKRLSLGSWIKGLIQKAVLLDTARIVRRFLSREPWPPVAWTLFPIPVGYYFLYF

SEQ ID NO: 27238 - protein, 963 aa, Noctua fimbriata
MHKAFLSEKKKKKKKGVSVTAQRLSDQVRVIQRNHMLDDTVLDRLRSESRSNLVTPASPMTAVHLQNVTIASPRSDRGGEGDDDEVISVSTQCNAQLRSALESAFREYRSTPPELRPRLPRLPMHKKNKALVCALDSLLSNCFDTSEDLADTHSILYCGAVAACRVAHVKFPNNDRATRPKLAVPAWQCRIERRIGEARALIGKLICFREGNTRPRVMRFVRRAFSGTDVSFRDYLARVTERIDFLKQKICAWAGRIRRYKRRVERYTQNRTFQSDERWVYRAWERPDQGVTDTRLPDDDAMCSFWRSIWSVPVSHIEGDWTREVERACDPIPEMGAIIISPQDVACAVRPLPNWKSPGPDGLHNFWIKWFQRSHVRLASQFQLALESGSLPQFLTTGITHLLHKSGSTAEPKNYRPITCLPTVYKVLTSILRAKINHHIDSNSIMSASQNGCRNGSRGTKELLLIDMAVSQQVRRSRRDLSTCWIDYKKAYDSVPHTWLMRVLELYKVDATLRTFLMSCMGHWRTVLRYPGCRQIQGNSEPIRIERGIFQGDSLSPLWFCLALNPLSTLLEGSGLGFRLRRDGQVISHLLYMDDLKLFAPNNLQLMKLLKVTETFSSSIRMEFGVDKCAVMHVKRGEIMESVRTQLSDSIHLRSLSSTETYKYLGMSEALGINTADMKQSLRERFFGRLNKVLSSLLSGGNKVRAFNGWVMPVLMYSFGILKWTQTELDALDRRVRVLLTANRMHHPRSSVMRLYIPRKCGGRGFLNAQTLHNREVCSLREYFLEADVGMHRDVVSVDKGLTPLSLANENWRKPRVLDTNDRKEVWQGKELHGRFYRALHGPDVDFLASVAWLRFGDLFGETEGFVCAIMDEVMMTNNYRKYIVKDGTVDICRACHRPGESIRHIISGCSRLANGEYLHRHNLVAKIIHQQLALKYNLVESEVPYYKYVPDPVLDDGNITLY

SEQ ID NO: 27239 - protein, 1114 aa, Xestia xanthographa
MRWTQSINENVMRAYYGATEGGSNLTAYRSRMLSLFQVLEPAVSVEVQRLSDQVRVIQRNHMLDDTVLDRLRFESRSNLVTPASPMIAVQQQNIPSAPPRSDYDGEEDRDEVISVSTQCNAQLRSALEGAFQEYRSTPPELRPRLPRLPMHNKNKALMCALDSQLSNCFDSSKDLADTHSILYCGAVAACRVAHVKFPNNDRATRPKLAVPAWQCRIERRIGEARALIGKLICFREGNTRPRVMRFVRRAFSGTDISFRDYLARVTERIDSLKQKICAWASRIRRYKRRVERYTQNRTFQSDERWVYRAWERPDQGVTDTRLPDESATYSFWRNIWSVPVSHTEGDWTREVEQACDPIPEMGAIIISPQDVARAVRPLPNWKSPGPDGLHNFWIKWFQRSHARLASQFQSALESGSLPQFLTTGITHLLHESGSVAEPKNYRPITCLPTVYKVLTSILGAKINQHIDSNSIMSASQNGCRNGCRGTKELLLIDMAISQQVRRSRKNLSTCWIDYKKAYDSVPHTWLMKVLELYKIDATLRTFLMSCMGHWRTVLLYPGCRQIQGNSEPIRIERGIFQGDSLSPLWFCLALNPLSTLLERSGLGYLLRRDGQVISHLLYMDDLKLFAPNNLQLMKLLKVTETFSSAIRMEFGVDKCAVMHVKRGEIMESVGTQLSDSIHLRSLSSTETYKYLGMSEALGINTADVKQSLRERFFGRLNKVLGSLLSGGNKVCAFNGWVMPVLMYSFGILKWTQTELDALDRNTHRVRTLLTANRMHHPRSSVMRLYIPRKCGGRGFLNAKTLHNREVCSLRDYFLEADGEMHRDVVSVDKGLTPLSLANENWRKPKVLDTNDRKVEWQGKELHGRFYRALHGPDVDFLPSVSWLRFGDLFGETEGFICAIMDEVMMTNNYRKYIVKDSTVDICRACHRPGESIRHIISGCSSLANGEYLHRHNLVARIIHQQLALKYNLVESEVPYYKYAPDPVLDNGHITLYWDRPITTDRTVVANRPDIVVIDRLERRTMIVDITIPHDENLVKAEKDKQFKYLDLAREVVDMWDVGTAVIVPIVVSANGLIAKSLDQHLRRLSLGSWIKGLIQKAVLLDTARIVRRFLSQEP

SEQ ID NO: 27240 - protein, 957 aa, Xestia xanthographa
MLDDTVLDRLRSESRSNLVTPASPMIAVQQQNIPSAPPRSDYDGEEDRDKVISVSTQCNAQLKSALEGAFREYRSTPPELRPRLPRLPMHNKNKALMCALDSQLSNCFDSSKDLADTHSILYCGAVAACHVAHVKFPNNDRAPRPKLAVPAWQCRIERRIGEARALIGKLICFREGNTRPRVMRFVKRAFSGTDISFRDYLARVTERIDSLKQKICAWASRIRRYKRRVERYTQNCTFQSDERWVYRAWERPDQGVTDTRLPDDSVMYSFWRNIWSVPVSHTEGDWTREVEQACDPIPEMGAIIISPQDVARAVRPLPNWKSPGPDGLHNFWIKWFQRSHARLASQFQSALESGSLPQFLMTGITHLLHKSGSTAEPKNYRPITCLPTVYKVLTSILRAKINQHIDSNSIMSASQNGCRNGSQGTKELLLIDMAISQQVRRSRKNLSTCWIDYKKAYDSVPHTWLMKVLELYKIDATLRTFLMSCMGHWRTVHRYPGCRQIQGNSEPIRIERGIFQDDSLSPLWFCLALNPLSTLLERSGLGYLLRRDGQVISHLLYMDDLKLFAPNNLQLMKLLKVTETFSSAISMEFGVDKCAVMHVKRGEIMESVGTQLSDSIYLRSLSSTETYKYLGMSEALGINTADMKQSLRERFFGRLNKVLGSLLSGGNKVRAFNGWVMPVLMYSFSILKWTQTELDALDRRVRTLLTANRMHHPRSSVMRLFIPRKCGGRGFLNAKTLHNREVCSLREYFLEANGEMHRDVISVDKGLTPLSLANENWCKPKVLDTNDRKVEWQGKELHGRFYQALHGPDVDFLPSVSWLRFGDLFGETEGFICAIMDEVMMTNNYRKYIVKDGTVDICRACHRPGESIRHIISGCSSLANGEYLHRHNLVARIIHQQLALKYNLVESEVPYYKYAPDPVLDNGHITLYWVFFFFFVNLYLKSIFANANMTLCMFNKK

SEQ ID NO: 27241 - protein, 1196 aa, Mamestra brassicae
MLTRSRARAQTAQPTSSGSSLSSASQPPGPAPAVSPEIPVAAVASSSSDEYFSPPTTPPPARRRGRGRPPTSLGPRGPPASDRVPAIGGSVQRIRWTQTINENVMRSYYGATEGGTNLTAYRGRMLSLFQVLEPAVNVSAQRLSDQVRVILRNRMLDDAVLDRLRLESRSGRVSPASPPAAVQIQSSILPRSNNVGEDDDDGATSVSTQCNERLRSALEDAFREYRSTPPELRPRLPRLPMHNKNRALVCALDSQLTNCFDSSEDLADTHSILYCAAAAACRVAHVKFLNSDRATRPAVPAWQCRIERRIGEARALIGKLICFREGNTRRRVMRFVRRAFSGTDTSPRDYLTRVTERIDFLKQKIYAWANRIRRYKRRVERYTQNRTFQSNERWVYRAWERPDQGVTDTRLPDDDVMCSFWRNIWSVPVSHTEGDWIREVERACDPILEMGATTISPQDVARAVRPLPNWKSPGPDGLHNFWIKWFTGSHARLASQFQSALESGSLPQFLTTGITHLLHKSGSTAEPKNYRPITCLPTVYKVLTSILRAKINHHIESNSIMSASQNGCRNGSRGTKELLLMDIAISQQVRRSRKDLSTCWIDYKKAYDSVPHTWLMRVLELYKVDAVLRTFLMSCMGQWRTVLRYPGCRQIQVNGDPIRIERGIFQGDSLSPLWFCLALNPLSTLLEGSGQGYRLRRGGQVISHLLYMDDLKLFAPNNLQLMELLKVTETFSSAISMEFGVDKCAVMHVKRAEIMESVGTQLSDSIHLRSLSSTETYKYLGMSEALGINANDMKQSLKERFFGRLNKVLNSLLSGGNKVRAFNGWVMPVLMYSFGILKWTQTELDALDRRVRSLLTANRMHHPRSSVMRLYIPRKCGGRGFLNAKTLHNREICSLREFFLEADVGMHRDVVAVDKGLTALSLANENWRKPVVLDTNDRRKVWQSKELHGRFYRVLHGPDVDFLASVAWLRFGDLFGETEGFVCAIMDEVMMTNNYRKYIVKDICRACHRPGESIRHIISGCSSLANGDYLHRHNLVARIIHQQLALKYNLVESEVPYYRYVPDPVLENGNCTLYWDRSIITDRTIVANKPDIVVIDRLERRAMIVDIAVPHDVNLVKTEKDKQTKYLDLAREVVDMWDVNTAVIVPIVVTANGIIAKSLDQHLKRLSLGSWIKGLIQKAVLLDTARIIRRFLSQGP

SEQ ID NO: 27242 - protein, 1198 aa, Hecatera dysodea
MLTRSRTRAQTTQSTSSGSSLSSASQPPGPTPAVSPEIPVAAVASSSSDEYFSPPTTPPPARRRGRGRPPTSLGPRGPPASDRVPAIGGSVQRMRWTQSINENVMRSYFGATEGGTNLTAYRGRMLSLFQVLEPAVNVSAQRLSDQVRVIQRNRMLDDAVLDRLRLESRSSRVSPASPPAAVQIQPSISPRPDHVSEDVDDGAITVSTQCNERLRSALEDAFREYRSTPPELRPRLPRLPMHNKNRALVCALDSQLENCFNSSKDLADTHSILYCAAAAACRVAHVKFPNSDRATRPAVPAWQCRIERRIGEARALIGKLICFREGNTRRRVMRFVRRAFSGTDISPRDYLTRVTERIDFLKQKVYAWASRIRRYKRRVERYTQNRTFQSNERWVYRAWERPDQVVTDTHLPDDDAMCSFWRSIWSVPVSHTEGDWTREVERTCDPIPEMGAITISPQDVARAVRPLPNWKSPGPDGLHNFWIKWFTRSHIRLASQFQSALESRSLPQFLTTGITHLLHKSGSTAEPKNYRPITCLPTVYKVLTSILRAKINDHIESNSIMSTSQNGCRNGARGTKELLLIDVAISQQVRRSRKDLSTCWIDYKKAYDSVPHTWLMRVLELYKVDAVLRAFLMSCMGQWRTVLHYPGCRQTQANSEPIRIERGIFQGDSLSPLWFCLALNPLSTLLEGSGQGYRLRRGGQVISHLLYMDDLKLFAPNNLQLMKLLKVTETFSSDISMEFGVDKCAVMHVKRGEIMESVGTQLSDSIHLRSLCSTETYKYLGMSEALGINATSVKQSLKERFFGRLNKVLNSLLSGGNKVRAFNGWVMPVLMYSFGILKWTQTELDALDRTSLLTANRMHHPRSSVMRLYIPRKCGGRGFLNAKTLHNREVCSLREYFLEADVGMHRDVVAVDKGLTPLSLANENWRKPVVLDTNDRREVWQSKELHGRFYRVLHGPDVDFLASVAWLRFGDLFGETEGFICAITDEVMMTNNYRKYIVKDGTVDICRACHRPGESIRHIISGCSSLANGDYLHRHNLVARIIHQQLALKYNLVESEVPYYRYVPDPVLENGNCTLYWDRSIITDRTIVANKPDIVVIDRLERRAMIVDIAIPHDENLVKAEKDKQSKYLDLAREVVDMWNVNTAVIVPIVVTANGIIAKSLDQHLKRLSLGSWIKGLIQKAVLLDTARIVRRFLSREP

SEQ ID NO: 27243 - protein, 1083 aa, Noctua janthe
MLTRSRAKHQAHPPSPDSSLSSASQPPGRASIVSAVSPIAAVASSSSDEFFSPPSTPSPPRRRGRGRPPAGLGPRGQQAPNRVPAADGNVSRMRWTQSINENVMRAYYGATEGGSNLTAYRGRMLSLFQVLEPGVSVSAQRLSDQVRVIQRNHMLDDTVLERLRFDSRSNLVIPASPMIAVQLQNVSSAPPRSEHDGEEDDDEVISVSTQCNAQLRSALEGAFREYRSTPPELRPRLPRLPMHKKNKALVCALDSQLSNCFDSSKDLADTHSILYCGAVAACRVAHVKFPNNDRATRPKFAVPAWQCRIERRIGEARALIGKLICFREGNTRPRVMRFVKRAFSGTDVSFRDYLARVTERIDFLKQKICAWASRIRRYKRRVERYTQNRTFRSDERWVHRAWERPDQGVTDTRLPDDDAMCSFWRNIWSVPVSHTEGDWTREVERACDSIPEMGAIIISPQDVARAVRPLPNWKSPGPDGLHNFWIKWFQRSHVRLASQFQSALESGSLPQFLTTGITHLLHKSGSIAEPKNYRPITCLPTVYKVLTSILRAKINHHIDSNSIMSASQNGCRNGSRGTKELLLIDMAISQQVRRSRRDLSTCWIDYKKAYDSVPHTWLMRVLELYKVDATLRTFLMSCMGHWRTVLRYPGCRQIQGNSEPIKIERGIFQGDSLSPLWFCLALNPLSTLLEGSGLGYRLRRGGQVISHLLYMDDLKLFAPNNLQLMKLLKVTETFSSAIRMEFGVDKCAVMHVKRGEIMESVGTQLSDYIHLRSLSSTETYKYLGMSEALGINTADMKQSLRDRFFGRLNKVLSSLLSGGNKVRAFNGWVMPVLMYSFGILKWTQTELDALDRRVRALLTANRMHHPRSSVMRLYIPRKCGGRGFLNAKTLHNREICSLREYFLEVDEGMHRDVVSVDKGLTPLSLANENWRKPRVLDTNDRKEVWQGKELHGRFYRALHGPDVDFLASVSWLRFGDLFGETEGFVCAIMDEVMMTNNYRKYIVKDGTVDICRACHRPGESIRHIISGCSRLANGEYLHRHNLVARIIHQQLALKYNLVESEVPYYKNKKNKNKNNIYLLKNMV

SEQ ID NO: 27244 - protein, 1194 aa, Mamestra brassicae
MLTRSRARAQTAQPTSSGSSLSSASQPPGPAPAVSPEIPVAAVASSSSDEYFSPPTTPPPARRRGRGRPPTSLGPRGPPASDRVPAIGGSVQRMRWTQTINENVMRSYYGATEGGTNLTAYRGRMLSLFQVLEPAVNVSAQRLSDQVRVILRNRMLDDAVLDRLRLESRSGRVSPASPPAVVQIQSSISPRSNNVGEDDDDGAISVSTQCNERLRSALEDAFREYRSTPPELRPRLPRLPMHNKNRALVCALDSQLTNCFDSSEDLADTHSILYCAAAAACRVAHVKFLNSDRATRPAVPAWQCRIERRIGEARALIGKLICFREGNTRRRVMRFVRRAFSGTDTSPRDYLTRVTERIDFLKQKIYAWANRIRRYKRRVERYTQNRTFQSNERWVYRAWERPDQGVTDTRLPDDEVMCSFWRNIWSVPVSHTEGDWIREVERACDPILEMGAITISPQDVARAVRPLPNWKSPGPDGLHNFWIKWFTGSHVRLASQFQSALESGSLPQFLTTGITHLLHKSGSTAEPKNYRPITCLPTVYKVLTSILRAKINHHIESNSIMSASQNGCRNGSRGTKELLLMDIAISQQVRRSRKDLSTCWIDYKKAYDSVPHTWLMRVLELYKVDAVLRTFLMSCMGQWRTVLRYPGCRQIQVNSDPIRIERGIFQGDSLSPLWFCLALNPLSTLLEGSGQGYRLRRGGQVISHLLYMDDLKLFASLLLKVTETFSSAISMEFGVDKCAVMHVKRGEIMESVGTQLSDSIHLRSLSSTETYKYLGMSEALGINANDMKQSLKERFFGRLNKVLNSLLSGGNKVRAFNGWVMPVLMYSFGILKWTQTELDALDRRVRSLLTANRMHHPRSSVMRLYIPRKCGGRGFLNAKTLHNREICSLREFFLEADVGMHRDVVAVDKGLTALSLANENWRKPVILDTNDRREVWQSKELHGRFYRVLHGPDVDFLASVAWLRFGDLFGETEGFVCAIMDEVMMTNNYRKYIVKDGTVDICRACHRPGESIRHIISGCPSLANGDYLHRHNLVARIIHQQLALKYNLVESEVPYYRYVPDPVLENGNCTLYWDRSIITDRTIVANKPDIVVIDRLERRAMIVDIAVPHDENLVKTEKDKQTKYLDLAREVVDMWDVNTAVIVPIVVTANGIIAKSLDQHLKRLSLGSWIKGLIQKAVLLDTARIVRRFLSQGP

SEQ ID NO: 27245 - protein, 1198 aa, Xestia c-nigrum
MLTRAAARRARLPPPDPSLSSASPPPEPSPIVSAVTPAVAVASSSSDEYFSPPTTPPPVRRRGGRRPPDGLGPRGPPASDRVPAPGGSVQRMRWTQSNNENVMRAYYGATEGGNNLTAYRVRMLSLFQVLEPAVNVSAQRLSDQVRVIQRNRMLDDTVLDRLRTEMHSNHVIATPPSQAVVPPQSTTITNRDDDVSSDMITNVGTQYSEDMRSALEGAIREYRFMTPGLRPRLPRLPMHNKNRMLVAVLDSQLSNYFDNCEDLTDVHSVLYCAAVAACRVARVKFPDDRATRPKPAVPAWQYRIEQRIGGARALIGKLICFREGNTRPRVMRFVRRAFSGTDINPRDYMSRVTERIDFLKQKVYAWASRIRRYKRRVDRYTQNRTFQRDERWVYRAWERPDQGVADTRLPDDDAMCSFWRSIWSVPVSHAEGEWTRVVERACDPVPEMGAITISPQDVACAVRPLPNWKSPGPDGLHNFWIKWFTRSHARLATLFQSALESGSLPEFLTTGITHLLHKSGSTAEPKNYRPITCLPTVYKVLTSILRAKITKHIDENSVMSASQNGCRNGSRGTKELLLIDMAISQQVRRSRKDLSTCWIDYKKAYDSVPHTWLMRVLELYKVDATLRTFLMSCMGQWRTVLRYPGCRQIQRNSEPIRIERGIFQGDSLSPLWFCLALNPLSTLLEDSGLGYQLRKDGRVISHLLYMDDLKLFATNDFQLMELLKVTETFSSAIRMEFGVDKCAVMHVKRGEIVESVGTQLSDSINLRSLSATETYKYLGMSEALGINVADMKQSLKERFFGRLKKVFNSLLSGGNKVRAFNGWVMPVLMYSFGILKWTQTELDALDTKVRKLLTAFRMHHPRSSVMRLYIPRKCGGRGFLNAKTLHNREICSLRDYFLEADVGMHRDVVAMDKGLTPLSLAKENWRKPIILTTDDRRKEWQGKELHGRFYRALHGPDVDFLASVSWLRSGDLFGETEGFVCAIMDEVMMTNNYRRFIVKDGTVDICRACHRPGESIRHIISGCSRLANGEYLHRHNLVARIIHQQLALKYNLVESEVPYYRYVPDPVLVNGSITLYWDQSIITDRTVIANRPDIVVMDRSERRAIIVDITVPHDENLVKAEKDKQIKYLDLAREVVDMWEVDSAIIVPIVVSAHGLIAKSLDQHLRRLSLGSWIKGLIQKAVLLDTARIVRRFLSLEP

SEQ ID NO: 27246 - protein, 1095 aa, Xestia xanthographa
MITRSRAKQHQEAHPPSPGSSLSSASQRPGRATPVSTVSPVAAVASSSSDEFFSPPSTPSPSPRRGRRRGRGRPPAGLGPRGQQAPSRVPAAGGNVSRIRWTQSMNENVMRAYYGATEGGINLTAYRGQMLSLFQVLEPGVSASAQRLSDQVRVIQRNHMLDDTVLDRLRSESRSNLVMPASPLLAVQVQNVSSAPPRSDRDGEEDDSEVISVSTQCNAQLRSALESAFREYRSTPPELRPRLPRLPMHNKNKALVCALDSQLSNCFDSSKDLADTHSILYCGAVAACRVAHVKFLNNDRATRPKLAAPAWQCRIEWRIGEARALIGKLICFREGNTRPRVMRFVRRAFSGTDISFRDYLARVTERIDSLKQKICAWASRIRLYKRRVERYTQNRTFQSDERWVYRAWERPDQGVTDTCLPDDNAMCSFWRSIWSVPVSHTEGDWTREVEQACNPIPEMGAIVISPQDVARAVRPLPNWKSPGPDGLHNFWIKWFQRSHACLASQFQSALESGSLPQFLTTGITHLLHKSGSAAEPKNYRPITCLPTVYKVLTSILRAKINQHVESNSIMSASQNGCRNGSRGTKELLLIDMTISQQVRRSRKNLSTCWIDYKKAYDSVPHTWLMRVLELYKVDATLRTFLTSCMGQWRTVLRYPGCRPIQGTSEPIRIERGIFQGDSLSPLWFCLALNPLSTLLERSGLGYLLRRNGRVISHLLYMDDLKLFAPNNLQLMMLLKVTETFSSAIRMEFGVDKCAVMHVKRGEIMESVGTQLSDSIHLRSLSSTETYKYLGMSEALGINTADVKQSLRERFFGRLNKVLGSLLSGGNKVRAFNGWVMPVLMYSFGILKWTQTELDALDRRVRTLLTTNRMHHPRSSVMRLYITRKCGGRGFLNAKALHNREVCSLREYFLEADGEMHRDVVSVDKGLTPLSLANENWRKPKVLNTNDRKEEWQSKELHGRFYRALHGPDVDFLASVSWLRFGDLFGETEGFVCAIMDEVMMTNNYRKYIVKDGTVDICRACNRPGESIRHIISGCSSLANGEYLHRHNLVARIIHQQLAMKYNLVESEVPYYRYAPDPVLDNGNKYHVVLGSTYHH

SEQ ID NO: 27247 - protein, 1250 aa, Xestia xanthographa
MSPMLTRHRAKLQKEAHPPSPGSSLSSASQPPGRATPVSTVSPVAAVASSSSDEFFSPPSTPPPPPRGRRRGRGRPPAGLGPRGQQAPSRVPAAGGNVSRMRWTQSINENVMRAYYGATEGGSNLTAYRSRMLSLFQILEPAVSVEAQRLSDQVRVIQRNHMLDDTVLDHLRSESRSNLVTPASPMIVVQQQNIPSAPPRSDYDGEEDRDEVISVSTQCNAQLRSALEGAFREYRSTPPELRPRLPRLPMHNKNKALMCALDSQLSNCFDSSKDLTDTHSILYCGAVAACRVAHVKFPNNDGATRPKLAVPAWQCRIERRISEARALIGKLICFREGNTRPRVMRFVRRAFSGTDISFRDYLARVTERIDSLKQKICAWASRIRRYKRRVERYTQNRTFQSDERWVYRAWERPDQGVTDTRLPDDSAMYSFWRNIWSVPVSHTEGDWTREVEQACDPIPEMGAIIISPQDVARAVRPLPNWKSPGPDGLHNFWIKWFQRSHARLASQFQSALESGSLPQFLTTGITHLLHKSGSAAEPKNYRPITCLPTVYKVFTSILRAKINQHIDSNSIMSASQNGCRNGSRGTKELLLIDMAISQQVRRSRKNLSTCWIDYKKAYDSVPHTWLMRVLELYKIDATLRTFLMSCMGHWRTVLRYPGCRQIQGNSEPIRIERGIFQGDSLSPLWFCLALNPLSTLLERSGLGYLLRRDGQVISHLLYMDDLKLFAPNNLQLMKLLKVTETFSSAIRMEFGVDKCAVVHVKRGEIMESEGTQLSDSIHLRSLSSTETYKYLGMSEALGINTADMKQSLRERFFGRLNKVLGSLLSGGNKVRAFNGWVMPVLMYSFGILKWTQTELDALDRRVRTLLTANRMHHPRSSVMRLYIPRKCGGRGFLSAKTLHNREVYSLREYFLEADGEMHRDVVSVDKGLTPLSLANGNWRKPKVLDTNDRKVEWQGKELHGRFYRALHGPDVDFLASVSWLRFGDLFGETEGFICAIMDEVMMTNNYRKYIVKDGTVDICRACHRPGESIRHIISGCSSLANGEYLHRHNLVARIIHQQLALKYNLVESEVPYYKYAPDPVLDNGHITLYWDRPITTDRTVVANRPDIVVIDRLERRTMIVDITIPHDENLVKAEKDKQFKYLDLAREVVDMWDVGTAVIEYYSNPETYEPTNKSVPRSRAAPLHRMISLALFPAWRLQACDRSARRAASPVRCLRARHMYVFLSTSRASRYVTPRADIVREILRFRTILL

SEQ ID NO: 27248 - protein, 1068 aa, Mamestra brassicae
MLTRAAAQRARLPPPASSLSSASPPPEPSPTVSAVIPAVAVASSSSDEYFSPPTSPPPARRRRGRRPPDGLGPRGPPASDRVPAPGGSVQRMRWTQTINENVMRSYYGATEGGTNLTAYRGRMLSLFQVLEPAVNVSAQRLSDQVRVIQRNRMLDDAVLDRLRLESRNGRVSAASPPAAVQIQFSVSPRPNIVGEDDDDGAISVSTQCNERLRSALEDAFREYRSTPPELRPRLPRLPMHNKNRALVCALDSQLANCFDSSEDLADTHSILYCAAAAACRVAHVKFPNSDRATRPAVPAWQCRIERRIGEARALIGKLICFREGNTRRRVMRFVRRAFSGTDTSPRDYLTRVTERIDFLKQKIYAWANRIRRYKRRVERYTQNRTFQSNERWVYRAWERPDQGVTDTRLPDDDVMCSFWRNIWSVPVSHTEGDWTREVERACDPIPEMGAITISPQDVARAVRPLPNWKSPGPDGLHNFWIKWFKRSHARLASQFQSALESGSLPQFLTTGITHLLHKSGSTAEPKNYRPITCLPTVYKVLTSILRAKINQHIETNSIMSASQNGCRNRSRGTKELLLIDVAISQQVRRSRRDLSTCWIDYKKAYDSVPHTWLMRVLELYKVDAVLRTFLMSCMGQWRTVLRYPGCRQIQANSDLIRIERGIFQGDSLSPLWFCLALNPLSTLLEGSGQGYRLRRGGQVISHLLNMDDLKLFAPNNLQLMKLLKVTETFSSAISMEFGVDKCAVMHVKRGEIMESVGTQLSDSIHLRSLSSTETYKYLGMSEALGINANDVKQSLKERFFGRLNKVLNSLLSGGNKVRAFNGWVMPVLMYSFGILKWTQTELDALDRRVRSLLTANRMHHPRSSVMRLYIPRKCGGRGFLNAKTLHNREICSLREFFLEADVGMHRDVVAVDKSLTALSLANENWRKPVVLDTNDRREVWQSKELHGRFYRVLHGPDVDFLASVAWLRFGDLFGETEGFVCAIMDEVMMTNNYRKYIVKDGTVDICRACHRPGESIRHIISGCSSLANGDYLHRHNLVARIIHQQLALKYNLVESEVPYYRYVPDPVL

SEQ ID NO: 27249 - protein, 1072 aa, Cosmia trapezina
MLTRSRAQHLRNTHPTSSGSSLSSASQLPEPAPDVSQVIPAAAVASSSSDEYFSPPTTPPPVRRRGRGRPPASLGPRGPPASDRVPAPGGSVQRMRWTQTVNENVMRAYFGATEGGSNLTAYRGRMLSLFQVLEPAVNVSAQRLSDQVRVIQRNHMLDDVVLDRLRLESRNSRVTSDSPMVAVQLQNLPSASPRPDRVGEEDDSGAISVSSQCNVQLRSALEDAFREYRSAPPGLRPRLPRLPMHKKNKALVCALDSQLSNCFDGSKDLADTHSILYCAAVAACRVAHVKFHNNDRVTRPKPAVPTWQCRIERRIGEARALIGKLICFREGNTRPRVMRFVRRAFSGMDISPRDYLTCVTERIDFLKQKICAWANRIRRYRRRVERYTQNRTFQSDERCVYRAWERPDQGVADTRLPDDDAMCSFWRSIWSVPVSHTEGDWTREVERACDHIPQMGALTISPQDVARAVRPLPNWKSPGPDGLHNFWIKWFQRSHARLASQFQSALQSGSLPQFLTTGITHLLHKSGSTAEPRNYRPITCLPTVYKVLTSILRAKINKHIDTNSIMSASQNGCGNGSRGTKELLLIDMTISQQVRRSRKDLSTCWIDYKKAYDSVPHTWLMRVLELYKIDATLRTFLMSCMGQWRTVLRYPGCRNIQRNSEPIRIERGIFQGDSLSPLWFCLALNPLSTLLEDSGLGYRLRRGGQVISHLLYMDDLKLFAPNNLQLMELLKVTETFSSAIRMEFGVDKCAVMHVKRGEIVESVRTQLSDSIHLRSLSSLETYKYLGMSEALGINAADMKQSLRERFFGRLNKVLNSLLSGGNKVRAFNGWVMPVLMYSFGILKWTQTELDALDRRVRTLLTANRMHHPRSSVMRLYIPRKCGGRGFLNAKTLHNREVCSLREYFLEADVGMHREVVSVDKGLTPLSLANENWRKPIVLDTNDRREVWQSKELHGRFYRVLHGPDVDFLASVSWLRFGDLFGETEGFVFAIMDEVMMTNNYRKYIVKDGTVDICRACHRPGESIRHIISGCSRLANGDYLHRHNLVARIIHQQLALKYSLVESEVPYYRWAHT

SEQ ID NO: 27250 - protein, 1199 aa, Mamestra brassicae
MLTRAAAQRARLPPPASSLSSASPPPEPSPTVSAWIPAVAVASSSSDEYFSPPTSPPPARRRRGRRPPDGLGPRGPPASDRVPAPGGSVQRMRWTQTINENVMRSYYGATEGGTNLTAYRGRMLSLFQVLEPAVNVSAQRLSDQVRVIQRNRMLDDAVLDRLRLESRNGRVSAASPPAAVQIQSSVSPRPNIVGEDDDDGAISVSTQCNERLRSALEDAFREYRSTPPELRPRLPRLPMHNKNRALVCALDSQLANCFDSSEDLADTHSILYCAAAAACRVAHVKFPNSDRATRPAVPAWQCRIERRIGEARALIGKLICFREGNTRRRVMRFVRRAFSGTDTSPRDYLTRVTERIDFLKQKIYAWANRIRRYKRRVERYTQNRTFQSNERWVYRAWERPDQGVTDTRLPDDDVMCSFWRNIWSVPVSHTEGDWTREVERACDPIPEMGAITISPQDVARAVRPLPNWKSPGPDGLHNFWIKWFKRSHARLASQFQSALESGSLPQFLTTGITHLLHKSGSTAEPKNYRPITCLPTVYKVLTSILRAKINQHIEANSIMSASQNGCRNRSRGTKELLLMLDVAISQQVRRSRRDLSTCWIDYKKAYDSVPHTWLMRVLELYKVDAVLRTFLMSCMGQWRTVLRYPGCRQIQANSDPIRIERGIFQGDSLSPLWFCLALNPLSTLLEGSGQGYRLRRGGQVISHLLYMDDLKLFAPNNLQLMKLLKVTETFSSAISMEFGVDKCAVMHVKRGEIMESVGTQLSDSIHLRSLSSTETYKYLGMSEALGINANDVKQSLKERFFGRLNKVLNSLLSGGNKVRAFNGWVMPVLMYSFGILKWTQTELDALDRRVRSLLTANRMHHPRSSVMRLYIPRKCGGRGFLNAKTLHNCEICSLREFFLEADVGMHRDVVAVDKGLTALSLANENWRKPVVLDTNDRREVWQSKELHGRFYRVLHGPDVDFLASVAWLRFDDLFGETEGFVCAIMDEVMMTNNYRKYIVKDGTVDICRACHRPGESIRHIISGCSSLANGDYLHRHNLVARIIHQQLALKYNLVESEVPYYRYVPDPVLENGNCTLYWDRSIITDRTIVANKPDIVVIDRLERRAMIVDIAVPHDENLVKTEKDKQTKYLDLAREVVDMWDVNTAVIVPIVVTANGIIAKSLDQHLKRLSLGSWIKGLIQKAVLLDTARIVRRFLSQGP

SEQ ID NO: 27251 - protein, 1043 aa, Hecatera dysodea
MLDDAVLDRLRLESRSSRVSPASPPAAVQIQPSISPRPDHVSEDVDDGAITVSTQCNERLRSALEDAFREYRSTPPELRPRLPRLPMHNKNRALVCALDSQLENCFNSSKDLADTHSILYCAAAAACRVAHVKFPNSDRATRPAVPAWQCRIERRIGEARALIGKLICFREGNTRRRVMRFVRRAFSGTDISPRDYLTCVTERIDFLKQKVYAWASRIRRYKRRVERYTQNRTFQSNERWVYRAWERPEQVVTDTHLPDDDAMCSFWRSIWSVPVSHTEGDWTREVERTCDPIPEMGAITISPQDVARAVRPLPNWKSPGPDGLHNFWIKWFTRSHVRLASQFQSALESRSLPQFLTTGITHLLHKSGSTAEPKNYRPITCLPTVYKVLTSILRAKINDHIESNSIMSTSQNGCRNGARGTKELLLIDVAISQQVRRSRKDLSICWIDYKKAYDSVPHTWLMRVLELYKVDAVLRAFLMSCMGQWRTVLHYPGCRQTQANSEPIRIERGIFQGDSLSPLWFCLALNPLSTLLEGSGQGYRLRRGGQVISHLLYMDDLKLFAPNNLQLMKLLKVTETFSSDISMEFGVDKCAVMHVKRGEIMESVGTQLSDSIHLRSLCSTETYKYLGMSEALVTSVKQSLKERFFGRLNKVLNSLLSGGNKVRAFNGWVMPVLMYSFGILKWTQTELDALDRRVRSLLTANRMHHPRSSVMRLYIPRKCGGRGFLNAKTLHNREVCSLREYFLEADVGMHRDVVAVDKGLTPLSLANENWRKPVVLDTNDRREVWQSKELHGRFYRVLHGPDVDFLASVAWLRFGDLFGETEGFICAITDEVMMTNNYRKYIVKDGTVDICRACHRPGESIRHIISGCSSLANGDYLHRHNLVARIIHQQLALKYNLVESEVPYYRYVPDPVLENGNCTLYWDRSIITDRTIVANKPDIVVIDRLERRAMIVDIAVPHDENLVKAEKDKQSKYLDLAREVVDMWNVNTAVIVPIVVTANGIIAKSLDQHLKRLSLGSWIKGLIQKAVLLDTARIVRRFLSREP

SEQ ID NO: 27252 - protein, 1191 aa, Mamestra brassicae
MLTRSRARHLATHPSPSASSLSSASPPPEPSPTVSAVTPAVAVASSSSDEYFSPPTTPPPARRRRGRRPPDGLGPRGPPASDRVPAPGGSVQRMRWTQSINENVMRSYFGATEGGTNLTAYCGRMLSLFQVLEPAVNVSAQRLSDQVRVIQRNRMLDDSVLDRLQMEMCGHVITPPSQTVAPPQSQISSHADEESNDRVTNVSTQCNEELRSALECAIREYRYVPPELRPRLPRLPMHNKNRALVAALDSQLSNYFDDCEDLTDTHSIMYCAAVAACRVAHVKMTNDRVTRPKPAVPAWQCRIEHPIGGARALIGKLICFREGNTRPRVMRFVRRAFSGTDISPRDYMSRVTERIDFLKQKVYAWANRIRRYRRREERYTQNRTFRSNERWVYRVWEQPDQGVTDTRLPDDDAMCSFWRNIWSVPVSHTEGGWIREVERACDPLPEMGAITISPQDVARAVRPLPNWKSPGPDGLHNFWIKWLQRSHARLASQYQTALESGSLPEFLTTGVTHLLHKSSSTAEPKNYRPITCLPTVYKVLTSILRAKINNHINSNNIMSVSQNGCRNGSRGTKELLLIDMAISQQDLSTCWIDYKKAYDSVPHTWLMRVLELYKIDTMLRTFLMSCMGQWRTVLRYPGCRNIQRNSEPVRIERGIFQGDSLSPLWFCLALNPLSTLLENSGLGYRLKRGGQVISHLLYMDDLKLFAPSNLQLMKLLKVTETFSSAIRMEFGVDKCAVMHVKRGEIMESVGTQLSDSINLRSLSSTETYKYLGMSEALGINVTDMKQSLKERFFGRLKKVFNSLLSGGNKVRAFNGWVMPVLMHSFGVLKWTQTELDALDRRVRTLLTAYRMHHPRSSVMRLYIPRKCGGRGFLNAKTLHNREICSLREYFLAVDVGMHRDVVAVDKGLTPLSLANENWRKPAVLDTNDRRAVWQSKELHGRYFRALHGPDVDQLASVAWLRFGDLFGETEGFVCAIMDEVIMTNNYRRFIVKDGTVDICRACHRPGESIRHIISGCSRLANGEYLHRHNLVARIIHQQLALKYSLVESEVPYYRYAPDPVLDNGNITLYWDRSIITDRTIVANKPDIVVVDRIERRAMIADITVPHDENLVKAEKDKQIKYIDLAREVVDMWDVDSAIIVPIVVSANGLIATSLDQHLRRLSLGSWIKGLIQKAVLLDTARIVRRFLSLEP

SEQ ID NO: 27253 - protein, 1115 aa, Mythimna ferrago
MLTRAAARRARPPPPASSLSSASPPPEPSPIVCAVTPAVAAASSSSDEYYSPPTTPPPTRRRGGRRPPDCLGPRGPPASDRVPAPGGSVQRMRWTQSINENVMRSYYGATEGGNNLTAYRVRMLSLFQVLEPAVNVSAQRLSDQVRVILRNHMLDDTVLDRLRSEMSDRVITPPSQPMVPAVVPPSSYIFFHTDEVSSDTVTNVSNQCNSELRSALECAIREYRNIPPELRPRIPRLPMCNKNRALVAALDSQLSNYFDDCEDLTDTHSIMYCAAVAACRVAHVKFPNSDVATRPKPAVPAWQCRIERRIGGARALIGKLICFREGNTRPRVMRFVRRAFSGTDISPRDYMSRVTERIDFLKQKVYAWANRIRRYKRRVERYTQNRTFRSNERWVYRAWERPDQGVTDARLPDDDAMSSFWRSIWSVPVSHTEGDWTREVERACDPIPQMGAIDISPQDVARAVRPLPNWKSPGPDGLHNFWIKWFTRSHARLAYQFQSALESGSLPQFLTTGITHLLHKSGSTAEPKNYRPITCLPTVYKVLTSILRSKINSHIDENSIMSPSQNGCRNGSRGTKELLLIDMTISQQVRRSRKDLSTCWIDYRKAYDSVPHTWLMRVLELYKIDTTLRTFLMSCMRQWITVLRYPGCRNIQRNSEPVRIERGIFQGDSLSPLWFCLALNPLSTLLENSGLGYRLKRGGQVISHLLYMDDLKLFAPNNLQLMELLKVTETFSSAIRMEFGVDKCAVMHVKRGEVVESVSTQLTDSINLRSLSPTETYKYLGMSEALGINITDMKQSLRERFFGRLKKVFNSLLSGGNKVRAFNGWVMPVLMYSFGVLKWTQTELDALDRRVRTLLTAYRMHHPRLSVMRLYIPRKCGGRGFLNAKTLHNREVCSLREYFLAAAVGMHRDVVALDKGLTPLSLANENWRKPIVLDTNDRREVWQSKELHGRFFRALHGPDVDQLASVAWLRFGDLFGETEGFVCAIMDEVIMTNNYRRFIVKDGTVDICRACHRPGESIRHIISGCSRLANGEYLHRHNLVARIIHQQLALKYSLVESEVPNYRYEPDPVLDNGHITLYWDRPIITDRTIVANKPDLASVHHHYGGGPKREACNDC

SEQ ID NO: 27254 - protein, 1199 aa, Mythimna ferrago
MLTRAAARRARPPPPASSLSSASPPSEPSLTESAVTPAVAAASSSSDEYYSPPTTPPPTRRRGGRRPPACLGPRGPPASDRVPAAGGSVPRMRWTQSTNENVMRAYYGATEGGNNLTAYRVRMLSLFQVLEPAVNVSAQRLSDQVRVIQRNHMLDDTVLDRLRTEMSDRVITAPSQPVVPVVAPPPSHISFHTDEVSTDTVTNVSTQCNNELRSALECAIREYRNMPLEFRPRLPRLPMRNKNKALVAALDSQLSNYFDDCEDLTDTHSIMYCAAVAACRVAHVKFPNSDVATRPKPAVPAWQCRIERRIGGARALIGKLICFREGNTRPRVMRFVRRAFSGTDISPRDYMSRVTERIDFLKQKVYAWANRIRRYKRRVERYTQNGTFRSNERWVYRAWERPDQGVTDTRLPDDDAMCLFWRNIWSVPVSHTEGGWTREVERACESITEMGAITISPQDGARAVRPLPNWKSPGPDGLHNFWIKWLQRSHARLASQYQAALESGSLPEFLTTGVTHLLHKSGSTAEPKNYRPITCLPTVYKVLTSILRAKINHHVDNNAIMSASQNGCRNGSRGTKELLLIDMAISQQVRRSRKDLSTCWIDYKAYDSVPHTWLMRVLELYKVDATLRTFLMSFMRQWRTVLRYPGCRNIQRNSEPVRIERGIFQGDSLSPLWFCLALNPLSTLLENSGLGYRLKRGGQAISHLLYMDDLKLFAPNNLQLMELLKVTETFSSAIRMEFGVDKCAVMHIKRGEIVESVGIQLSDSIHLRSLSPTETYNYLGMSEALGINAIDMKQSLKERFFGRLKKVLNSLLSGGNKVRAFNGWVMPVLMYAFGVLKWTQTELDALDRRVRTLLTAYRMHHPRSSVMRLYIPRKCGGRGFLNAKTLHNREVCSLREYFLAADGGMHRAVVAVDKGLTPLSLVNENWRKPVVLDTNVRKEVWQSKELHGRFFRALHGPDVDQLASVAWLRVGDLFGETEGFVCAIMDEVIMTNNYRRFIVKDGTVDICRACHRPGESIRHIISGCSRLANGEYLHRHNLVARIIHQQLALKYSLVESEVPYYRYVPNPVLDSGDITLYWDRSIITDRTIVANKPDIVVVDRRERRAMIVDISVPHDENLVKAEKDKQIKYIDLAREVVDMWNVDSAIIVPIVVSANGLIAKSLDQHLRRLSLSGWIKGLIQKAVLLDTARIVRRFLSLEP

SEQ ID NO: 27255 - protein, 1206 aa, Atethmia centrago
MLTRAAAARRARLPPPDSSLSSASPPPVPSSPAVTTPAAVVASSSSDEYFSPPTTPPPVRRQGGRRPPDGLGPRGPPASDRVPAPGGSVQRMRWTRSINENVMRSYYGATEGGNNLTAYRVRMLSLFQVLEPAVNVSAQRLSDQVRVIQRNHMLDDTVLERLRSEIQSSHVIAPPSQTVVVLPQLDTHQADEGSDDRATNVSTQCNVELRSALEDAIREYRFMSPEVRPRLPRLPMHKKNRALVAVLDSQLSNYFDDCEDLTDTHSILYCAAVAVCRVAHVIFPNDSRATRPKPTVPIWQYRIERRIGGARALIGKLICFREGNTRPRVMRFVRRAFSGTDISPQDYMSRVTERIDFLKQKVYAWANRIRRYKRRVDRYTQNRTFQSDERWVYRGWEQRDQGVTDTRLPDDDVMCSFWRSIWSVPVSHTEGDWARKVERACDPLPEMGAITICPQDVARAVRPLPNWKSPGPDGLHNFWLKWFLGSHARLAAQYQTALESGSLPQFLTIGVTHLLHKSGSTAEPKNYRPITCLPTVYKVLTSILRAKINKHIDTNSIMSASQNGCRNGSRGTKELLLIDMTISQQIRRFRKDLSTCWWHRVIGLLIIYYKKAYDSVPHTWLMRVLELYKVDATLRTFLMSCMGQWRTVLRYPGCRNIQRNSEPIMIERGIFQGDSLSPLWFCLALNPLSTLLEDSGLGFRLRRGGQVISHLLYMDDLKLFASNHLQLMELLKITETFSSAIRMEFGVDKCAVMHVKRGEIVESVGTQLSDSINLRALSASETYKYLGMSEALGINVTDMKQSLKQRFFDRLKKVFNSLLSGGNKVRAFNGWVMPVLMYSFGILKWTQTELDALDRRVRTLLTAYRMHHPRSSVMRLYIPRKCGGRGFLNAKTLHNREVCSLREYFLEADVGMHRDVVAVDKGLTPLSLAKENWRKLVVLDTNDRREVWQSKELHGRFFRALHEPDVDFQASVAWLRFGDLFGETEGFVCAIMDEVIMTKNYRRFIVKDGTVDMCRACHRPGESIRHIISGFSRLANEEYLHRHNLVARIIHQQLALKYSLVESEVPYYWYVPDPVLDNGNITLYWDRSIITDRTIVANKPDIVVVDRTERRAMIVDITVPHDGNLVKAEKDKQIKYLDLAREVVDMWDVDSAIIVPIVVSANGLIAKSLDQHLRRLTLDGWIKGLIQKAVLLDTARIVRRFLSLEP

SEQ ID NO: 27256 - protein, 1105 aa, Mythimna ferrago
MLTRAAARRARPPPPASSLSSASLPPEPSLTVSAVTPAAAAASSSSDEYYSPPTTPPPARRRGGRRPPACLGPRGPPVSDRVPAAGGSVPRMRWTQSTNENVMRAYYGATEGGNNLTAYRVRMLSLFQVLEPAVNVSAQRLSDQVRVIQRNHMLDDTVLDRLRTEMSNRVITPPSQPVVPVVVPQSSHISLHTGEVSTDTVTNVSTQCNNELRSALECAIREYRNMPLELRPRLPRLPMHNKNKALVAALDPQLSNYFDDCEDLTDTHSIMYCAAVAACRVAHVKFPNSDVATRPKPAVPAWQCRIERRIGGARALIGKLICFREGNTRPRVMRFVRRAFSGTDISPRDYMSRVTERIDFLKQKVYAWANRIRRYKRRVERYIQNSTFRSNERWVYRAWERPDQGVTDTRPPDDDAMYSFWRNIWSVPVSHTEGGWTREVERACESITEMGAFTISPQDVARAVRPLPNWKSPGPDGLHNFWIKWLQRSHARLASQYQAALESGSLPEFLTTGVTHLLHKSGSTAEPKNYRPITCLPTVYKVLTSILRAKINHHVDNNAIMSASQNGCRNGSRGTKELLLIDMAISQQVRRSRKDLSTCWIDYKKAYDSVPHTWLMRVLELYKVDATLRTFLISCMRQWRTVLRYPGCRNIQRNSEPVRIERGIFQGDSLSPLWFCLALNPLSTLLENSGLGYRLKRGGQVISHLLYMDDLKLFAPNNLQLMELLKVTETFSSAIRMEFGVDKCAVMHIKRGEIVESVGIQLSDSIHLRSLSPTETYKYLGMSEALGINATDMKQSLRDRFFGRLKKVLNSLLSGGNKVRAFNGWVMPVLMYAFGVLKWTQTELDALDRRVRTLLTAYRMHHPRSSVMRLYIPRKCGGRGFLNAKSLHNREVCSLREYFQAADGGMHRDVVAVDKGLTPLSLANENWRKPVVLDTNVRREVWQSKELHGRFFRALHGPDVDQLASVAWLRVGDLFGETEGFVCAIMDEVIMTNNYRRFIVKDGTVDICRACHRPGESFRHIISGCSRLANGEYLHRHNVVARIIHQQLALKYSLVESEVPYYRYVPDPVLDSGDITLYWDRSIITDRTIVANKPDIVVVEARGVQ

SEQ ID NO: 27257 - protein, 1180 aa, Hecatera dysodea
MLTRAAARRARLPPPASSLSSASPPPEPSPTVSAATPAVAVASSSSDEYFSPPTSPPPARRRRGRRPPDGLGPRGPPVSDRVPAPGGSVQRMRWTQTINENVMRSYYGATEGGTNLTAYRGRMLSLFQVLEPAVNVSAQRLSDQVRVIQRNRMLDDSVLDRLRTEICSHVIVPSPQTVAPPQLTQIPCHADEENNDRVTNVSTQCNDELRSALESAIREYRYVSPELRPRIPRLPMHNKNRALVAALDSQLSNYFDNCEDLTDAHSIMYCAAVAACRVAHVKMPSDRVTRPKVAVPAWQCRIERRIGGARALIGKLICFREGNTRPRVMRFVRRAFSGTDISPSDYLSRVTERIDFLKQKVYAWANRIRRYKRRVERYTQNRTFRSNERWVYKAWERPDQDVTDMHPPDDDAMCSFWRNIWSVPVSHTEGDWIREVERACDPLPEMGAIIISPQDVARAVRPLPNWKSPGPDGLHNFWIKWFKGSHACLASRYQAALESGSLPEFFMTGVTHLLHKSGSTAEPKNYRPITCLPTVYKVLTSILRDKINQHINSNNIMSASQNGCRNGSRGTKELLLIDMVISQQVRRSRKDLSTCWIDYKKAYDSVPHSWLMRVLELYKIDTTLRTFLMSCMGQWRTVLRYPGCRNIQRNSEPVRIERGIFQGDSLSPLWFCYRLRRGGQVISHLLYMDDLKLFAPTNLQLMELLKVTETFSNAIRMEFGVDKCAVMHVKRGEIMESVGTQLSDSINLRSLSSTETYKYLGMSEALGINVTDMKQSLRERFFGRLKKVLNSLLSGGNKVRAFNGWVMPVLMYSFGVLKWTQTELDALDRRVRTLLTAYRMHHPRSSVMRLYIPRKCGGRGFLNAKTLHNREICSLREYFLAVDVGMHRDVVAVDRGLTPLSLANENWRKPAVLDTNDRRAVWQSKELHGRFFRALHGPDVDQLASVAWLRFGDLFGETEGFVCAIMDEVIMTRNYRRFIVKDGTVDICRACHRPGESIRHIVSGCSSLANGEYLHRHNLVARIIHQQLALKYSLVESEVPYYRYVPDPVLDNGNITLYWDRSIITDRTIVANKPDIVVVDRIVRRAMIVDITVPHDENLVKAEKDKQIKYLDLAREVVDMWDVDSAIIVPIVVSVNGLIAKSLDQHLRRLTLGGWIKGLIQKAVLLDTARIARRFLSLEP

SEQ ID NO: 27258 - protein, 1196 aa, Noctua fimbriata
MLTRSVARSARLLPPDPSLSSASPPPESSPIVSAVTPAVAVASSSSDEYFSPPTTPPPVRRRGGRRPPDGLGPRGPPASDRVPASGGSVQRMRWTQSINENVMRSYYGATEGGNNLTAYRVRMLSLFQVLEPAVNVSAQRLSDQVRVIQRNRMLDDTVLDRLRTEMQSSHVITPSAQAVVLPQFSSITNRDNDVSNDMVTNVSTQCNEEMRSALEGAIREYRFMQPDLRPRIPRLPMHNKNRALVAVLDSQLSNYFDNCEDLTDAHSILYCAAVAACRVAHVKFYDDRATRPKPVVPPWQYRIERRIGGARAFIGKLICFREGNTRPRVMRLVRRAFSGTDISPRDYMSRITERIDFLKQKVYAWASRIRRYKRRVDRYTQNRTFQRDDRWVYRAWERPDQGLADTRIPDDDAMCSFWRSIWSVPVSHTEGEWTREVERACDLVPEMGAITISPQDVVRAVRPLPNWKSPGPDGLHNFWIKWFTRSHARLAILFQSALESGSLPEFLTTGITHLLHKSGSTAEPKNYRPITCLPTVYKVFTSILRAKINKHIDDNSIMSASQNGCRNGSRGTKELLLIDMAISQQVRRSRRDLSTCWIDYKKAYDSVPHTWLMRVLELYKVDATLRTFLMSCMGQWRTVLRYPGCRQIQRNSEPIRIERGIFQGDSLSPLWFCLALNPLSTLLEDSGLGYPLRRGGQVISHLLYMDDLKLFAPKDLQLMELLKVTETFSSAIRMELCVDKCAVMHVKRGEIVESVGTQLSDSINLRSLSATETYKYLGMSEALGINVADMKQSLKERFFGRLKKVFNSLLSGGNKVRAFNGWVMPVLMYSFGILKWTQTELDALDRRVRTLLTAYRMHHPRSSVMRLYIPRKCGGRGFLNAKTLHNREICSLREYFLETDVGMHRDVVAVDKGLTPLSLAKENWRKPVVFDTNDRMEVWQSKLHGRFFRALHGPDVDLSASLAWLRSGDLFGETEGFVCAIMDEVMMTNNYRRFIVKDGTVDICRACHRPGESIRHIISGCSRLANGEYLHRHNLVARIIHQQLALKYNLVESELPYYKYVPDPVLENGSITLYWDQSIITDRTIVANKPDIVVVDRSERRTMIIDITVPHDENLVKAEKDKKIKYLDLAREVVDMWDVDSAIIVPIVVSALGLIAKSLDQYLRRLSLGSWIKGLIQKAVLLDTARIVRRFLSLEP

SEQ ID NO: 27259 - protein, 1064 aa, Mythimna ferrago
MFRRPPACLGPRGPPASDRVPAAGGSVPRMRWTQSTNENVMRAYYGATEGGNNLTAYRVRMLSLFQVLEPAVNVSAQRLSDQVRVIQRNHMLDDTVLDRLRTEMSDRVITAPSQPVVPVVAPPPSHISFHTDEVSTDTVTNVSTQCNNELRSALECAIREYRNMPLEFRPRLPRLPMRNKNKALVAALDSQLSNYFDDCEDLTDTHSIMYCAAVAACRVAHVKFPNSDVATRPKPAVPAWQCRIERRIGGARALIGKLICFREGNNRPRVMRFVRRVFSGTDINPRDYMSRVTERIDFLKQKVYAWANRIRRYKRRVERYTQNSTFRSNERWVYRAWERPDQGVTDTRLPDDDAMCLFWRNIWSVPVSHTEGGWTREVERACESITEMGAITISPQDVARAVRPLPNWKSPGPDGLHNFWIKWLQRSHARLASQYQAALESGSLPEFLTTGVTHLLHKSGSTAEPKNYRPITCLPTVYKVLTSILRAKINHHVDNNAIMSASQNGCRNGSRGTKELLLIDMAISQQVRRSRKDLSTCWIDYKKAYDSVPHTWLMRVLELYKVDATLRNFLMSCMRQWRTVLRYPGCRNIQRNSEPVRIERGIFQGDSLSPLWFCLALNPLSTLLENSGLGYRLKRGGQAISHLLYMDDLKLFAPNNLQLMELLKVTETFSSAIRMEFGVDKCAVMHIKRGEIVESVGIQLSDSIHLRSLSPTETYKYLGMSEALGINATDMKQSLKERFFGRLKKVLSSLLSGGNKVRAFNGWVMPVLMYAFGVLKWTQTELDALDRRVRTLLTAYRMHHPRSSVMRLYIPRKCGGRGFLNAKTLHNREVCSLREYFLAADGGMHRAVVAVDKGLTPLSLANENWRKPVVLDTNVRKEVWQSKELHGRFFRALHGPDVDQLASVAWLRVGDLFGETEGFVCAIMDEVIMTNNYRRFIVKDGTVDICRACHRPGESIRHIISGCSRLANGEYLHRHNLVARIIHQQLALKYSLVESEVPYYRYVPDPVLDSGDITLYWDRSIITDRTIVANKPDIVVVDRRERRAMIVDISVPHDENLVKAEKDK

SEQ ID NO: 27260 - protein, 1200 aa, Mythimna ferrago
MLTRAAARRARPPPPASSLSSASPPSEPSLTESAVTPAVAAASSSSDEYYSPPTTPPPTRRRGGRRPPACLGPRGPPASDRVPAAGGSVPRMRWTQSTNENVMRAYYGATEGGNNLTAYRVRMLSLFQVLEPAVNVSAQRLSDQVRVIQRNHMLDDTVLDRLRTEMSDRVIIAPSQPVVPVVAPPPSHISFHTDEVSTDTVTNVSTQCNNELRSALECAIREYRNMPLEFRPRLPRLPMRNKNKALVAALDSQLSNYFDDCEDLTDTHSIMYCAAVAACRVAHVKFPNSDVATRPKLAVPAWQCRIERRIGGARALIGKLICFREGNTRPRVMRFVRRAFSGTDINPRDYMSRVTERIDFLKQKVYAWANRIRRYKRRVERYTQNSTFRSNERWVYRARERPDQGVTDTRLPDDDAMCLFWRNIWSVPVSHTEGGWTREVERACESITEMGAITISPQDVARAVRPLPNWKSPGPDGLQNFWIKWLQRSHARLASQYQAALESDSLPEFLTTGVTHLLHKSGSTAEPKNYRPITCLPTVYKVLTSILRAKINHHVDNNAIMSASQNGCRNGSRGTKELLLIDMAISQQVRRSRKDLSTCWIDYKKAYDSVPHTWLMRVLELYKVDATLRTFLMSCMRQWRTVLRYPGCRNIQRNSEPVRIERGIFQGDSLSPLWFCLALNPLSTLLENSGLGYRLKRGGQAISHLLYMDDLKLFAPNNLQLMELLKVTETFSSAIRMEFGVDKCAVMHIKRGEIVESVGIQLSDSIHLRSLSPTETYKYLGMSEALGINATDMKQSLKERFFGRLKKVLNSLLSGGNKVRAFNGWVMPVLMCAFGVLKWTQTKLDALDRRVRTLLTAYRMHHPRSSVMRLYIPRKCGGRGFLNAKTLHNREVCSLREYFLAADGGMHRAVVAVDTGLTPLSLANENWRKPVVLDTNVRKEVWQSKELHGRFFRALHGPDVDQLASVAWLRVGDLFGETEGFVCAIMDEVIMTNNYRRFIVKDGTVDICRACHRPGESIRHIISGCSRLANGEYLHRHNLVARIIHQQLALKYSLVESEVPYYRYVPDPVLDSGDITLYWDRSIITDRTIVANKPDIVVVDRRERRAMIVDISVPHDENLVKAEKDKQIKYIDLAREVVDMWNVDSAIIVPIIVSANGLIAKSLDQHLRRLSLSGWIKGLIQKAVLLDTARIVRRFLSLEP

SEQ ID NO: 27261 - protein, 963 aa, Mythimna ferrago
MCNKNRALVAALDSQLSNYFDDCEDLTETHSIMYCAAVAACRVAHVKFPDSDEATRPKSAVPAWQCRIERRIGGARALIGKLICFREGNTRPRVMRFVRRAFSGTNISPRDYMSRVTERIDFLKQKVYAWANRIRRYKRRVERYTQNRTFRSNERWVYRAWERPDQGVTGARLPEDDAMCSFWRSIWSVPVSHTEGDWTREVERACDPIPQMGAIDISPQDVARAVRPLPNWKSPGPDGLHNFWIKWFTRSHARLAYQFQSALESGSLPQFLTTGITHLLHKSGSTAEPKNYRPITCLPTVYKVLASILRSKINSHIDENSIMSPSQNGCRNGGSRGTKELLLIDMTISQQVRRSRKDLSTCWIDYKKAYDSVPHTWLMRVLELYKVDATLCTFLMSCMRQWRTVLRYPGCRNIQRNSEPVRIERGIFQGDSLSPLWFCLALNPLSTLLENSGLGYRLKRGGQVISHLLYMDDLKLFAPNNLQLMELLKVTETFSSAIRMEFGVDKCAVMHIKRGEIVESAGTQLSDSIHLRSLSPTETYKYLGMSEALGINATDMKQSLRERFFGRLKKVLNSLLSGGNKVRAFNGWVMPVLMYAFGVLKWTQTELDALDRKVRTLLTAYRMHHPRSSVMRLYIPRKCGGRGFLNAKTLHNREVCSLREYFLAADVGMHRDVVAVDKGLTPLSLANENWRKPVVLDTNVRKEVWQSKELHGRFFRALHGPDVDQLASVAWLRVGDLFGETEGFVCAIMDEVIMTNNYRRFIVKDGTVDICRACHRPGESIRHIISGCSRLANGEYLHRHNLVARIIHQQLALKYSLVESEVPYYRYVPDPVLDSGDITLYWDRSIITDRTIVANKPDIVVVDRSERRAMIVDISVPHDENLVKAEKDKQIKYIDLAREVVDMWEVDSAIIVPIVVSANGLIAKSLDQHLRRLSLGDWIKGLIQKAVLLDTARIVRRFLSLEP

SEQ ID NO: 27262 - protein, 1109 aa, Hecatera dysodea
MLTRAAARRARLPPPASSLSSASPPPEPSPTVSAATPAVAVASSSSDEYFSPPTSPPPARRRRGRRPPDGLGPRGPPVSDRVPAPGGSVQRMRWTQTINENVMRSYYGATEGGTNLTAYRGRMLSLFQVLEPAVNVSAQRLSDQVRVIQRNRMLDDSVLDRLRTEICSHVIVPSPQTVAPPQLTQIPCHADEENNDRVTNVSTQCNDELRSALESAIREYRYVSPELRPRIPRLPMHNKNRALVAALDSQLSNYFDNCEDLTDAHSIMYCAAVAACRVAHVKMPSDRVTRPKVAVPAWQCRIERRIGGARALIGKLICFREGNTRPRVMRFVRRAFSGTDISPSDYLSRVTERIDFLKQKVYAWANRIRRYKRRVERYTQNRTFRSNERWVYKAWERPDQDVTDMHPPDDDAMCSFWRNIWSVPVSHTEGDWIREVERACDPLPEMGAIIISPHDVARAVRPLPNWKSPGPDGLHNFWIKWFKGSHACLASRYQAALESGSLPEFFMTGVTHLLHKSGSTAEPKNYRPITCLPTVYKVLTSILRDKINQHINSNNIMSASQNGCRNGSRGTKELLLIDMVISQQVRRSRKDLSTCWIDYKKAYDSVPHSWLMRVLELYKIDTTLRTFLMSCMGQWRTVLRYPGCRNIQRNSEPVRIERGIFQGDSLSPLWFCLALNPLSTLLENSGLGYRLRRGGQVISHLLYMDDLKLFAPTNLQLMELLKVTETFSNAIRMEFGVDKCAVMHVKRGEIMESVGTQLSDSINLRSLSSTETYKYLGMSEALGINVTDMKQSLRERFFGRLKKVLNSLLSGGNKVRAFNGWVMPVLMYSFGVLKWTQTELDALDRRVRTLLTAYRMHHPRSSVMRLYIPRKCGGRGFLNAKTLHNREICSLREYFLAVDVGMHRDVVAVDKGLTPLSLANENWRKPAVLDTNDRRAVWQSKELHGRFFRALHGPDVDQLASVAWLRFGDLFGETEGFVCAIMDEVIMTRNYRRFIVKDGTVDICRACHRPGESIRHIVSGCSSLANGEYLHRHNLVARIIHQQLALKYSLVESEVPYYRYVPDPVLDNGNITLYWDRSIITDRTIVANKPDRNRPNREACNDCRHNCST

SEQ ID NO: 27263 - protein, 934 aa, Hecatera dysodea
MYCAAVAACRVAHVKMPSDRVTRPKVAVPAWQCRIERRIGGARALIGKLICFREGNTRPRVMRFVRRAFSGTDTSPSDYLSRVTERIDFLKQKVYAWANRIRRYKRRVERYTQNRTFRSNERWVYKAWERPDQDVTDMHPPDDDAMCSFWRNIWSVPVSHTEGDWIREVERACDPLPEMGSIIISPQDVARAVRPLPNWKSPGPDGLHNFWIKWFKGSHACLASRFQAALESGSLPEFFMTGVTHLLHKSGSTAEPKNYRPITCLPTVYKVLTSILRDKINQHINSNNIMSASQNGCRNGSRGTKELLLIDMVISQQVRRSRKDLSTCWIDYKKAYDSVPHSWLMRVLELYKIDTTLRTFLMSCMGQWRTVLRYPGCRNIQRNSEPVRIERGIFQGDSLSPLWFCLALNPLSTLLENSGLGYRLRRGGQVISHLLYMDDLKLFAPTNLQLMELLKVTETFSNAIRMEFGVDKCAVMHVKRGEIMESVGTQLSDSINLRSLSSTETYKYLGMSEALGINVTDMKQSLRERFFGRLKKVLNSLLSGGNKVRAFNGWVMFCNGWSVLMYSFGVLKWTQTELDALDRRVRTLLTAYRMHHPRSSVMRLYIPRKCGGRGFLNAKTLHNREICSLREYFLAVDVGMHRDVVAVDKGLTPLSLANENWRKPAVLDTNDRRAVWQSKELHGRFFRALHGPDVDQLASVAWLRFGDLFGETEGFVCAIMDEVIMTRNYRRFIVKDGTVDICRACHRPGESIRHIVSGCSSLANGEYLHRHNLVARIIHQLLALKYSLVESEVPYYRYVPDPVLDNGNITLYWDRSIITDRTIVANKPDIVVVDRIVRRAMIVDITVPHDENLVKAEKDKQIKYLDLAREVVDMWDVDSAIIVPIVVSVNGLIAKSLDQHLRRLTLGGWIKGLIQKAVLLDTARIVRRFLSLEP

SEQ ID NO: 27264 - protein, 974 aa, Atethmia centrago
MSPEVRPRLPRLPMHKKNRALVAVLDSQLSNYFDDCEDLTDTHSILYCAAVAVCRVAHVIFPNASRATRPKPTVPIWQCRIERRIGGARALIGKLICFREGNTRPRVMRFVRRAFSGTDISPQDYMSRVTERIDFLKQKVYAWANRIRRYKRRVDRYTQNRTFQSDERWVYRGWEQRDQGVTGTRLPDDDVMCSFWRSIWSVPVSHTEGDWARKVERACDPLPEMGAITICPQDVARAVRPLPNWKSPGPDGLHNFWLKWFLGSHARLAAQYQTALESGSLPQFLTIGVTHLLHKSDSTAEPKNYRPITCLPTVYKFLTSILRAKINKHIDTNSIMSASQNGCRNGSRGTKELLLIDMTISQQVRRFRKDLSTCWIDYKKAYDSVPHTWLMRVLELYKVDATLRTFLMSCMGQWRTVLRYPGCRNIQRNSEPIRIERGIFQGDSLSPLWFCLALNPLSTLLEDSGLGYRWRGGQVISHLLYMDDLKLFASNNLQLMELLKITETFSSAIRMEFGVDKCAVMHVKRGEIVESVGTQLSDSINLRALSASETYKYLGMSEALGINVTDMKQSLKQRFFDRLKKVFNSLLSGGNKVRAFNGWVMPVLMYSFGILKWTQTELDALDRRVRTLLTAYRMHHPRSSVMRLYIPRKCGGRGFLNAKTLHNREVCSLREYFLEADVGMHRDVVAVDKGLTPLSLAKESWRKLVVLDTNDRREVWQSKELHGRFFRALHEPDVDFQASVAWLRFGDLFGETEGFVCAIMDEVIMTMNYRRFIVKDGTVDMCRACHRPGESIRHIISGCSRLANEEYLHRHNLVARIIHQQLALKYSLVESEVPYYRYVPDPVLDNGNITLYWARSIITDRTIVANKPDIVVVDRTERRAMIVDIIVPHDGNLVKAEKDKQIKYLDLAREVVDMWDVDSAIIVPIVVSANGLIAKSLDQHLRRLTLDGWIKGLIRKAVLLDTARIVRRFLFLEP

SEQ ID NO: 27265 - protein, 1195 aa, Mythimna ferrago
MLTRAAARRARPPPPASSLSSASLPPEPSLTVSAVTPAAAAASSSSDEYYSPPTTPPPARRRGGRRPPACLGPRGPPVSDRVPAAGGSVPRMRWTQSTNENVMRAYYGATEGGNNLTAYRVRMLSLFQVLEPAVNVSAQRLSDQVRVIQSNHMLDDTVLDRLRTEMSNRVITPPSQPVVVPQSSHISLHTDEVSTDTVTNVSTQCNNELRSALECAIREYRNMPLELRPRLPRLPMHNKNKALVAALDSQLSNYFDDCEDLTDTHSIMYCAAVAACRVAHVKFPNSDVATRPKPAVPAWQCRIERRIGGARALIGKLICFREGNTRPRVMRFVRRAFSGTDISPRDYMSRVTERIDFLKQKVYAWANRIRRYKRRVERYIQNSTFRSNERWVYRAWERPDQGVTDTRLPDDDAMYSFWRNIWSVPVSHTEGGWTREVERACESITEMGAITISPQDVARAVRPLPNWKSPGPDGLHNFWIKWLQRSHARLASQYQAALESGSLPEFLTTGVTHLLHKSGSTAEPKNYRPITCLPTVYKVLTSILRAKINHHVDNNAIMSASQNGCRNGSRGTKELLLIDMAISQQVRRSRKDLSTCWIDYKKAYDSVPHTWLMRVLELYKVDATLRTFLMSCMRQWRTVLRYPGCRNIQRNSEPVRIERGIFQGDSLSPLWFCLALNPLSTLLQNSRLGYRLKRGGQVISHLLYMDDLKLFAPNNLQLMELLKVTETFSSAIRMEFGVDKCAVMHIKRGEIVESVGIQLSDSIHLRSLSPTETYKYLGMSEALGINATDMKQSLRERFFGRLKKVLNSLLSGGNKVRAFNGWVMPVLMYAFGVLKWTQTELDALDRRVRTLLTAYRMHHPRSSVMRLYIPRKCGGRGFLNAKSLHNREVCSLREYFLAADGGMHRDVVAVDKGLTPLSLANENWRKPVVLDTNVRREVWQSKERRFFRALHGPDVDQLASVAWLRVGDLFGETEGFVCAIMDEVIMTNNYRRFIVKDGTVDICRACHRPGESIRHIISGCSRLANGEYLHRHNLVARIIHQQLALKYSLVESEVPYYRYVPDPVLDSGDITLYWDRSIITDRTIVANKPDIVVVDRSERRAMIVDISVPHDENLAKAEKDKQIKYIDLAREVVDMWEVDSAIIVPIVVSANGLIAKSLDQHLRRLSLGDWIKDLIQKAVLLDTARIVRRFLSLEP

SEQ ID NO: 27266 - protein, 1057 aa, Hecatera dysodea
MLTRAAARRARLPPPASSLSSASPPPEPSPTVSAATPAVAVASSYEYFSPPTSPAPARRRRGRRPPDGLGPRGPSASDRVPAPGGSVQRMRWTQTINENVMRSYYGATEGGTNLTAYRGRMLSLFQVLEPAVNVSAQRLSDQVRVILRNRMLDDSVLDRLRMEICSSHVIIPSPQTVVQPQLIQIPSHAVEESDDRVTNVSTQCNEELRSALECAIREFRYVSPELRPRIPRLPMHNKNRALVAALDSQLSNYFDNCEDLTDAHSIMYCAAVAACRVAHVKMPNDRVTRPKPAIPAWQCRIERRIGGARALIGKLICFREGNTRPRVMRFVRRAFSGTEISPLDYLSRVTERIDFLKQKVYAWANRIRRYKRRVERYTQNRTFRSNERWVYKAWERPDRDVTDTRPPDDDAMCSFWGNIWSAPVSHTEGDWIREVERACDPLPDMGAIIISPQDVARAVRPLPNWKSPGPDGLHTFWIKWLHSSHACLASRYQASLESGSLPEFLMTGITHLLHKSGSTAEPKNYRPITCLPTVYKVLTSILRDKINQHINSNNIMSASQNGCRNGSCGTKELLLIDIAISQQVRRSRKDLSTCWIDYKKAYDSVPHTWLLRVLELYKIDATLRTFLMSCMGQWRTVLRYSGCRHVQRNSEPIRIERGIFQGDSLSPLWFCLALNPLSTLLGNSGLGYRLKRGGQVISHLLYMDDLKLFAPTNLQLMELLKVTETFSNAIRMEFGVDKCAIMHVKRGEIMESVGSQLSDSINLRCLSSTETYKYLGMSEALGINVTDMKQSLKERFFGRLKKVFNSLLSGGNKVRAFNGWVMPVLMYSFGVLKWTQTELDALDRRVRTLLTTYRMHHPRSSVMRLYIPRKCGGRGFLNAKTLHNREICSLREYFLAAEVGMHRDVVAVDKGLTPLSLANENWRKPAVLDTNDRRAVWQSKELHGRFFRALHGPDVDQLASVAWLRFGDLFGETEGFVCAIMDEVIMTNNYRRFIVKDGTVDICRACHRPGESIRHIVSWCSRLANGEYLHRHNLVARIIHQQLALKYSLVNSRPSSR

SEQ ID NO: 27267 - protein, 1197 aa, Hecatera dysodea
MLTRAAARRARLPPPASSLSSASPPPEPSPTVSAATPAVAVASSSSDEYFSPPTSPPPARRRRGRRPPDGLGPRGPSASDRVPAPGGSVQRMRWTQTINENVMRSYYGATEGGNNLTAYRGRMLSLFQVLEPAVNVSAQRLSDQVRVILRNRMLDDSVLDRLRMEICSSHVITPSPQTVAQPQLIQIPSHADEESDDRVTNVSTQCNEELRSALESAIREFRYVSPELRPRIPRLPMHNKNRALVAALDSQLSNYFDNCEDLTDAHSIMYCAAVAACRVAHVKMPNDRVTRPKPAIPAWQCRIERRIGGARALIGKLICFREGNTRPRVMRFVRRAFSGTQISPLDYLSRVTERIDFLKQKVYAWANRIRRYKRRVERYTQNRTFRSNERWVYRAWERPDQDVTDTRPPDDDAMCSFWRNIWSAPVSHTEGDWIREVERACDPLPDMGAIIISPQDVARAVRPLPNWKSPGPDGLHNFWIKWLHSSHACLASRYQESLESGSLPEFLMTGITHLLHKSGSTAEPKNYRPITCLPTVYKVLTSILRDKINQHINSNNIMSASQNGCRNGSRGTKELLLIDIAIRQQVRRSRKDLSTCWIDYKKAYDSVPHTWLLRVLELYKIDATLRTFLMSCMGQWRTVLRYPGCRHVQRNSEPIRIERGIFQGDSLSPLWFCLALNPLSTLLGNSGLGYRLKRGGQVISHLLYMDDLKLFAPTNLQLMELLKVTETFSNAIRMEFGVDKCAIMHVKRGEIMESVGSQLSDSINLRCLSSTETYKYLGMSEALGINVTDMKQSLKERFFGRLKKVFNSLLSGGNKVRAFNGWVMPVLMYSFGVLKWTQTELDALDRRVRTLLTTYRMHHPRSSVMRLYIPRKCGGRGFLNAKTLHNREICSLREYFLAVEVGMHRDVVAVDKGLTPLSMANENWRKPAVLDTNDRRAVWQSKELHGRFFRALHGPDVDQLASVAWLRFGDLFGETEGFVCAIMDEVIMTNNYRRFIVKDGTVDICRACHRPGESIRHIVSGCSRLANGEYLHRHNLVARIIHQQLALKYSLVSSEVPYYRYVPDPVLDSGNITLYWDRSIITDRTIVANKPDIVVVDRIERRTMIVDITVPHDENLVKAEKDKQIKYLDLAREVVDMWDVDSAIIVPIVVSANGLIAKSLDQHLRRLSLGSWIKGLIQKAVLLDTARIVRRFLSLEP

SEQ ID NO: 27268 - protein, 1094 aa, Spodoptera exigua
MLTRAAARRARPPPPASSLSSASPPPESSPTVSDVTPAVAAASSSSDEYYSPPTTPPPTRRRGGRRPPARLGPRGPPASDRVPAVGGSVQRMRWTQSINENVMRAYYGATEGGNNLTAYRVRMLSLFQVLEPAVNVSAQRLSDQVRVIQRNRMLDDTVLDRLQTEMGSRASASSSRTVVPATLPLTSHGIVSAVADEESTDTVAHVSTQCIDELRSALECAIWEYRYISPELRPRLPRLPMHNKNKALVAALDSQLSNYLDDCEDLGDTHSIMYCAAVAACRVAHVKFPTNDVTTRPKPAVPAWQHRIECRIAGARALIGKLICFREGNSRPRVMRFVRRAFSGTDISPRDYMSRVTERIDFLKQKVYAWANRIRRYRRRVERYTQNRTFRSNERWVYRTWERPDQGVTDTRLPDDDAMCSFWRSIWSVPVSHTEGDWIRDVERACDPIPQMGTINISPQDVTRAVRPLPNWKSPGPDGLHNFWIKWFTRAHARLASQFQSAVESGSLPKFLTTGVTHLLHKSGSTAEPKNYRPITCLPTVYKVLTSILRSKINSHIDKNKIMSTAQNGCKNGSRGTKELLLIDMAISQQVRRARKDLSTCWIDYKKAYDSIPHTWLMRVLELYKIDTILRTFLMSCMRQWSTVLRYPGCRHTQRNSEPVRIERGIFQGDSLSPLWFCLALNPLSTLLENSGLGYRLKRGGQVISHLLYMDDLKLFAPNKLQLMELLKLTETFSSAIRMEFGVDKCAIMHVKRGEVVESVGTQLTDSINLRSLSPTETYKYLGMSEALGINVTDMKQSLKERFFGRLKKVFNSFLSGGNKVRAFNGWVMPVLMYSFGVLKWSQTELDALDRQVRTMLTAYRMHHPRSSVMRLYIPRKCGGRGFLNAKTLHNREVCSLREYFLAADVDMHRDVVAVDKGLTPLSLAIENWHKPVVLDTNARREVWQSKELHGRFFRALHGPDVDQVASVAWLRFGDLFGETEGFVCAIMDEVIMTNNYRRFIVKDGTVDICRACHRPGESIRHIISGCSRLANGEYLHRHNLVARIIHQQLALKYCLVESEVPYYRYEPDPVLDNGHITLYWDRSIITDRTIVGQ

SEQ ID NO: 27269 - protein, 1182 aa, Mythimna ferrago
MLTRAAARRTRPPPPASSLSSASPPSEPSLTESAVTPAVAAASSSSDEYYSPPTTPPPTRRRGGRRPPACLGPRGPPASDRVPAAGGSVPRMRWTQSTNENVMRAYYGATEGGNNLTAYRVRMLSLFQVLEPAVNVSAQRLSDQVRVIQRNHMLDDTVLDRLRTEMSDRVITAPSQPVVPVVAPPPSHISFHTDEVSTDTVTNVSTQCNNELRSALECAIREYRNMPLEFRPRLPRLPMRNKNKALVAALDSQLSNYFDDCEDLTDTHSIMYCAAVAACRVAHVKFPNSDVATRPKPAVPAWQCRIERRIGGARALIGKLICFREGNTRPRVMRFVRRAFSGTDISPRDYMSRVTERIDFLKQKVYAWANRIRRYKRRVERYTQNSTFRSNERWVYRAWERPDQGVTDTRLPDDDAMCLFWRNIWSVPVSHTEGGWTREVERACESITEMGAITISPQDVARAVRPLPNWKSPGPDGLHNFWIKWLQRSHARLASQYQAALESGSLPEFLTTGVTHLLHKSGSTAEPKNYRPITCLPTVYKVLTSILRAKINHHVDNNAIMSASQNGCRNGSRGTKELLLIDMAISQQVRRSRKDLSTCWIDYKKAYDSVPHTWLMRVLELYKVDATLRTFLMSCMRQWRTVLRYPGCRNIQRFCLALNPLSTLLEDSGLNRLGYRLRRGGQVLSHLLYMDDLKLIAPNNLQLMELLKVTETFSSAIRMEFGVDKCAVMHIKRGEIVESVGIQLSDSIHLRSLSPTETYKYLGMSEALGINATDMKQSLRERFFGRLKKVLNSLLSGGNKVRAFNGWVMPVLMYAFGVLKWTQTELDALDRRVRTLLTAYRMHHPRSSVMRLYIPRKCGGRGFLNAKTLHNREVCSLREYFLAADGGMHRAVVAVDKGLTPLSLANENWRKPVVLDTNVRKEVWQSKELHGRFFRALHGPDVDQLASVAWLRVGDLFGETEGFVCAIMDEVIMTNNYRRFIVKDGTVDICRACHRPGESIRHIISGCSRLANGEYLHRHNLVARIIHQQLALKYSLVESEVPYYRYVPDPVLDSGDITLYWDRSIITDRTIVANKPDIVVVDRRERRAMIVDISVPHDENLVKAEKDKQIKYIDLAREVVDMWNVDSVIIVPIVVSANGLIAKSLDQHLRRLSLSGWIKGLIQKAVLLDTARIVRRFLSLEP

SEQ ID NO: 27270 - protein, 867 aa, Atethmia centrago
MRFVRRAFSGTDIGPQDYMTRVTERIDFLKQKVYAWVNRIRRYKRRVERYTQNRTFQSDERWVYRGWERPDQDVSDTCLPDDDVMCSFWRSIWSVPVSHTEGDWARKVERACDPIPEMGAITICPQDVARAVRPLPNWKSPGPDGLHNFWLKWFLRSHARLAAQYQTALESGSQPQFLTTGVTHLLHKSGSTAEPKNYRPITCLLTVYKLLTSILRAKINKHIDTNSIMSASQNGCRNGSRGTKELLLIDMTISQQVRRSRKDLSTCWIDYKKAYDSVPHTWLMRVLELYKVDATLRTFLMSCMGQWRTVLRYPGCRNIQRNSEPIRIERGIFQGDSLSPLWFCLALNPLSTLLEDSGLGYRMRRGGQVISHLLYMDDLKLFASNNLQLMELLKITKCFSSAIRMEFGVDKCAVMHVKRGKIVESVGTQLSDSINLRTVSASETYKYLGMSEALGINVTDMKQSLKERFFGRLKKVFNSLLSGGNKVRAFNGWVMPVLMYSFGILKWTQTELDALDRRVRTLLTAYRMHHPRSSVMRLYIPRKCGGRGFLNAKTLHNREVCSLREYFLEADVGMHRDVVAVDKGLTPLSLAKENWRKLVVLDTNDRRKVWQSKPHGRFFRALHEPDVDFQASVAWLRFGDLFGETEGFVCAIMDENIMTKNYRRFIVKDGTVDVCRACHRPGESIRHIISGCSRLANEEYLHRHNLVARIIHQQLALKYSLVESEVPYYRYVPDPVLDNGNITLYWDRSIITDRTIVANKPDIVVVDRTERRAMIVDITVPHDGNLVKAEKDKQIKYLDLAREVVDMWDVDSAIIVPIVVSANGLIAKSLDQHLKRLTLDGWIKGLIQKAVLLDTARIVRRFLSLEP

SEQ ID NO: 27271 - protein, 1084 aa, Mythimna impura
MLTRAAARRARPLPPASSLSSALPPPKPSTTVSAVTPAAAAASSSSDEYYSPPTSPPPARRRRGRRPPSRLGPRGPPVSDRVPAPGGSVQRMRWTQSINENVMRAYYGATEGGNNLTAYRARMLSLFQVLEPAVNVSAQRLSDQVRVIQRNHMLDHTVLDRLRTEMSNHAIAPSSQSVVPVMVPPSYHLSDHADEAITDMVTHVSTQCNNELRSALECAIREYRSMPLELRPRLPRLPMHNKNKALVAALDLQLSIYFDDCKDLTDIHSIMYCAAVAACRVAHVKFPNCDVATRPKPAVPAWQCRIERRIGGARALIGKLICFREGNTRPRVMRFVRRAFSGTDISPRDYMSRVTERIDFLKQKVYAWANRIRRYKRRVERYTQNRTFRSNERWVYRAWERPDQGVTDECLPDDDAMSSFWRSIWSVPVSHTEGDWTREVERACDPIPQMGAINISPQDVARAVRPLPNWKSPGPDGLHNFWIKWFTRSHARLAYQFQSALESGSLPQFLTTGITHLLHKSGSTAEPKNYRPITCLPTVYKVLTSILRSKINSHIDKNLIMSPSQNGCRNGSRGTKELLLIDMTISQQVRRSRKDLSTCWIDYKKAYDSVPHTWLMRVLELYKIDTTLRTFLMSCMRQWSTVLRYPGCRHTQRNSEPVRIERGIFQGDSLSPLWFCLALNPLSTLLENSGLGYRLKRGGQVISHLLYMDDLKLFAPNNLQLMELLKVTETFSSAIRMEFGVDKCAVMHVKRGEVVESVGTQLTDSINLRSLSPTETYKYLGMSEALGINITDMKQSLKERFYGRLKKVFNSLLSGGNKVRAFNGWVMPVLMYSFGVLKWTQTELDALDRRVRTLLTAYRMHHPRSSVMRLYIPRKCGGRGFLNAKTLHNREVCSLREYFLAADVSMHRDVVAVDKGLTPLSLANENWRKPVVLDTNDRREVWQSKELHGRFFRALHGPDVDQLASVAWLRSGDLFGETEGFVCAIMDEVIMTNNYRRFIVKDGTVDICRACHRPGESIRHIISGCSRLANGEYLHRHNLVARIIHQQLALKYSLVESEVPYYRYEPDPVLDNGHITVLGSVYHH

SEQ ID NO: 27272 - protein, 1089 aa, Mythimna impura
MLDDTVLDRLRTEMGSHAIASSSQTVVPSQVSPPNNLSNHADEESTDMVTHVSTQCSNELRSALECAIREYRNMPLELRPRLPRLPMCNKNKALVAALDSLLSNYFDDCEDLTDTHSIIYCAAVAACREAHVKFPNSDVATRPKPAVPAWQCRIQRRIGGARALIGKLICFREGNTRPRVMRFVRRAFSGTDISPRDYMSCVTERIDFLKQKVYAWANRIRRYKRRVERHTQNRTFRSNERWVYRAWEQPDQGGADTRLPDDDAMSSFWRNIWSVPVSHTEGGWTREVERACEPIPEMGAITISPQDVARAVRPLPNWKSPGPDGLHNFWIKWLQRSHARLASQYQTALESGSLPEFLTTGVTHLLHKSGSTAEPKNYRPITCLPTVFKVLTSILRAKINHHVDNNAIMSASQNGCRNGSRGTKELLLIDMAISQQVRRSRKDLSTCWIDYKKAYDSVPHTWLMRVLELYKIDATLRTFLMSCMRQWRTVLRYPGCRHIQRNSEPVRIERGIFQGDSLSPLWFCLALNPLSTLLENSVLGYRLKRGGQVISHLLYMDDLKLFAPNNLQLMELLKVTETFSSAIRMEFGVDKCAVMHVKRGEIVESVGTQLSDSINLRSLSPTETYKYLGMSEALGINATDMKQTLRERFFGRLKKAFNSLLSGGNKVRAFNGWVMPVLMYSFGVLKWTQTELDALDRRVRTLLTAYRMHHPRSSVMRLYIPRKCGGRGFLNAKTLHNREVCSLREYFLTADVGMHRDVVAVDKGLTPLSLANESWRKPVVLDTNDRREVWQSKELHGRFFRALHGPDVDQLASVAWLRVGDLFGETEGFVYAIMDEVIMTNNYRRFIVKDGTVDICRACHRPGESIRHIISGCSRLANGEYLHRHNLVARIIHQQLALNYSLVESEVPYYRYVPDPAVLDNGDITLYWDRSIITDRTIVANKPDIVVVDRRERRTMIVDISVPHDENLVKAEKDKQIKYIDLAREVVDMWDVDSVIIVPIVVSGNGLIAKSLDQHLRRLALGGWIKGLIQKAVPTPGHGSYCQEVPFSGALTAGSLDPVPDTGGTLFFIFLNVFLFFFIEIFKNIIYML

SEQ ID NO: 27273 - protein, 1063 aa, Mythimna ferrago
MLTRAAARRARPPPLASSLSSASLPPEPSLTVSAVTPAAAAASSSSDEYYSPPTTPPPARRRGGRRPPACLGPRGPPVSDRVPAAGGSVPRMRWTQSTNENVMRAYYGATEGGNNLTAYRVRMLSLFQVLEPAVNVSAQRLSDQVRVIQRNNMLDDTVLDRLRTEMSNRVITPPSQPVVPVVVPQSSHISLHTDEVSTDTVTNVSTQCNNELRSALECAIREYRNMPLELRPRLPRLPMHNKNKALVAALDSQLSNYFDDCEDLTDTHSIMYCAAVAACRVAHVKFPNSDVATRPKPAVPAWQYRIERRIGGARALIGKLICFREGNTRPRVMRFVRRAFSGTDISPRDYMSRVTERIDFLKQKVYAWANRIRRYKRRVERYIQNSTFRSNERWVYRAWERPDQGVTDTRPPDDDAMCSFWRNIWSVPVSHTEGGWTREVERACESVTEMGAITISPQDVARAVRPLPNWKSPGPDGLHNFWIKWLQRSHARLASQYQAALESGSLPEFLTTGVTHLLHKSGSTAEPKNYRPITCLPTVYKVLTSILRAKINHHVDNNAIMSASQNGCRNGSRGTKELLLIDMAISQQVRRSRKDLSTCWIDYKKAYDSVPHTWLMRVLELYKVDATLRTFLMSCMRQWKTVLRYPGCRNIQRNSEPVRIERGIFQGDSLSPLWFCLALNPLSTLLENSGLGYRLKRGGQVISHLLYMDDLKLFAPNNLQLMELLKVTETFSSAIRMEFGVDKCAVMHIKRGEIVESVGIQLSDSIHLRSLSPTETYKYLGMSEALGINATDMKQSLRERFFGRLKKVLNSLLSGGNKVRAFNGWVMPVLMYAFGVLKWTQTELDALDRRVRTLLTAYRMHHPRSSVMRLYIPRKCGGRGFLNAKSLHNREVCSLREYFLAADGGMHRDVVAVDKGLTPLSLANENWRKPVVLDTNVRREVWQSKELHGRFFRALHGPDVDQLASVAWLRVGDLFGETEGFVCAIMDEVIMTNNYRRFIVKDGTVDICRACHRPGESIRHIISGCSRLANGEYLHRHNLVARIIHQQLALKYSLVQSEVPYYR

SEQ ID NO: 27274 - protein, 867 aa, Atethmia centrago
MRFVRRAFSGTDIGPQDYMSRVTERIDFLKQKVYAWANRIRRYKRRVERYTQNRTFQSDERWVYRGWERPDQGVTGTRLPDDDVMCSFWRSIWSVPVSHTEGDWVREVERACDPIPEMGAITISPQDVARAVCPLPNWKSPGPDGLHNFWLKWFLRSHARLAAQYQTALESGSLPQFLTTGVTHLLHKSGSTAEPKNYRPITCLPTVYKVLTSILRAKINEHIDTNSIMSASQNGCRNGSRGTKELLLIDITITQQVRHSRKDLSTCWIDYKAYDSVPHTWLMRVLELYKVDATLRTFLMSCMGQWRTVLRYPGCRNIQRNSEPIRIERGIFQGDSLSPLWFCLALNPLSTLLEDSGLGYRLSRASQAISHLLYMDDLKLFASNNLQLMELLKITETFSSAIRMEFGVDKCAVMHVKRGKIMESVGTQLSDSINLRALSASETYKYLGMSEALGINVTDMKQSLKERFFGRLKKVFNSLLSGGNKVRAFNGWVMPVLMYSFGILKWTQTELDALDRRVRTLLTAYRMHHPRSSVMRLYIPRKCGGRGFLNAKTLHNREVCSLREYFLKADVGMHRDVVAVDKSLTPLSLAKENWRKLVVLDTNDRREVWQSKELHGRFFRALHEPDVDFQASVAWLRFGDLFGETEGFVCAIMDEVIMTKNYRRFIVKDGTVDVCRACQRPGESIRHIISGCSRLANEEYLHRHNLVARIIHQQLALKYNLVESEVPYYRYVPDPVLENGNITLYWDRSIITDRTIIANKPDIVVVDRTERRAMIVDITVPHDGNLVKAEKDKQIKYLDLAREVVDMWDVNSAIIVPIVISVNGLIAKSLDQHLRRLSLDSWIKGLIQRAVLLDTARIVRRFLSLEP

SEQ ID NO: 27275 - protein, 961 aa, Mythimna ferrago
MLDDTVLDRLRTEMSNHAIAPSSQPVAPVMVPPSNHVANPADEESTDMVIQVSTQCTNELRSALECAIREYRNMPSVLRPRLPRLPMHNKNKALVAALDMQLSNYFDNCKDLTDTHSIMYCAAVAACRVAHVKFPNSDVTTRPKPAVPAWQCRIERRIGGARVLIGKLICFREGNTRPRVMRFVRRAFSGTDISPRDYMSRVTERIDFLKQKVYAWANRIRRYKRRVERYIQNSTFRSNERWVYRAWERPDQGVTDTRPPDDDAMCSFWRNIWSVPVSHTEGGWTREVERACESIKEMGAITISPQDVARAVRPLPNWKSPGPDGLHNFWIKWLQRSHARLASQYQAALDSGSLPEFLTTGVTHLLHKSGSTAEPKNYRPITCLPTVYKVLTSILRAKINHHVDNNAIMSASQNGCRNGSRGTKELLLIDMAISQQVRRSRKDLSTCWIDYKKANSVPHTWLMRVLELYKVDATLRTFLMSCMRQWRTVFRYPGCRNIQRNSEPVRIERGIFQGDSLSPLWFCLALNPLGTLLENSGLCYRLKRGGQVISHLLYMDDLKLFAPNNLQLMELLKVTETFSSAIRMEFGVDKCAVMHIKRGEIVESVGIQLSDSIHLRSLSPTETYKYLGMSEALGINATDMKQSLRERFFGRLKKVLNSLLSGGNKVRAFNGWVMPVLMYAFGVLKWTQTELDALDRRVRTLLTAYRMHHPRSSVMRLYIPRKCGGRGFLNAKSLHNREVCSLREYFLAADGGMHRDVVAVDKGLTPLSLANENWRKPVVLDTNVRREVWQSKELHGRFFRALHGPDVDQLASVAWLRVGDLCVGHVPDPVLDSGDITWYWDWSIITDRTIVANKPDIVVVDRSERRAMIVDISVPHDENLAKTEKDKQIKYIDLAREVVDMWEVDSAIIVPIVVSANGLIAKSLDQHLRRLSLGDWIKGLIQKAVLLDTARIVRRFLSLEP

SEQ ID NO: 27276 - protein, 1083 aa, Mythimna impura
MTAYRVRMLSLFQVLEPAVNVSAQRLSDQVRVIQRNHMLDDTVLDRLRTEMSNHTIAPSSQSVVPVMVPPSYHLSGHVDEEITDMVTHVSTQCNNELRSALECAIREYRNMPLELRPRLPRLPMHNKNKALVAALDLQLSNYFDDCKDLTDTHSIMYCAAVAACRLAHVKFPNCDVATRPKPAVPAWQCRIERRIGGARALIGKLICFREGNTRPRVMRFVRRAFSGTDISPRDYVSRVTERIDFLKQKVYAWANRIRRYKRRVDRYTQNRTFRSNERWVYRAWERPDQGVTDACLPDDDAMSSFWRSIWSVPVSHTEGDWTREVERACDPIPQMGAIDISPQDVARAVRPLPNWKSPGPDGLHNFWIKWFTRSHARLAYQFQSALESGSLPQFLTTGITHLLHKSGSTAEPKNYRPITCLPTVYKVLTSILRSKINSHIDKNLIMSPSQNGCRNGSRGTKELLLIDMTISQQVRRSRKDLSTCWIDYKKAYVPHTWLMRVLELYKIDTTLRTFLMSCMRQWSTVLRYPGCRHTQRNSEPVRIERGIFQGDSLSPLWFCLALNPLSTLLENSGLGYRLKRGGQVISHLLYMDDLKLFAPNNLQLMELLKVTETFSSAIRMEFGVDKCAVMHVKRGEVVESVGTQLTDFINLRSLSPTETYKYLGMSEALGINITDMKQTLKERFFGRLKKVFNSLLSGGNKVRAFNGWVMPVLMYSFGVLKWTQTELDALDRKVRTLLTAYRMHHPRSSVMRLYIPRKCGGRGFLNAKTLHNREVCSLREYFLAADVGMHRDVVTVDKGLTPLSLANENWRKPVVLDTNDRREVWQSKELHGRFFRALHGPDVDQLASVAWLRSGDLFGETEGFVCAIMDEVIMTNNYRRFIVKDGTVDICRACHRPGESIRHIISGCSRLANGEYLHRHNLVARIIHQQLALKYSLVESEVPYYRYEPDPVLDNGHITLYWDRSIITDRTIVANKPDIVVVDRSERRAMIVDISVPHDENLVKAEKDKQIKYIDLAREVVDMWDVDSAIIVPIVVSGNGLIAKSLDQHLRRLALGDWIKGLIQKAVLLDTARIVRRFLSLEP

SEQ ID NO: 27277 - protein, 1201 aa, Mamestra brassicae
MLTRSRARHLATHPSPSASSLSSASPPPEPSPTVSAVTPAVAVASSSSDEYFSPPTTPPPARRRRGRRPPDGLGPRGPPASDRVPAPGGSVQRMRWTQSINENVMRSYFGATEGGTNLTAYRGRMLSLFQVLEPAVNVSAQRLSDQVRVIQRNRMLDDSVLDRLRMEMCGHVITPPSQTVAPPQSQISSHADEESNDRVTNVSTQCNEELRSALECAIREYRYVPNELRPRLPRLPMHNKNRALVAALDSQLSNYFDDCEDLTDTHSIMYCAAVAACRVAHVKMTNDRVTRPKPAVPAWQCRIERRIGGARALIGKLICFREGNTRPRVMRFVRRAFSGTDISPRDYMSRVTERIDFLKQKVYAWANRIRRYRRRVERYTQNRTFRSNERWVYRVWEQPDQGVTDTRLPDDDAMCSFWRNIWSVPVSHTEGGWIREVERACDPLPEMGAITISPQDVARAVRPLPNWKSPGPDGLHNFWIKWLQRSHARLASQYQTALESGSLPEFLTTGVTHLLHKSGSTAEPKNYRPITCLPTVYKVLTSILRAKINNHINSNNIMSVSQNGCRNGSRGTKELLLIDMAISQQVRRSRKDLSTCWIDYKKAYDSVPHTWLMRVLELYKIDTMLRTFLMSCMGQWRTVLRYPGCRNIQRNSEPVRIERGIFQGDSLSPLWFCLALNPLSTLLENSGLGYRLRRREERGGQVISHLLYMDDLKLFAPSNLQLMELLKVTETFNSAIRMEFGVDKCAVMHVKRGEIMESVGTQLSDSINLRSLSSTETYKYLGMSEALGINVTDMKQSLKERCFGRLKKVFNSLLSGGNKVRAFNGWVMPVLMHSFGVLKWTQTELDALDRRVRTLLTAYRMHHPRSSVMRLYIPRKCGGRGFLNAKTLHNREICSLREYFLAVDVGMHRDVVAVDKGLTPLSLANENWRKPAVLDTNDRRAVWQSKELHGRYFRALHGPDVDQLASVAWLRFGDLFGETEGFVCAIMDEVIMTNNYRRFIVKDGTVDICRACHRPGESIRHIVSGCSRLANGEYLHRHNLVARIIHQQLALKYSLVESEVPYYRYAPDPVLDNGNITLYWDRSIITDRTIVANKPDIVVVDRIERRAMIVDITVPHDENLVKAEKDKQIKYIDLAREVVDMWDVDSAIIVPIVVSANGLIATSLDQHLRRLSLGSWIKGLIQKAVLLDTARIVRRFLSLEP

SEQ ID NO: 27278 - protein, 1200 aa, Mamestra brassicae
MLTRSRARHLATHPSSSASSLSSASPPPEPSPTVSAVTPAVAVASSSSDEYFSPPTTPPPSRRRRGRRLPDGLGPRGPPASDRVPAPGGSVQRMRWTQSINENVMRSYFGATEGGTNLTAYRGRMLSLFQVLEPAVNVSAQRLSDQVRVIQRNRMLDDSVLDHLRMEMCDHVITPPSQTVAPPQSQISSHAGEESNDRVTNVSTQCTEELRSALECAIREYHYVPPELRPRLPRLPMHNKNRALVAALDSQLSNYFDDCEDLTDTHSIMYCAAVAAYRVAHVKITNKRVTRPKPAVPAWQCRIERRIGGARALIGKLICFREGNTRPRVMRFVRQAFSGTDISPRDYMSRVTERIDFLKQKVYAWANRIRRYRRRVERYTQNRTFRSNERWVYRVWKQPDQGVTDTRLPDDDAMCSFWRNIWSVPVSHTEGGWIREVERACDPLPEMGAITISPQDVARAVRPLPNWKSPGPDGLHNFWIKWLQRSHARLASQYQTVLESGSLPEFLTTGVTHLLHKSGSTAEPKNYRPITCLPTVYKVLTSILRAKINNHINSNNIMSVSQNGCRNGSRGTKELLLIDMAISQQVRRSRKDLSTCWIDYKKAYDSVPHTWLMRVLELYKIDTMLRTFLMSCMGQWRTVLRYPGCRNIQRNSEPVRIERGIFQGDSLSPLWFCLALNPLSTLLENSGLGYRLKRGGQVISYLLYMDDLKLFAPSNLQLMELLKVTETFSSAIRMEFGVDKCAVMHVKRGEIMESVGTQLSDSINLRSLSSTETYKYLGMSEALGINTINVTDMKQSLKERFFGRLKKVFNSLLSGGNKVRAFNGWVMPVLMHSFGVLKWTQTELDTLDRRVRTLLTAYRMHHPRSSVMKLYIPRKCGGRGFLNAKTLHNREICSLREYFLAVDVGMHRDVVTMDKGLTPLSLANENWRKPAVLDTNDRRAVWQSKELHGRYFRALHGPDVDQLASVAWLRFGDLFGETEGFVCAIMDEVIMTNNYLRFIVKDGTVDICRACHRPGESIRHIVSGCSRLANGEYLHRHNLVARIIHQQLALKYSLVESEVPYYRYAPNPVFDNGNITLYWDRSIITDRTIVANKPDIVVVDRIERRAMIVDITVPHDENLVKAENDKQIKYIDLAREVVDMWDVDSAIIVPIVVSANGLIATSLDQHLRRLSLGSWIKGLIQKAVLLDTARIVRRFLSLEP

SEQ ID NO: 27279 - protein, 1089 aa, Mamestra brassicae
MRSYFGATEGGTNLTAYRGRMLSLFQVLEPAVNVSAQRLSDQVRVIQRNRMLDDSVLDRLRMEMCGHVITPPSQTVSPPQSQISSHADEESNDRVTNVSTQCNEELRSALECAIREYRYIPPELRPRLPRLPMHNKNRALVAALDSQLSNYFDDCEDLTDTHSIMYCAAVAACRVAHVKMTNDRVTRPKPAVPAWQCRIERRIGGARALIGKLICFREGNTRPRVMRFVRRAFSGTDISPRDYMSRVTERIDFLKQKVYAWANRIRRYRRRVERYTQNRTFRSNERWVYRVWEQPDQGVTDTRLPDDDAMCSFWRNIWSVPVSHTEGGWIREVERACNPLPEMGAITISPQDVARALRPLPNWKSPGPDGLHNFWIKWLQKSHARLASQYQTALESGSLPEFLTTGVTHLLHKSGSTAEPKNYRPITCLQTVYKVLTSILRAKINNHINSNNIMSVSQNGCRNGSRGTKELLLIDMAISQQVRRFRKDLSTCWIDYKKAYDSVPHTWLMRVLALYKIDTMLRTFLMSCMGQWRTVLRYPGCRNIQRNSEPVRIERGDSLSPLWFCLALNPLSTLLENSGLGYRLKRGGQVISHLLYMDDLKLFAPSNLQLMELLKVTETFSSAIRMEFGVDKCAVMHVKRGEIMESVGTQLSDSINLRSLSSTETYKYLGMSEALGINVTDMKQSLRERFFGRLKKVFNSLLSGGNKVRAFNGWVMPVLMHYFGVLKWTQTELDALDRRVRTLLTAYRMHHPRSSVMRLYIPRKCGGRGFLNAKTLHNREICSLREYFLAVDVGMHQDVVTVDKGLTPLSLANENWRKPAVLDTNDRRAVWQSKELHGRFFRALHGPDVDQLASVAWLRFGDLFGETEGFVCAIMDEVIMTNNYRRFIVKDGTVDICRACHRPGESIRHIVSGCSRLANGEYLHRHNLVARIIHQQLALKYSLVESEVPYYRYAPDPVLDNGNITLYWDRSIITDRTIVANKPDIVVVDRIERRAMIVDITVPHDENLVKAEKDKQIKYIDLAREVVDMWDVDSAIIVPIVVSANGLIATSLDQHLRRLSLGSWIKGLIQKAVLLDTARIVRRFLSLEP

SEQ ID NO: 27280 - protein, 1069 aa, Mamestra brassicae
MLTRSRARHLATHPSPSASSLSSASPPPEPSPTVSAVTPAVAVASSSSDEYFSPPTTPPPARRRRGRRPPDGLGPRGPPASDRVPAPGGSVQRMRWTQSINENVMRSYFGATEGGTNLTAYRGRMLSLFQVLEPAVNVSAQRLSDQVRVIQRNRMLDDSVLDRLRMEMCGHVITPPSQTVAPPQSQISSHADEESNDRVTNVSTQCNEELRSALECAIREYRYIPPDLRPRLPRLPMHNKNRALVAALDSQLSNYFDDCEDLTDTHSIMYCAAVAACRVAHVKMTNDRVTRPKPAVPAWQCRIERRIGGARALIGKLICFREGNTRPRVMRFVRRAFSGTDISPRDYMSRVTERIDFLKQKVYAWANRIRRYRRRVERYTQNRTFRSNERWVYRVWEQPDQGVTDTRLPDDDAMCSFWRNIWSVPVSHTEGGWIREVERACDPLPEMGAITISPQDVARAVRPLPNWKSPGPDGLHNFWIKWLQRSHARLASQYQTALESGSLPEFLTTGVTHLLHKSGSTAEPKNYRPITCLPTVYKVLTSILRAKINNHINSNNIMSVSQNGCRNGSRGTKELLLIDMAISQQVRRSRKDLSTCWIDYKKAYDSVPHTWLMRVLELYKIDTMLRTFLMSCMGQWRTVLRYPGCRNIQRNSEPVRIERGIFQGDSLSPLWFCLALNPLSTLLENSGLGYRLKRGGQVISHLLYMDDLKLFAPSNLQLMELLKVTETFSSAIRMEFGVDKCAVMHVKRGEILESVGTQLSDSINLRSLSSTETYKYLGMSEALGINVTDMKQSLRERFFGRLKKVFNSLLSGGNKVRAFNGWVMPVLMHSFGVLKWTQTELDALDRRVRTLLTAYRMHHPRSSVMRLYIPRKCGGRGFLNAKTLHNREICSLREYFLAVDVGMHRDVVTVDKGLTPLSLANENWRKPAVLDTNDRRAVWQSKELHGRFFRALHGPDVDQLASVAWLRFGDLFGETEGFVCAIMDEVIMTNNYRRFIVKDGTVDICRACHRPGESIRHIVSGCSRLANGEYLHRHNLVARIIHQQLALKYSLSCGIGGAVLQVCARPSSR

SEQ ID NO: 27281 - protein, 1203 aa, Hecatera dysodea
MLTRAAARRARLPPPASSLSSASPPPEPSPTVSAATPAVAVASSSSDEYFSPPTSPPPARRRRGRRPPDGLGPRGPPVSDRVPAPGGSVQRMRWTQTINENVMRSYYGATEGGTNLTAYRGRMLSLFQVLEPAVNVSAQRLSDQVRVIQRNRMLDDSVLDRLRTEICSHVIVPSPQTVAPPQLTQIPCHADEENNDRVTNVSTQCNDELRSALESAIREYRYVSPELRPRIPRLPMHNKNRALVAALDSQLSNYFDNCEDLTDAHSIMYCAAVAACRVAHVKMPSDRVTRPKVAVPAWQCRIERRIGGARALIGKLICFREGNTRPRVMRFVRRAFSGTDISPSDYLSRVTERIDFLKQKVYAWANRIRRYKRRVERYTQNRTFRSNERWVYKAWERPDQDVTDMHPPDDDAMCSFWRNIWSVPVSHTEGDWIREVERACDPLPEMGAIIISPHDVARAVRPLPNWKSPGPDGLHNFWIKWFKGSHACLASRYQAALESGSLPEFFMTGVTHLLHKSGSTAEPKNYRPITCLPTVYKVLTSILRDKINQHINSNNIMSASQNGCRNGSRGTKELLLIDMVISQQVRRSRKDLSTCWIDYKKAYDSVPHSWLMRVLELYKIDTTLRTFLMSCMGQWRTVLRYPGCRNIQRNSEPVRIERGIFQGDSLSPLWFCLALNPLSTLLENSGLGYRLRRGGQVISHLLYMDDLKLFAPTNLQLMELLKVTETFSNAIRMEFGVDKCAVMHVKRGEIMESVGTQLSDSINLRSLSSTETYKYLGMSEALGINVTDMKQSLRERFFGRLKKVLNSLLSGGNKVRAFNGWVMPVLMYSFGVLKWTQTELDALDRRVRTLLTAYRMHHPRSSVMRLYIPRKCGGRGFLNAKTLHNREICSLREYFLAVDVGMHRDVVAVDKGLTPLSLANENWRKPAVLDTNDRRAVWQSKELHGRFFRALHGPDVDQLASVAWLRFGDLFGETEGFVCAIMNEVIMTRNYRRFIVKDGTVDICRACHRPGESIRHIVSGCSSLANGEYLHNLVARIIHQQLALKYSLVESEVPYYRYVPDPVLDNGNITLYWDRSIITDRTIVANKPDIVVVDRIVRRAMIVDITVPHDENLVKAEKDKQIKYLDLAREVVDMWDVDSAIIVPIVVSVNGLIAKSLDQHLRRRLALSGGSSLWSPDRRYLGPCSRYRWATIFYIFKCFFFLL

SEQ ID NO: 27282 - protein, 1086 aa, Mamestra brassicae
MNSNPKTTKKKKNNSTKIELKNINIWRRNCNIEDMLTRSRARHLATHPSPSASSLSSASPPPEPSPTVSAVTPAVAVASSSSDEYFSPPTTPPPARRRRGRRPPDGLGPRGPPASDRVPAPGGSVQRMRWTQSINESVMRSYFGATEGGTNLTAYRGRMLSLFQVLEPAVNVSAQRLSDQVRVIQRNRMLVDSVLDRLRMEMCGHVITPPSQTVAPPQSQISSHADEESNDRVTNVSTQCNEELRSALECAIREYRYVPPELRPRLPRLPMHNKNRALVAALDSQLSNYFDDCEDLTDAHSIMYCAAVAACRVAHVKITNDRVTRPKPAVPAWQCRIEGRIGGARALIGKLICFREGNTRPRVMRFVRRAFSGTDISTRDYMSRVTERIDFLKQKVYAWANRIRRYRRRVERYTQNRTFRSNERWVYRVWEQPDHGVTDTRLPDDDAMCSFWRNIWSVPVSHTEGDWIQEVERACDPLPEMGAITISPQDVARAVRPLPNWKSPGPDGLHNFWIKWLQRSHARLASQYQTALESGSLPEFLTTGVNHLLHKSGSTAEPKNYRPITCLPTVYKVLTSILRAKINNHINSNNIMSVSQNGCRNGSRGTKELLLIDMAISQQVRRSRKDLSTCWIDYKKAYDSVPHTWLMRVLELYKIDTMLRTFLMSCMGQWRTVLRYPGCRNIQRNSEPVRIERGIFQGDSLSPLWFCLALNPLSTLLENSGLGYRLKRGGQVLSHLLYMDDLKLFALSNLQLMELLKVTETFSSAIRMEFGVDKCAVMHVKRGEIMESVGTQLSDSINLRSLSSTETYKYLGMSEALGINVTDMKQSLKERFFGRLKKVFNSLLSGGNKVRAFNGWVMPVLMHSFGVLKWTQTELDALDRRVRTLLTAYRMHHPRSSVMRLYIPRKCGGRGFLNAKTLHNREICSLREYFLAVDVGMHRDVVTVDKGLTPLSLANENWRKPAVLDTNDRRAVWQSKELHGRFFRALHGPDVDQLASVAWLRFGDLFGETEGFVCAIMDEVIMTNNYRRFIVKDGTVDICRACHRPGESIRHIVSGCSRLANGEYLHRHNLVARIIHQQLALKYSLV

SEQ ID NO: 27283 - protein, 1196 aa, Mamestra brassicae
MLTRSRARHLATHPSPSASSLSSASPPPEPSPTVSAVTPSVAVASSSSDEYFSPPTTPPTARRRRGRRPPDGLGPRGPPASDRVPAPGGSVQRMRWTQSINENVMRSYFGATEGGTNLTAYRGRMLSLFQVLEPAVNVSAQRLSDQVRVIQRNRMLDDSVLDCLRMEMCGHVITPPSQTVSPPQSQISSHADEESNDRVTNVSTQCNEELRSALECAIREYRYIPPELRPRLPRLPMHNKNRALVAALDSQLSNYFDDCEDLTDTHSIMYCAAVAACRVAHVKMTNDRVTRPKPAVPAWQCRIERRIGGARALIGKLICFREGNTRPRVMRFVRRAFSGTDISPRDYMSRVTERIDFLKQKVYAWANRIRRYRRRVERYTQNRTFRSNERWVYRVWEQPDQGVTDTRLPDDDAMCSFWRNIWSVPVSHTEGGWIREVERACDPLPEMGAITISPQDVARALRPLPNWKSPGPDGLHNFWIKWLQRSHARLASQYQTALESGSLPEFLTTGVTHLLHKSSSTAEPKNYRPITCLPTVYKVLTSVLRAKINNHINSNNIMSVSQNGCRNGSRGTKELLLIDMAISQQVRRSRKDLLTCWIDYKKAYDSVPHTWLMRVLELYKIDTMLRTFLMSCMGQWRTVLRYPGCRNIQRNSEPVRIERGIFQGDSLSPLWFCLALNPLSTLLENSGLGYRLKVGQVISHLLYMDDLKLFAPSNLKLMELLKVTETFSSAIRMEFGVDKCAVMHVKRGEIMESVGTQLSDSINLSSLSSTETYKYLGMSEALGINVTDMKQSLRERFFGRLKKVFNSLLSGGNKVRAFNGWVMPVLMHSFGVLKWTQTELDALDRRVRTLLTAYRMHHPRSSVMRLYIPRKCGGRGFLNAKTLHNREICSLREYFLAVDVGMHRDVVTLDKGLTPLSLANENWRKPAVLDTNDRRAVWQSKELHGRFFRALHGPDVDQLASVAWLRFGDLFGETEGFVCAIMDEVIMTNNYRRFIVKDGTVDICRACHRPGESIRHIVSGCSRLANGEYLHRHNLVARIIHQQLALKYSLVESEVPYYRYAPDPVLDNGNITLYWDRSIITDRTIVANKPDIVVVDRIERRAMIVDITVTHDENLVKAEKDKQIKYIDLAREVVDMWDVDSAIIVPIVVSANGLIATSLDQHLRRLSLGSWIKGLIQKAVLLDTARIVRRFLSLEP

SEQ ID NO: 27284 - protein, 869 aa, Mamestra brassicae
MCFVRRAFSGTDISPRDYMSRVTERIDFLKQKVYAWANRIRRYRRRVERYTQNRTFRSNERWVYRVWEQPDHGVTDTRLPDDDAMCSFWRNVWSVPVSHTEGDWIREVERACDPLPEMGAITISPQDVARAVRPLPNWKSPGPDGLHNFWIKWLQRSHARLASQYQTALESGSLPEFLTTGVTHLLHKSGSTAEPKNYRPITCLPTVYKVLTSILRAKINNHINSNNIMSVSQNGCRNGSRGTKELLLIDMAISQQVRRSRKDLSTCWIDYKKAYDSVPHTWLMRVLELYKIDTMLRTFLMSCMGQWRTVLRYPGCRNIQRNSEPVRIERGIFQGDSLSPLWFCLALNPLSTLLENSGLGYRLKRGGQEVLSHLLYMDDLKLFAPSNLQLMELLKVTETFSSAIRMEFGVDKCAVMHVKCGEIMESVGTQLSDSINLRSLSSTETYKYLGMSEALGINVTDMKQSLKERFFGRLKKVFNSLLSGGNKVRAFNGWVMPVLMHSFGVLKWTQTELDALDRRVRTLLTAYRMHHPRSSVMRLYIPRKCGGRGFLNAKTLHNREICSLREYFLAVDVGMHRDVVAVNKGLTPLSLANENWRKPAVLDTNDRRAVWQSKELHGRYFRALHGPDVDQLASVAWLRFGDLFGETEGFVCAIMDEVIMTNNYRRFIVKDGTVDICRACHRPGESIRHIVSGCSRLANGEYLHRHNLVARIIHQQLALKYSLVESEVPYYRYAPNPVLDNGNITLYWDRSIITDRTIVANKPDIVVVDRIERRAMIVDITVPHDENLVKAEKDKQIKYIDLAREVIDMWDVDSAIIVPIVVSANGLIATSLDQHLRRLSLGSWIRGLIQKAVLLDTARIVRRFLSLEP

SEQ ID NO: 27285 - protein, 1077 aa, Mythimna ferrago
MLTRAAARRARLSPPASSLSSASPPPEPSLTVSAVTPAVAAASSSSDEYYSPPTTPPPARRRGGRRPPDRLGPRGPPASDRVPASGGSVQRMRWTQSINENVMRSYYGATEGGNSLTAYRVRMLSLFQVLEPAVNVSAQRLSDQVRVILRNHMLDDTVLDRLRTEMSDRVITPPSQPVVPVVVPPSSYISFDTNEVNSDTVTNVSNQCNSELRSALECAIREYRNIPSELRPRIPRLPMCNKNRALVAALDSQLSSYFDDCEDLTDTHSIMYCAAVAACRVAHVKFPNSDVATRPKPAVPAWQCRIERRIGGARALIGKLICFREGNTRPRVMRFVRRAFLGTDISPRDYMSRVTERIDFLKQKVYAWANRIRRYKRRVERYTQNRTFRSNERWVYRAWERPDQGVTDARLPDDDAMSSFWRSIWSVPVSHTEGDWIRGVERACDPIPQMGAIDISPQDVARAVRPLPNWKSPGPDGLHNFWVKWFTRSHARLAYQFQSALESGSLPQFLTTGITHLLHKSGSTAEPKNYRPITCLPTVYKVLTSILRSKINSHIDENSIMSHSQNGCRNGSRGTKELLLVDMTISQQVRRSRKDLSTCWIDYKKAYDSVPHTWLMRVLELCKIDTTLRTFLMSCMRQWSTVLRYPGCRNIQRNSEPVRIERGIFQGDSLSPLWFCLALNPLSTLLENSGLGYRLKRGGQVISHLLYMDDLKLFAPNNLQLMELLKVTETFSSAIRMEFGVDKCAVMHVKRGEVVESVSTRLTDSINLRSLSPTETYKYLGMSEALGISITNMKQSLKERFFGRLKKVFNSLLSGGNKVRAFNGWVMPVLMYSFGVLKWTQTELDALDRRVRTLLTAYRMHHPRSSVMRLYIPRKCGGRGFLNAKTLHNREVCSLREYFLAADVGMHRDVVAVDKGLTPLSLANENWRKPIVLDTNDRREVWQSKELHGRFFRALHGPDVDQLASVAWLRFGDIFGETEGFVCAIMDEVIMTNNYRRFIVKDGSVDICRACHRPGESIRHIISGCSRLANGEYLHRHNLVARIIHQQLALKYSLVESEVPYCRYEPDPVLNNGHITL

SEQ ID NO: 27286 - protein, 1199 aa, Mythimna ferrago
MLTRAAARRARPPPPASSLSSASPPSEPSLTESAVTPAVAAASSSSDEYYSPPTTPPPTRRRGGRRPPACLGPRGPPTSERVPAAGGSVPRMRWTQSTNENVMRAYYGATEGGNNLTAYRVWMLSLFQVLEPAVNVSAQRLSDQVRVIQRNHMLDDTVLDRLRTEMSDRVITPPSQPVVPVVVPPSSHISFHTDEVSTDTVTNVSAQCNNELRSALECAIREYRNMPLELRPRLPRLPMRNKNKALVAALDSQLSNYFDDCEDLTDTHSIMYCAAVAACRVAHVKFPNSDVATRPKPAVPAWQCRIERRIGGARALIGKLICFREGNTRPRVMRFVRRAFSGTDISPRDYMSRVTERIDFLKQKVYAWANRIRRYKRRVERYTQNSTFRSNERWVYRAWERPDQGVTDTRLPDDDAMTSFWRNIWSVPVSHTEGGWTREVERACESITEMGAITISPQDVARAVRPLPNWKSPGPDGLHNFWIKWLQRSHARLASQYQAALESGSLPEFLTTGVTHLLHKSGSTAEPKNYRPITCLPTVYKVLTSILRAKINHHVDSNAIMSASQNGCRNGSRGTKELLLIDMAISQQVRRSRKDLSTCWIDYKKAYDSVPHTWLMRVLELYKVDATLRTFLMSCMRQWRTVLRYPGCRNIHRNSEPVRIERGIFQGDSLSPLWFCLALNPLSTLLENSGLGYRLKRGGQVISHLLYMDDLKLFAPNNLQLMELLKVTETFSSAIRMEFGVDKCAVMHIKRGEIVESVGIQLSDSIHLRSLSPTETYKYLGMSEALGINASDMKQSLRERFFGRLKKVLNSLLSGGNKVRAFNGWVMPVLMYAFGVLKWTQTELDALDRRVRTLLTAYRIHHPRSSVMRLYIPRKCGGRGFLNAKTLHNREVCSLREYFLATDGMHRDVVAVDKGLTPLSLANENWRKPVVLDTNVRKEVWQSKELHGRFFRVLHGPDVDQLASVAWLRSGDLFGETEGFVCAIMDEVIMTNNYRRFIVKDGTVDICRACHRPGESIRHIISGCSRLANGEYLHRHNLVARIIHQQLALKYSLVESEVPYYRYVPDPVLDSGDITLYWDRSIITDRTIVANKPDIVVVDRRERRAMIVDISVPHDENLVKAEKDKQIKYIDLAREVVDMWDVDSAIIVPIVVSANGLIAKSLDQHLRRLSLSGWIKGLIQKAVLLDTARIVRRFLSLEP

SEQ ID NO: 27287 - protein, 1129 aa, Mythimna ferrago
MLTRAAARRARPPPPASSLSSASPPPEPSLNASAVTPAATVASSSSDEFYSPPTSPPPARRRRGRRPPSSLGPRGPPASDRVPAPGGSVQRMRWTQSINENVMRSYYGATEGGNNLTAYRVRMLSLFQVLEPAVNVSAQRLSDQVRVILRNHMLDDSVLDRLRTEMSDRVITPPSQPVVPVVVPPSSHISFHTDEVSTDMVTNVSTQCNNELRSALECAIREYRNIPPELRPRIPRLPMCNKNRALVAALDSQLSNYFDDCEDLTETHSIMYCAAVAACRVAHVKFPDSDEATRPKSAVPAWQCRIERRIGGARALIGKLICFREGNTRPRVMRFVRRAFSGTNISPRDYMSRVTERIDFLKQKVYAWANRIRRYKRRVERYTQNRTFRSNERWVYRAWERPDQGVTDARLPDDDAMCSFWRSIWSVPVSHTEGDWTREVERACDPIPQMGAIDISPQDVARAVRPLPNWKSPGPDGLHNFWIKWFTRSHARLAYQFQSALESGSLPQFLTTGITHLLHKSGSTAEPKNYRPITCLPTVYKVLTSILRSKINSHIDENSIMSPSQNGCRNGSRGTKELLLIDMTISQQVRRSRKDLSTCWIDYKKAYDSVPHTWLMRVLELYKIDTTLRTFLMSCMRQWSTVLRYPGCRNIQRNSEPVRIERGIFQGDSLSPLWFCLALNPLSTLLENSGLGYRLKRGGQVISHLLYMDDLKLFAPNNLQLMELLKVTETFSSAIRMEFGVDKCAVMHVKRGEVVESVGVQLTDSINLRSLSPTETYKYLGMSEALGISTIDMKQSLKERFFGRLKKVFNSLLSGGNKVRAFNGWVMPVLMYSFGVLKWTQTELDALDRRVRTLLTAYRMHHPRSSVMRLYIPRKCGGRGFLNAKTLHNREVCSLREYFLAADVGMHRDVVALDKGLTPLSLANENWRKPIVLDTDDRREVWQSKELHGRFFRALHGPDVDQLASVAWLRFGDLFGETEGFVCAIMDEVIMTNNYRRFIVKDGTVDICRACHRPGESIRHIISGCSRLANGEYLHRHNLVARIIHQQLALKYSLVESEVPYYRYEPDPVLDNGHITLYWDRPIITDRTIVANKPDIVVVDRSERRAMIVDISVPHDENLVKAEKDKQIK

SEQ ID NO: 27288 - protein, 1204 aa, Atethmia centrago
MRTLLIIIRAAAARRARLPPPDSSLSSASPPPVPSTTVSAVTTPAAVVASSSSDEYFSPATTPPPVRRRGGRRPPDGLGPRGPPASDRVPAPGGSVQRMRWTRSMNENVMRSYYGATEGENNLTAYRVRMLSLFQVLEPAVNVSAQRLSDQVRVIQRNHMLDDTVLERLRIQSSHVVAPPSQTVVVLPQLDTQQADEGSDDRATNVSTQCNVELRSALDDAIREYRFMSPEVRPRLPRLPMHKKNRALVAVLDSQLSNYFDDCEDLTDTHSILYCAAVAVCRVAHVIFPNASRATRPKPTVPIWQCRIERRIGGARALIGKLICFREGNTRPRVMRFVRRAFSGTDISPQDYMSRVTERIDFLKQKVYAWANRIRRYKRRVDRYTQNRTFQSDERWVYRGWEQRDQGVTDTRLPDDDVMCSCWRSIWSVPVSHTEGDWARKVERACDPLPEMGAITICPQDVARAVRPLPNWKSPGPDGLHNFWLKWFLGSHARLAAQYQSALESGSLPQFLTIDVTHLLHKSGSTAEPQNFRPITCLPTVYKVLTYILRAKINKHIDTNSIMSASQNGCRNGSHGTKELLLIDMTISQQVRRSRKDLSTCWIDYKKAYDSVPHTWLMRVLELYKVDATLRTFLMSCMGQWRTVLCYPGCRNIQRNSEPIRIERGIFQGDSLSPLWFCLALNPLSTLLEDSDLGYRLRRGGQVISHLLYMDDLKLFASNNLQLMELLKITETFSSAIRMEFGVDKCAVMHVKRGEIVESVGTQLSDSINLRALSASETYKYLGMSEALGINVTDMKQSLKQRFFDRLKKVFNSLKRLSGGNKVRAFNGWVMPVLMYSFGILKWTQTELDALDRRVRTLLTAYRMHHPRSSVMRLYIPRKCGGRGFLNAKILHNREVCSLREYFLEADVGMHRDVVAVDKGLTPLSLAKENWRKLVVLDTNDRREVWQSKELHGRFFRALHEPDVDFQASVAWLRFGDLFGETEGFVCAIMDEVIMTKNYRRFIVKDGTVDMCRACHRPGESIRHIISGCSRLANEEYLHRHNLVARIIHQQLPLKYSLVESEVPYYRYVPDPVLDNGNITLYWDRSIITDRTIVANKPDIVVVDRTERRAMIVDITVPHDGNLVKAEKDTQIMNLDLAREVVDMWDVDSAIIVPIVVSANGLIAKSLDQHLRRLTLDGWIKGLIQKTVLLDTARIVRRFLSLGP

SEQ ID NO: 27289 - protein, 959 aa, Atethmia centrago
MHKKNRALVAVLDSQLSNYFDDCEDLTDTHSILYCAAVAVCRVAHVIFPNDSRATRPKPTVPIWQCRIERRIGGARALIGKLICFREGNTRPRVMRFVRRAFSGTDISPQDYMSRVTERIDFLKQKVYAWANRIRRYKRRVDRYTQNRTFQSDERWVYRGWEQRDQGVTDTRLPDDDVMCSFWRSIWSVPVSHTEGDWARKIERACDPLPEMGAITICPQDVARAVRPLPNWKSPGPDGLHNFWLKWFSGSHARLAAQYQTALESGSLPQFLTIGVTHLLNKSGSTAEPKNYRPITCLPTVYKVLTSILRAKINKHIDTNSIMSASQNGCRNGSRGTKELLLIDMTISQQVRRFRKDLSTCWIDYKKAYDSVPHTWLMRVLELYKVDATLRTFLISCMGQWRTVLRYPGCRNIQRNSEPIRIEWGIFQGDSLSPLWFCLALNPLSTLLEDSGLGYRLRRGGQVISHLLYMDDLKLFASNNLQLMELLKITETFSSAIRMEFGVDKCAVMHVKRGEIVESVGTQLSDSINLRALSASETYKYLGMSEALGINVTDMKQSLKQRFFDRLKKVFNSLLSGGNKVRAFNGWVMPVLMYSFGILKWTQTELDALDRRVRTLLTAYHPRSSVMRLYIPRKCGGRGFLNAKTLHNREVCSLREYFLEADVGMHRDVVAVDKGLTPLSLAKENWRKLVVLDTNDRREVWQSKELHGRFFRALHEPDVDFQASVAWLRFGDLFGETEGFVCAIMDEVIMTKNYRRFIVKDGTVDMCRACHRPGESIRHIISGCSRLANEEYLHRHNLVARIIHQQLALKYSLVESEVPYYRYVPDPVLDNGNITLYWDRSIITDRAIVANKPDIVVVDRTERRAMIVDITVPHDGNLVKAEKDKQIKYLDLAREVVDMWDVDSAIIVPIVVSANGLIAKSLDQHLRRLTLDGWIKGLIQKAVLLDTARIVRRFLSLEP

SEQ ID NO: 27290 - protein, 1046 aa, Mythimna ferrago
MPREIMQYGRQHCELKCRRIEQVNSKFKPKSIIIIIIIRMLSLFQVLEPAVNVSAQRLSDQVRVILRNHMLDDTVLDRLRTEMSDRVITPPSQPVVPAVVPPSNYISFHTDEGSSDTVTNVSNQCNSELRSALECAIREYRNIPPELRPRIPRLPMCNKNRALVAALDSQLSNYFDDCEDLTDTHSIMYCAAVAACRVAHVKFPNSDVATRPKPAVPAWQCRIERRIGGARALIGKLICFREGNTRPRVMRFVRRAFSGTDISPRDYMSRVTERIDFLKQKVYAWANRIRRYKRRVERYTQNRTFRSIERSVYRAWERPDQGVTDARLPDDDAMSSFWRNIWSVPVSHTEGDWTREVERACDPIPQMGAIDISPQDVARAVRPLPNWKSPGPDGLHNFWIKWFTRSHARLAYQFQSALESGSLPQFLTTGITHLLHKSGSTAEPKNYRPITCLPTVYKVLTSILRSKINSHIDENSIMSPSQNGCRNGSRGTKELLLIDMTISQQVRRSRKDLSTCWIDYRKAYDSVPHTWLMRVLELYKIDTTLRTFLMSCMRQWSTVLRYPGCRNIQRNSEPVRIERGIFQGDSLSPLWFCLALNPLSTLLENSGLGYRLKRGGQVISHLLYMDDLKLFAPNNLQLMELLKVTEIFSSAIRMEFGVDKCAVMHVKRGEVVESVSTQLTDSINLRSLSPTETYKYLGMSEALGISITGMKQSLRERFFGRLKKVFNSLLSGGNKVRAFNGWVMPVLMYSFGVLKWTQTELDALDRRVRTLLTAYRMHHPRSSVMRLYIPRKCGGRGFLNAKTLHNREVCSLREYFLAADVGMHRDVVAVDKGLTPLSLANEKWRKPIVLDTNDRREVWHSKELHGRFFRALHGPDVDQLASVAWLRFGDLFGETEGFVCAIMDEVIMTNNYRRFIVKDGTVDICRACHRPGESIRHIISGCSRLANGEYLHRHNLVARIIHQQLALKYSLVESEVPYYRYEPDPVLDNGHITLYWDRPIITDRTIVANKPDIVVVDRSERRAMIVDISVPHDENLVKAEKDKQIK

SEQ ID NO: 27291 - protein, 867 aa, Ochropleura plecta
MRFVRRAFAGTDICPPDYMSRITERIDFLKQKVYAWANRIRRYKRRVERYTLNRTFQSDKRWVYRAWERPDQGVSDTHLPDDDAMCLFWRSIWSVPVSHTEGEWTREVERACDPIPEMGALTISPQDVACAIRPLPNWKSPGPDGLHNFWIKSIQRSHTCLATLFQTALESGSLPKFLTTGITHLLHKSGSTAEPKNYRPITCLPTLYKVLTSILRAKITKHIDDNSIMSASQNGCRNGSRGTKELLLIDMAISQQVRRSRRHLSTCWIDYKKAYDSVPHTWLMRVLEMYKVDATLRTFLISCMRQWSTVLRYPGCRQIQRNSEPIRIERGIFQGDSLSPLWFCLALNPLSTLLENSGLGYRLRRGGQVISHLLYMDDLKLFAPNDLQLMELLKVTETFSSAIRMEFGVDKCAVMHVKRGEIMESVGTQLSDSTNLRSLSATETYKYLGMSEALGINVADMKQSLKERFFGRLRKVFNSLLSGGNKVRAFNGWVMPVLMYSFGILKWTQTELDALDRKVRTLLTAFRMHHPRSSVMRLYIPRSCGGRGFNAKTLHNREICSLREYFLETDVGMHRDVVAVDKGLTPLSLAKENWHKPVVLDTNDRKEVWQSKELHGRFFRALHGPDVDQSASVAWLRSGDLFGETEGFVCAIMDEVMMTNNYRRFIVKDGTVDICRACHRPGESIRHIISGCSRLANGEYLHRHNLVARIIHQQLALKYNLVESEVPYYRYEPDPVLEHGNITLYWDRSIITDRTIVANKPDIVVVDRSERRAMIVDITVPHDENLVKAEKDKQIKYIDLAREVVDMWDVDSAIIVPIVVSANGLIAKSLDQHLRRLSLGSWIKGLIQKAVLLDTARIVRRFLSLEP

SEQ ID NO: 27292 - protein, 1036 aa, Mythimna ferrago
MSNRVITPPSQPVVPVVVPQFSHISLYTDEVSTDTVTNVSTQCNNELRSALECAIREYRNMPLELRPRLPRLPMHNKNKALVAALDSQLSNYFDDCEDLTDTHSIMYCAAVAACRVAHVKFPNSDVATRPKPAVPAWQCRIERRIGGARALIGKLICFREGNTRPRVMRFVRRAFSGTDISPRDYMSRVTERIDFLKQKVYAWANRIRRYKRRVERYIQNSTFRSNERWVYRAWERPDQGVTDTRLPDDDAMCSFWRNIWSVPVSHTEGGWTREVERACESITEMGAIKISPQDVARAVRPLPNWKSPGPDGLHNFWIKWLQRSHARLASQYQAALESGSLPEFLTTGVTHLLHKSGSTAEPKNYRPITCLPTVYKVLTSILRAKINHHVDNNAIMSASQNGCRNGSRGTKELLLIDMTISQQVRRSRKKNLSTCWIDYKKAYDSVPHTWLMRVLELYKVDATLRTFLMSCMRQWRTVLRYPGCRNIQRNSEPVRIERGIFQGDSLSPLWFCLALNPLSTLLENSGLGYRLKRGGQVISHLLYMDDLKLFAPNNLQLMELLKVTETFSSAIRMEFGVDKCAVMHIKRGEIVESVGIQLSDSIHLRSLSPTETYKYLGMSEALGINATDMKQSLRERFFGRLKKVLNSLLSGGNKVRAFNGWVMPVLMYAFGVLKWTQTELDSLDRRVRTLLTAYRMHHPRSSVMRLYIPRKCGGRGFLNAKSLHNREVCSLREYFLAADGGMHRDVVAVDKGLTPLSLANENWRKPVVLDTNVRKEVWQSKEFHGRFFRALHGPDVDQLASVAWLRVGDLFGETEGFVCAIMDEVIMTNNYRRFIVKDGTVDICRACHRPGESIRHIISGCSRLANGEYLHRHNLVARIIHQQLALKYSLVESEVPYYRYVPDPVLDNGDITLYWDRSIITDRTIVANKPDIVVVDRSERRAMIVDISVPHDENLAKAEKDKQIKYIDLAREVVDMWEVDSAIIVPIVVSANGLIAKSLDQHLRRLSLGDWIKGLIQKAVLLDTARIVRRFLSLEP

SEQ ID NO: 27293 - protein, 1081 aa, Mythimna ferrago
MLTRAAARRARPPPPASSLSSASPPPDPSPTVSAVTPAVAAASSSSDEYYSPPTTPPPARRRGGRRPPACFGPQGPPASDRVPATGGSVPRMRWTQSTNENVMRAYYGATEGGNNLTAYRVRMLSLFQVLEPAVNVSAQRLSDQVRVIQRNHMLDDTVLDRLRTEMSNHVIAPSSQPVVPVMVPPSNHVANPADVESTDMVIQVSTQCTNELKSALECAIREYRNMPSVLRPRLPRLPMHNKNKALVAALDMQLSNYFDNCKDLTDAHSIMYCAAVAACRVAHVKFPNSDVATRPKPAVPAWQCRIERRIGGARALIGKLICFREGNTRPRVMRFVRRAFSGTDICPRDYMLRVTERIDFLKQKVYAWANRIRRYKRRVERYTQNRAFQNNERWVYRAWERPDQGVTDTRLPDDDAMCSFWRNIWSVPVSHTEGGWTREVEQACEPITEMGAITISPQDVARAVRPLPNWKSPGPDGLHNFWIKWLQRSHACLASQYQAALESSSLPEFLTTGVTHLLHKSGSTAEPKNYRPITCLPTVYKVLTSILRNKINNHIDNNSIMSASQNGCRKGSRGTKELLLIDMAISQQVRRSRKDLSTCWIDYKKAYDSVPHTWLMRVLELYKIDATLRTFLMSCMRQWRTVLRYPGCRNIQRSSEPVRIERGIFQGDSLSPLWFCLALNPLSTLLENSGLGYQLKRGGQVTSHLLYMDDLKLFAPNKLQLMELLKVTETFSSAIRMEFGVDKCAVMHVKRGEIVESVSTQLSDSISLRSLSATETYKYLGMSEALGINATDMKQSLRERFFGRLKKVFNSLLSGGNKVRAFNGWVMPVLMYSFGVLKWTQTELDALDRRVRSLLTANRMHHPRSSVMRLYIPRKCGGRGFLNAKTLHNREVCSLREYFLAADVGMHRDVVAVDKGLTPLSLANENWRKPVVLDTNDRKEVWQSKELHGRFFRALHGPDVDQLASVAWLRVGDLFGETEGFVCAIMDEVIMTKNYRRFIVKDGTVDICRACHRPGESIRHIISGCSRLANGEYLHRHNLVARIIHQQLALKYSLVESEVPYYRYVPDPVLDNGDRVRLLKA

SEQ ID NO: 27294 - protein, 1200 aa, Mythimna ferrago
MLTRAAARRARPPPPASSLSSASPPPDPSPTVSAVTPTVAAASSSCDEYYSPPTTPPPARRRGGRRPPACFGPQGPPASDRVPATGGSVPRMRWTQSTNENVMRAYYGATEGGNNLTAYRVRMLSLFQVLEPAVNVSAQRLSDQVRVIQRNHMLDDTVLDRLRTEMSNHVIAPSSQPVVPVMVPPSNHVANPADVESTDMVIQVSTQCTNELRSALECAIREYRNMPSVLRPRLPRLPMHNKNKALVAALDMQLSNYFDNCKDLTDAHSIMYCAAVAACRVAHVKFPNSDVATRPKPAVPAWQCRIERRIGGARALIGKLICFREGNTRPRVMRFVRRAFSGTDICPRDYMLRVTERIDFLKQKVYAWANRIRRYKRRVERYTQNRAFQSNERWVYRAWERPDQGVTDTRLPDDDAMCSFWRNIWSVPVSHTEGGWTREVEQACEPITEMGAITISPQDVARAVRPLPNWKSPGPDGLHNFWIKWLQRSHACLASQYQAALESSSLPEFLTTGVTHLLHKSGSTAEPKNYRPITCLPTVYKVLTSILRDKINNHIDNNSIMSASQNGCRKGSRGTKELLLIDMAISQQVRRSRKDLSTCWIDYKKAYDSVPHTWLMRVLELYKIDTTLRTFLMSCMRQWRTVLRYPGCRNIQRSSEPVRIERGIFQGDSLSPLWFCLALNPLSTLLENSGLGYQLKRGGQVTSHLLYMDDLKLFAPNKLQLMELLKVTETFSSAIRMEFGVDKCAVMHVKRGEIVESVSTQLSDSISLRSLSATETYKYLGMSEALGINATDMKQSLRERFFGRLKKVFNSLLSGGNKVRAFNGWVMPVLMYSFGVLKWTQTELDALDRRVRSLLTANRMHHPRSSVMRLYIPRKCGGRGFLNAKTLHNREVCSLREYFLAADVGMHRDVVAVDKGLTPLSLANENWRKPVVLDTNDRKEVWQSKELHGRFFRALHGPDVDQLASVAWLRVGDLFGETEGFVCAIMDEVIMTKNYRRFIVKDGTVDICRACHRPGESIRHIISGCSRLANGEYLHRHNLVARIIHQQLALKYSLVESEVPYYRYVPDPVLDNGDITMYWDRSIITDRTIVANKPDIVVVDRRERRAMIVDISVPHDENLVKAEKDKQIKYIDLAREVVDMWDVDSAIIVPIVVSGNGLIAKSLDRHLRRLALGSWIKGLIQKAVLLDTARIVRRFLSLEP

SEQ ID NO: 27295 - protein, 1077 aa, Spilosoma lubricipeda
MELYIYTAVNVSAQRLSDQVRAIQRCHLLDDAVLERIRSDIRSSLAVPSSSHVVDTIVNTTSQLPRSEYIDELVDSEIISVSTQCNDTIRSTLEDAIREYRYVDSNNRPRLSRLPMHKRNLALVSALDSLLPDYFNNSEDLSDTHSILYCAAIAVCRVAGVNFVECKTATRPKNTVPAWQCRIERRIAGTRTLIGKLISFRSGNTRPKVMRFVKQAFLGTTVSPQQYMSCVTERIDFLKQKVYAWANRIRRYRKRTDRYNQNRTFQRNEKWVYQKWEKLSPCMSDEHLPDKNATNYFWRNIWSTPVTHTEGHWCRDVERSCESITPMEPVRIDKEDVSCAVRSLANWKAPGPDGLHNFWLKWFRSSHAYLASQFQMALDSGSLPQFLTTGITHLLHKSGSTMDPKNFRPITCLPTLYKLLTSILRLKITTHINNNSIISVSQNGCRSGTRGTKELLIIDMTISQQVRRNRKSLATCWIDYKKAYDSVPHTWLLRVLELYKIDTTLCTFLKSCMGQWRTVLRYPGCRQSTMNDVLIKIERGIFQGDSLSPLWFCLALNPLSTLLEGSGIGYRLQKDDRVISHLLYMDDLKLLAPTKLQLTALLKVTENFSNSIKMEFGVDKCAVMCVKKGLIVESEGVELSDSTKLRSLSATETYKYLGFSQSLGIPESDVKQMLRERFFGRLKKVLKSLLSGGNKVRAYNSWVMPVLMYSFGILRWTQTELDAFDRRARTLLTAFRMHHPRSSVMRLYIPRKFGGHGLLNIKTLHNREIYNLREYFLHTDVEMHRNVVAVDTGLTPLALAKENWRKPVVLSTNDRREVWKGKELHGRFYRALNGPDIDFKASTSWLRYGDLFGETEGFVCAIMDEVIMTNNYRKYILKDGTVDICRACHRPGESIRHIISGCSRLANGEYLHRHNQVARIVHQQLALKYHLVNSEVPYYRYVPDPVLENGRATLYWDRSIITDRTIVANKPDIVVIDRLERRAMIVDIAVPHDENLVKAEKEKQIKYLDLSHEIVDMWNVDSAIIVPIVVSAHGLIARSLDQHLKRLTLDGWIKGLMQKAVLLDTARIVRRFLSLEP

SEQ ID NO: 27296 - protein, 1199 aa, Spilosoma lubricipeda
MLTRARSRAQLLTPDSSLRSALPSSDARTEVPTVAEASSSSSSDEFFSPPTSPTPVRRQERYRPPDSLGPRGPLTSNRAPAAGGNVRRMKWTHSINENVMRAYFRATELGTNLTAYRVRLVSLFQELEPAVNVSAQRLSDQVRAIQRCHLLDDAVLERIRSDIRNSLAVPSSSHVVDTIVNTTSQLPRSEYIDELVDSEIISVSTQCNDTIRSTLEDAIREYRYVDSNNRPRLSRLPIHKRNLALVSALDSLLPDYFNNSEDLSDTHSILYCAAIAVCRVAGVNFVECKTATRPKNTVPAWQCRIERRIAGTRTLIGKLISFRSGNTRPKVMRFVKQAFLGTTVSPQQYMSCVTERIDFLKQKVYAWANRIRRYRKRTDRYNQNRTFQRNEKWVYQKWEKLSPCMSDEHLPDKNATNYFWRNIWSTPVTHTEGHWCRDVERSCESITPMEPVRIDKEDVSCAVRSLANWKAPGPDGLHNFWLKWFRSSHAYLASQFQTALDSGSLPQFLTTGITHLLHKSGSTMDPKNFRPITCLPTLYKLLTSILRLKITTHINNNSIISVSQNGCRSGTRGTKELLIIDMTISQQVRRNRKSLATCWIDYKKAYDSVPHTWLLRVLELYKIDTTLCTFLKSCMGQWRTVLRYPGCRQSTMNDVLIKIERGIFQGDSLSPLWFCLALNPLSTLLEGSGIGYRLQKDDRVISHLLYMDDLKLLAPTKLQLTALLKVTENFSNSIKMEFGVDKCAVMYVKKGLIVESEGVELSDSTKLRSLSATETYKYLGFSQSLGIPESDVKQMLRERFFGRLKKVLKSLLSGGNKVRAYNSWVMPVLMYSFGILRWTQTELDAFDRRVRTLLTAFRMHHPRSSVMRLYIPRKFGGRGLLNIKTLHNREIYNLREYFLHTDVEMHRNVVAVDTGLTPLALAKENWRKPVVLSTNDRREVWKGKELHGRFYRALNGPDIDLKASTSWLRYGDLFGETEGFVCAIMDEVIMTNNYRKYILKDGTVDICRACHRPGESIRHIISGCSRLANGEYLHRHNQVARIVHQQLALKYHLVNSEVPYYRYVPDPVLENGRATLYWDRSIITDRTIVANKPDIVVIDRLERRAMIVDIAVPHDENLVKAEKEKQIKYLDLSHEIVDMWNVDSAIIVPIVVSAHGLIARSLDQHLKRLTLDGWIKGLMQKAVLLDTARIVRRFLSLEP

SEQ ID NO: 27297 - protein, 962 aa, Spilosoma lubricipeda
MHKRNLALVSALDSLLPDYFNNSEDLSDTHSILYCAAIAVCRVAGVNFVECKTATRPKNTVPAWQCRIERRIAGTRTLIGKLISFRSGNTRPKVMRFVKQAFLGTTVSPQQYMSCVTERIDFLKQKVYAWANRIRRYRKRTDRYNQNRTFQRNEKWVYQKWEKLSPCMSDEHLPDKNATNYFWRNIWSTPVAHTEGHWCRDVERSCESITPMEPVRIDKEDVSCAVRSLANWKAPGPDGLHNFWLKWFRSSHAYLASQFQMALDSGSLPQFLTTGITHLLHKSGSTMDPKNFRPITCLPTLYKLLTSILRLKITTHINNNSIISVSQNGCRSGTRGTKELLIIDMTISQQVRRNRKSLATCWIDYKKAYDSVPHTWLLRVLELYKIDTTLCTFLKSCMGQWRTVLRYPGCRQSTMNDVLIKIERGIFQGDSLSPLWFCLALNPLSTLLEGSGIGYRLQKDDRVISHLLYMDDLKLLAPTKLQLTALLKVTENFSNSIKMEFGVDKCAVMCVKKGLIVETEGVELSDSTKLRSLSATETYKYLGFSQSLGMPESDVKQMLRERFFGRLKKVLKSLLSGGNKVRAYNSWVMPVLMYSFGILRWTQTELDAFDRRVRTLLTAFRMHHPRSSVMRLYIPRKFGGRGLLNIKTLHNREIYNLREYFLHTDVEMHRNVVAVDTGLTPLALAKENWRKPVVLSTNDRREVWKGKELHGRFYRALNGPDIDFKASTSWLRYGDLFGETEGFVCAIMDEVIMTNNYRKYILKDGTVDICRACHRPGESIRHIISGCSRLANGEYLHRHNQVARIVHQQLALKYHLVNSEVPYYRYVPDPILENGRATLYWDRSIITDRTIVANKPDIVVIDRLERRAMIVDIAVPHDENLVKAEKEKQIKYLDLSHEIVDMWNVDSAIIVPIVVSAHGLIARSLDQHLKRLTLDGWIKGLMQKAVLLDTARIVRRFLSLEP

SEQ ID NO: 27298 - protein, 1087 aa, Spilarctia lutea
MLTRARRRAQLSSPDSSLRSALPSPEEAIEVPAGAEASSSSSSDEFFSPPTSPIPVRRQGRGRPPTSLGSRGPLTSNRAPAAGGDVRRMKWTHSINENVMRAYFRATELGTNLTAYRVRLVSLFQELEPAVNVSAQRLSDQVRAIQRCHLLDDAALERIRSDIRNSLTVPSSSHVLNVVTNSTPQVPQNDDISELVDSEIISVSTQYNDRIRSTLEDAIREYRYVNLNNRPRLSRLPIHKRNLALVSALDSLLPKYFSNSEDLSDTHSILYCAAIAVCRVAGVKFAEYTTTTRQENTLPAWQCRIERRIAEARTLIGKLMSFRSGNTRPRVMRFVKRAFLGTTISPQEYMSCVTERIDFLKQKVYAWANRIRRYRKRVDRYNQNRMFQGNEKWVYRKWENLSPCMSDGQVPDENATNSFWHSIWSVPVTHTEGDWYRDVERSCESLLPMEPISIDEEDVSCAVRSLPNWKAPGPDGLHNFWLKWFRSSHACLAAQFQTALDSGSLPQFLTTGITHLLYKSGDAMDPKNFRPITCLPTLYKLLTSILRLKITTHINHNSILSISQNGCRSGTRGTKELLIIDMTISQQVRRNRKSLATCWIDYKKAFDSVPHTWLLKVLELYKIDTTLCTFLKVCMGQWRTALRYPGCRQSAMNDVLIKIERGIFQGDSLSPLWFCLALNPLSTLLEGSGLGYRLQKDDRVISHLLYMDDLKLLAPTKLQLTALLKVTENFSNSIKMEFGVDKCAVMYVKKGEIVESEGIELSDSTKLRSLSATETYKYLGFSQSLGMPESDMKQTLRERFFSRLKKVLKSLLSWRKPVVLSTNDRREVWKGKVLHGRFYRALNGPDIDFKASTSWLRYSDLFGETEGFVCAIMDEVIMTNNYRKYILRDGTVDICRACHRPGESIRHIISGCSRLANGEYLHRHNQVARIVHQQLALKYNLVISEVPYYRYVPDPVLENGRATLYWDRSIITDRTIVANKPDIVVIDRLERRAMIVDIAVPHDENLVKVEKEKQIKYLDLSHEIVDMWNVDSVIIVPIVVSAHGLIAKSLDQHFKRLTLGGWIKGLIQKAVLLDTARIVRRFLSLEP

SEQ ID NO: 27299 - protein, 1201 aa, Spilarctia lutea
MITRARSRALLPPSDSSRSSALPSSEARTEAPTVAEASSSSSSDEFFSPPTSPTPVRRQERCRPPDSLGPRGPLTSNRAPATGGNVHRMKWTHSINENVMRAYFRATELGTNLTAYRVQLVSLFQELEPAINVSAQRLSDEVRAIQRCHLLDDAALERIRSDIRNSLTVPSSSHVVDVVTNTTPQVPQNEDVSELVNSEIMSVSNQYNDRIRSTLEDAIREYRYVNFNNRPRLSRLPIHKRNLALVSALDSLLPDYFSNSEDLSDAHSILYCAAIAVCRVAGVKFAENTTTTRQENTVPAWQCRIERRIAEARTLIGKLISFRSGNTRPRVMRFVKRAFLGTTISPQEYMSCVTERIDFLKQKVYAWANRIRRYRKRVDRYNQNRMFQRNEKWVYRKWENLRPCLSDGQVPDENATNSFWHSIWSVPVTHTEGEWYRDVERSCESLLPMEPISINEEDVSCAVRSLPNWKAPGPDGLHNFWLKWFRSSHACLASRFQTALDSGSLPQFLTTGITHLLYKSGDAMDPKNFRPITCLPTLYKLLTSILRLKITTHINHNSILSISQNGCRNGTRGTKELHIIDMTISQQVRRNRKNLATCWIDYKKAFDSVPHTWLLRVLELYKIDTTLCTFLKLCMGQWRTALRYPGCRQSAMNDVLIKIERGIFQGDSLSPLWFCLALNPLSTLLEGSGLGYRLQKDDRGISHLLYMDDLKLLAPTKLQLTGLLKVTENFSNSIKMEFGVDKCAVMYVKKGEIVESEGIELSDATKLRSLSVTETYKYLGFSQSLGIPEPDMKQTLRERFFSRLKKVLKSLLSGGNKVRARNGWVMPVLMYSFGVLRWTQTELDAIDRRVRTLLTAFRMHHPRSSVMRLYIPRKLGGRGLLNIKTLYNREVYNLREYFLQTDVGVHRSVVTVDTGLTPLALAKENWRKPVVLSANDRREVWKGKVLHGRFYRALNGPDIDFKASTSWLRYGDLFGETEGFVCAIMDEVIMTSNYRKYILKDGTVDICRACHRPGESIRHIISGCSRLANGEYLHRHNQVARIVHQQLALKYNLVSSEVPYHTYRYVPDPVLENGRATLYWDRSIITDRTIVANKPDIVVIDRLERRAMIVDIAVPHDENLVKVEKEKQIKYLDLSHEIVDMWNVDSAIIVPIVVSAHGLIAKSLDQHLKRLTLGGWIKGLIKKAVLLDTARIVRRFLSLEP

SEQ ID NO: 27300 - protein, 1088 aa, Spilarctia lutea
MITRARSRALLPPSDSSRSSALPSSEARTEAPTVAEASSSSSSDEFFSPPTSPTPVRRQERCRPPDSLGPRGPLTSNRAPATGGNVHRMKWTHSINENVMRAYFRATELGTNLTAYRVQLVSLFQELEPAINVSAQRLSDQVRAIQRCHLLDDAALERIRSDIRNSLTVPSSSHVVDVVTNTTPQVPQNEDVSELVDSEIMSVSNQYNDRIRSTLKDAIREYRYVNFNNRPRLSRLPIHKRNLALVSALDSLLPDYFSNSEDLSDAHSILYCAAIAVCRVAGVKFAENTTTTRQENTVPAWQCRIERRIAEAGTLIGKLISFRSGNTRPRVMRFVKRAFLGTTISPQEYMSCVTERIDFLKHKVYAWANRIRRYRKRVDRYNQNRMLKRNEKWVYRKWENLRPCLSDGQVPDENATNSFWHSIWSVPVTHTEGEWYRDVERSCESLLPMEPISINEEDVSCAVRSLPNWKAPGPDGLHNFWLKWFRSSHACLASRFQTALDSGSLPQFLTTGITHLLYKSGDAMDPKNFRPITCLPTLYKLLTSILRLKITTHINHNSILSISQNGCRNGTRGTKELLIIDMTISQQVRRNRKNLATCWIDYKKAFDSVPHTWLLRVLELYKIDTTLCTFLKLCMGQWRTALRYPGCRQSAMNDVLIKIERGIFQGDSLSPLWFCLALNPLSTLLEGSGLGYRLQKDDRGISHLLYMDDLKLLAPTKLQLTGLLKVTENFSNSIKMEFGVDKCAVMYVKKGEIVESEGIELSDATKLRSLSVTETYKYVGFSQSLGIPEPDMKQTLRERFFSRLKKVLKSLLSGGNKVRACNGWVMPVLMYSFGVLRWTQTELDAIDRRVRTLLTAFRMHHPRSSVTRLYIPRRLGGRGLLNIKTLHNREVYNLREYFLQTDVGVHRTVVTVDTGLTPLALAKENWRKPVVLGTNDHREVWKGKVLHGRFYRALNGPDIDFKASTSWLRYSDLFGETEGFVCAIMDEVIMTNNYRKYILKDGTVDICRACHRPGESIRHIISGCSRLANGEYLHRHNQVARIVHQQLALKYNLVISEVPYYRYVPDPVLENGRATLYWDRSIYIICSQ

SEQ ID NO: 27301 - protein, 1215 aa, Spilarctia lutea
MITRARSRALLPPSDSSRSSALPSSEARTEAPTVAEASSSSSSDEFFSPPTSPTPVRRQGRCRPPDSLGPRGPLTSNRAPATGGNVHRMKWTHSINENVMRAYFRATELGTNLTAYRVRLVSLFQELEPAINVSAQRLSDQVRAIQRCHLLDDAALERIRSDIRNSLTVPSSSHVVDVVTNTTPQVPQNEDVSELVDSEIMSVSNQYNDRIRSTLEDAIREYRYVNFNNRPRLSRLPIHKRNLALVSALDSLLPDYFSNSEDLSDAHSILYCAAIAVCRVAGVKFAENTTTTRQENTVPAWQCRIERRIAEARTLIGKLISFRSGNMRPRVMRFVKRAFLGTTISPQEYMSCVTERIDFLKQKVYAWANRIRRYRKRVDRYNQNRMFQRNEKWVYRKWENLRPCLSDGQVPDENATNSFWHSIWSVPVTHTEGDWYRDVERSCESLLPMEPISINEEDVSCAVRSLPNWKAPGPDGLHNFWLKWFRSSHACLASQFQTALDSGSLPQFLTTGITHLLYKSGDAMDPKNFRPITCLPTLYKLLTSILRLKITTHINHNSILSISQNGCRSGTRGTKELLIIDMTISQQVRRNRKSLATCWIDYKKAFDSVPHTWLLRVLELYKIDTTLCTFLKLCMGQWRTALRYPECRQSAMNDVLIKIERGIFQGDSLSPLWFCLALNPLSTLLEGSGLGYRFQKDDRGISHLLYMDDLKLLAPTKLQLTGLLKVTENFSNSIKMEFGVDKCAVMYVKKGEIVESEGIELSDATKLRSLSVTETYKYLGFSQSLGIPEPDMKQTLRERFFSRLKKVLKSLLSGGNKVRACNGWVMPVLMYSFGVLRWTQTELDAIDRRVRTLLTAFRMHHPRSSVMRLYIPRKLGGRGLLNIKTLHNREVYNLREYFLQTDVGVHRSVVTVDTGLTPLALAKENWRKPVVLSTNDRREVWKGKVLHGRFYRALNGPDIDFKASTFWLRYGDLFGETEGFVCAIMDEVIMTSNYRKYILKDGTVDICRACHRPGESIRHIVSGCSRLANGEYLHRHNQVARIVHQQLALKYNLVSSEVPYYRYVPDPVLENGRATLYWDRSIITDRTIVANKPDIVVMDRLERRAMIVDIAVPHDENLVKVEKEKQIKYLDLSHEIVDMWNVDSAIIVPIVVSAHGLIAKSLFFFFFFFFTCGNPLGPSPRRGLRRGGVSESNRLKPHGVPTLRLRREGSGNRCY

SEQ ID NO: 27302 - protein, 1088 aa, Spilarctia lutea
MITRARSRALLPPSDSSRSSALPSSEARTEAPTVAEASSSSSSDEFFSPPTSPTPVRRQERCRPPDSLGPRGPLTSNRAPATGGNVHRMKWTHSINENVMRAYFRATELGTNLTAYRVQLVSLFQELEPAINVSAQRLSDQVRAIQRCHLLDDAALERIRSDIRNSLTVPSSSHVVDVVTNTTPQVPQNEDVSELVDSEIMSVSNQYNDRIRSTLKDAIREYRYVNFNNRPRLSRLPIHKRNLALVSALDSLLPDYFSNSEDLSDAHSILYCAAIAVCRVAGVKFAENTTTTRQENTVPAWQCRIERRIAEAGTLIGKLISFRSGNTRPRVMRFVKRAFLGTTISPQEYMSCVTERIDFLKQKVYAWANRIRRYRKRVDRYNQNRMLKRNEKWVYRKWENLRPCLSDGQVPDENATNSFWHSIWSVPVTHTEGEWYRDVERSCESLLPVEPISINEEDVSCAVRSLPNWKAPGPDGLHNFWLKWFRSSHACLASRFQTALDSGSLPQFLTTGITHLLYKSGDAMDPKNFRPITCLPTLYKLLTSILRLKITTHINHNSILSFSQNGCRSGTRGTKELLIIDMTISQQVRRNRKNLATCWIDYKKAFDSVPHTWLLRVLELYKIDTTLCTFLKLCMGQWRTALRYPGCRQSAMNDVLIKIERGIFQGDSLSPLWFCLALNPLSTLLEGSGLGYRLQKDDRGISHLLYMDDLKLLAPTKLQLTGLLKVTENFSNSIKMEFGVDKCAVMYVKKGEIVESEGIELSDATKLRSLSVTETYKYLGFSQSLGIPEPDMKQTLRERFFSRLKKVLKSLLSGGNKVRACNGWVMPVLMYSFGVLRWTQTELDAIDRRVRTLLTAFRMHHPRSSVTRLYIPRRLGGRGLLNIKTLHNREVYNLREYFLQTDVGVHRTVVTVDTGLTPLALAKENWRKPVVLGTNDHREVWKGKVLHGRFYRALNGPDIDFKASTSWLRYSDLFGETEGFVCAIMDEVIMTNNYRKYILKDVTVDICRACHRPGESIRHIISGCSRLANGEYLHRHNQVARIVHQQLALKYNLVISEVPYYRYVPDPVLENGRATLYWDRSIYIICSQ

SEQ ID NO: 27303 - protein, 1199 aa, Spilarctia lutea
MLTRARRRAQLSPPDSSLRSALPSPEEAIEVPAGAEASSSSSSDEFFSPPTSPIPVRRQGRGRPPTSLGSRGPLTSNRAPAAGGDVRRMKWTHSINENVMRAYFRATELGTNLTAYRIRLVSLFQELEPAVNVSAQRLSDQVRAIQRCQLLDDAALERIRSDIRNSLTVPSSSHVLNVVTNSTPQVPQNDDISELVDSEIISVSTHYNDRIRSTLEDAIREYRYVNLNNRPRLSRLPIHKRNLALVSALDSLLPKYFSNSEDLSDTHSILYCAAIAVCRVAGVKFAEYTTTTRQENTLPAWQYRIERRIAEARTLIGKLMSFRSGNTRPRVMRFVKRAFLGTTISPQEYMSCVTERIDFLKQKVYAWANRIRRYRKRVDRYNQNRMFQRNEKWVYRIWENLSPCISDGQVPDENATNSFWHNIWSVPVTHTEGDWYRDVERSCESLLPMEPISIDEEDVSCAVRSLPNWKAPGPDGLHNFWLKWFRSSHACLASQFQTALDSGSLPQFLTTGITHLLYKSGDAMDPKNFRPITCLPTLYKLLTSILRLKITTHINHNSILSISQNGCRSGTRGTKELLIIDMTISQQVRRNRKSLATCWIDYKKAFDSVPHTWLLKVLELYKIDKTLCTFLKVCMGQWRTALRYPGCRQSAMNDVLIKIERGIFQGDSLSPLWFCLALNPLSTLLEGSGLGYRLQKDDRVISHLLFMDDLKLLAPTKLQLTALLKVTENFSNSIKMEFGVDKCAVMYVKKGEIVESEGIELSDSTKLRSLSATETYKYLGFSQSLGIPESDMKQTLRERFFSRLKKVLKSLLSGGNKVRACNGWVMPVLMYSFGVLRWTQTELDAIDRRVRTLLTALRMHHPRSSVMRLYIPRRLGGRGLLNIKTLHNREVYNLREYFLQTDVGMHRSVVTVDTGLTPLALAKENWRKPVVLSTNDRREVWKGKVLHGRFYRALNGPDIDFKASTSWLRYSDLFGETEGFVCAIMDEVIMTNNYRKYILKDGTVDICRACHRPGESIRHIISGCSRLANGEYLHRHNQVARIVHQQLALKYNLVISEVPYYRYVPDPVLENGRATLYWDRSIITDRTIVANKPDIVVIDRLERRAMIVDIAVPHDENLVKVEKEKQIKYLDLSHEIVDMRNVDSVIIVPIVVSAHGLIAKSLDQHLKRLTLGGWIKGLIQKAVLLDTARIVRRFLSLEP

SEQ ID NO: 27304 - protein, 865 aa, Arctia plantaginis
MRFVKQAFLGTTISPQQYMSCVTERIDFLKQKIYAWANRIRRYKKRIDRYNQNRMFQRNEKWVYRKWEEPDPCVGDRHLPDENVTNTFWRNIWSVPVTHIEGDWFQDVRRSCESITPMEPVKIDKDDVSCAVRSLPNWKSPGPDGLHNFWLKWFRSSHARLASQFQAALDSGSLPQFLTTGITHLLYKSGSVMDPKNFRPITCLPTMYKLLTSILRLKITFHINNNSIMSVSQNGCRSGTRGTKDLLIIDMTISQQVRRNRKSLATCWIDYKKAYDSVPHTWLLRVLELYKIDTTLCTFLKSCMGQWRTALRYPGCRQTAIHDVLIKIERGIFQGDSLSPLWFCLALNPLSTLLEGSGLGYRLQRDDQVISHLLYMDDLKLLAANKLQLTKLLKVTENFSNSIKMEFGVEKCAVMYVKKGVIVESKGIELSDSTKLRSLSATETYKYLGISQSLGIPESNMKQTLQERFFGRLKKVLKSLLSGGNKVRACNGWVMPVLMYSFGILRWTQTELDALDRKVRTLLTASRMHHPRSSVMRLYIPRKLGGRGLLNIKTLHNREICNLREYFLHTDVGVHRNVVAVDTGFTPLALAKENWRRPVVLSDNDRREVWKGKELHGRFYRALNGSDIDLKASTTWLRYGDLFGETEGFVCAIMDEVIMTNNYRKYILKDGTVDICRACHRPGESIRHIISGCSRLANGEYLHRHNQVARIVHQQLALKYHLVNLEVPYYRYPVLENGRATLYWDRSIITDRTIVANKPDIVLIDRLERRAMIVDIAVPHDENLVKVEKEKQIKYLDLSHEIVDMWNVDSVIIVPIVVSAHGLIAKSLDQHLKRLTLDGWIKGLMQKAVLLDTARIVRRFLSLES

SEQ ID NO: 27305 - protein, 1200 aa, Arctia plantaginis
MLTRARSRALTTSPDSSLRSVLPSPEATTEVPAVAEASSSTSSDEFFSPPTSPTPVRRQGRGRPPTSLGSRGILTSNRVPATGGDVRRMKWTKSINENVMRAYYRATEVGTNLTAYRVRLVSLFQELEPAVNVSAQRLSDQVRAIQRCHLLDDAVLERIRSDIRNSLIIPSSSHTVDSVANSTPQLASYTDDIDELVESEVISVSTQYNDRIRSALEDAILEYRYLNCNDRPRLCLLPIHKRNLALVGALDSLLPEYLDNSEDLSDTHSILYCAAIAVCRVAGVKIANNVTTTRPKSTVPAWQYRIERRIAETRTLIGKLISYRSGNTRPRVMRFVKQAFLGTTISPQQYMSCVTERIDFLKQKIYAWANRIRRYKKRIDRYNQNRMFQKKEKWVYRKWEEPDPCVGDRHLPDENVTNTFWRNIWSVPVTHIEGDWFQDVRRSCESITPMEPVKIDKDDVSCAVRSLPNWKSPGPDGLHNFWLKWFRSSHARLASQFQAALDSGSLPQFLTTGITHLLYKSGSVMDPKNFRPITCLPTMYKLLTSILRLKITFHINNNSIMSVSQNGCRSGTRGTKDLLIIDMTISQQVRRNRKSLATCWIDYKEAYDSVPHTWLLRVLELYKIDTTLCTFLKSCMGQWRTALRYPGCRQTAIHDVLIKIERGIFQGDSLSPLWFCLALNPLSTLLEGSGLGYRLQRDDQVISHLLYMDNLKLLASNKLQLTKLLKVTENFSNSIKMEFGVEKCAVMYVKKGVIVESEGIELSDSTKLRSLSATETYKYLGISQSLGIPESNMKQTLQERFFGRLKKVLKSLLSGGNKVRACNGWVMPVLMYSFGILRWTQTELDALDRKVRTLLTASRMHHPRSSVMRLYIPRKLGGRGLLNIKTLHNREICNLREYFLHTDVGVHRNVVAVDTGFTPLALAKENWRRPVVLSVNDRREVWKGKELHGRFYRALNGSDIDLKASTTWLRYGDLFGETEGFVCAIMDEVIMTNNYRKYILKDGTVDICRACHRPGESIRHIISGCSRLANGEYLHRHNQVARIVHQQLALKYHLVNLEVPYYRYVPDPVLENGRATLYWDRSIITDRTIVANKPDIVLIDRLERRAMIVDIAVPHDENLVKVEKEKQIKYLDLSHEIVDMWNVDSVIIVPIVVSAHGLIAKSLDQHLKRLTLDGWIKGLMQKAVLLDTARIVRRFLSLES

SEQ ID NO: 27306 - protein, 1185 aa, Spilarctia lutea
MLTRARRRAQLSSPDSSLRSALPSPEEAIEVPAGAEASSSSSSDEFFSPPTSPIPVRRQGRGRPPTSLGSRGPLTSNRAPAAGGDVCRMKWTHSINENVMRAYFRATELGTNLTAYRVRLVSLFQELEPAVNVSAQRLSDQVRAIQRCHLLDDAALERIRSDMRNSLTVPSSSHVLNVVTNSTPQVPQNDDISELVDSEIISVSTQYNDRIRSTLEDAIREYRYVNLNNRPRLSRLPIHKRNLALVSALDSLLPKYFSNSEDLSDTHSILYCAAIAVCRVAGVKFAEYTTTTRQENTLPAWQCRIERRIAEARTLIGKLMSFRSGNTRPRVMRFVKRAFLGTTISPQEYMSCVTERIDFLKQKVYAWANRIRRYRKRVDRYNQNRMFQGNEKWVYRKWENLSPCMSDGQVPDENATNSFWHSIWSVPVTHTEGDWYRDVERSCESLLPMEPISIDEEDVSCAVRSLPNWKAPGPDGLHNFWLKWFRSSHACLAAQFQTALDSGSLPQFLTTGITHLLYKSGDAMDPKNFRPITCLPTLYKLLTSILRLKITTHINHNSILSISQNGCRSGTRGTKELLIIDMTISQLVRRNRKSLATCWIDYKKAFDSVPHTWLLKVLELYKIDTTLCTFLKVCMGQWRTALLYPGCRQSAMNDVLIKIERGIFQGDSLSPLWFCLALNPLSTLLEGSGLGYRLQKDDPVISHLLYMDDLKLLAPTKLQLTALLKVTENFSNSIKMEFGVDKCVVMYVKKGEIVESEGTETYKYLGFSQSLGMPESDMKQTLRERFFSRLKKVLKSLLSGGNKVRACNGWVMPVLMYSFGVLRWTQTELDAIDRRVRTLLTAFRMHHPRSSVMRLYIPRRLGGRGLLNIKTLHNREVYNLREYFLQTDVGVHRSVVTVDTGLTPLALAKENWRKPVVLSTNDRREVWKGKVLHGRFYRALNGPDIDFKASTSWVRYSDLFGETEGFVCAIMDEVIMTNNYRKYILKDGTVDICRACHRPGESIRHIISGCSRLANGEYLHRHNQVARIVHQQLALKYNLVISEVPYYRYVPDPVLENGRATLYWDRSIITDRTIVANKPDIVVIDRLERRAMIVDIAVPHDENLVKVEKEKQIKYLDLSHEIVDMWNVDSVIIVPIVVSAHGLIAKSLDQHLKRLTLGGWIKGLIQKAVLLDTARIVRRFLSLEP

SEQ ID NO: 27307 - protein, 1055 aa, Spilarctia lutea
MLTRARRRAQLSPPDSSLRSALPSPEEAIEVPAGAEASSSSSSDEFFSPPTSPIPVRRQGRGRPPTSLGSRGPLTSNRAPAAGGDVRRMKWTHSINKNVMRAYFRATELGTNLTAYRVRLVSLFQELEPAVNVSAQRLSDQVRAIQRCHLLDDAALERIRSDIRNSLTVPSSSHVLNVVTNSTPQVPQNDDISELVDSEIISVSTQYIDRIRSTLEDAIREYRYVNLNNRLVSALDSLLPKYFSNSEDLSDTHSILYCAAIAVCRVAGVKFAEYTTTTRQENTLPAWQYRIERRIAEARTLIGKLMSFRSGNTRPRVMRFVKRAFLGTTISPQEYMSCVTERIDFLKQKVYAWANRIRRYRKRVDRYNQNRMFQRNEKWVYRKWENLSPCMSDGQVPDENATNSFWHNIWSVPVTHTEGDWCRDVERSCESLLPMEPISIDEEDVSCAVRSLPNWKAPGPDGLHNFWLKWFRSSHACLASQFQTALDSGSLPQFLTTGITHLLYKSGDAMDPKNFRPITCLPTLYKLLTSILRLKITTHINHNSILSISQNGCRSGTRSTKELLIIDMTISQQVRRNRKSLATCWIDYKKAFDSVPHTWLLKVLELYKIDTTLCTFLKVCMGQWRTALRYPGCRQSAMNDVLIKIERGIFQGDSLSPLWFCLALNPLSTLLEGSGLGYRLQKDDRVISHLFYMDDLKLLAPTKLQLTALLKVTENFSNSIKMEFGVDKCAVMYVKKGEIVESEGIELSDSTKLRSLSATETYKYLGFSQSLGMPESDMKQTLRERFFSRLKKVLKSLLSGGNKVRACNGWVMPVLMYSFGVLRWTQTELDAIDRRVRTLLTAFRMHHPRSSVMRLYIPRRLGGRGLLNIKTLHNREVYNLREYFLQTDVGVHRSVVTVDTGLTPLALAKENWRKPVVLSTNDRRELWKGKVLHGRFYRALNGPDIDFKASTSWLRYSDLFGETEGFVCAIMDEVIMTNNYRKYILRDGTVDICRACHLPGESIRHIISGCSRLANGEYLHRHNQVARIVHQQLALKYNLVISEVPYYRYVPDPVD

SEQ ID NO: 27308 - protein, 892 aa, Spilarctia lutea
MSFRSGNTRPRGMRFVKRALQYMSCVTERIDFLKQKVYAWANRIRRYRKRVDRYNQNRMFQRNEKWVYRKWENLSPCMSDGQVPDENATNSFWHNIWSVPVTHTEGDWYRDVERSCESLLPMEPISIDEEDVSCAVRSLPNWKAPGPDGLHNFWLKWFRSSHACLASQFQTALDSGSLPQFLTTGITHLLYKSGDAMDPKNFRPITCLPTLYKLLTSVLRLKITTHINHNSILSISQNGCRSGTRGTKELLIIDMTISQQVRRNRKSLVTCWIDYKKAFDSVPHTWLLKVLELYKIDTTLCTFLKVCMGQWRTALRYPGCRQSAMNDVLIKIERGIFQGDSLSPLWFCLALNPLSTLLEGSGVGYRLQKDDRVISHLFYMDDLKLLAPTKLQLTALLKVTENFSNSIKMEFGVDKCAVMYVKKGEIVESEGIELSDSTKLRSLSATETYKYLGFSQSLGMPESDMKQALRERFFSRLKKVLKSLLSGGNKVRACNGWVMPVLMYSFGVLRWTQTELDAIDRRVRTLLTAFRMHHPRSSVMRLYIPRRLGGRGLLNIKTLHNREVYNLREYFLQTDVGVHRSVVTVDTGLTPLALAKENWRKPVVLSTNDRREVWKGKVLHGRFYRALNGPDIDFKASTSWLRYSDLFGETEGFVCAIMDEVIMTNNYRKYILKDGTVDICRACHRPGESIRHIISGCSRLANGEYLHRHNQVARIVHQQLALKYNLVISEVPYYRYVPDPVLENGRATLYWDRSIITDRTIVANKPDIVVIDRLERRAMIVDFAVPHDENLVKVEKEKQIKYLDLSHEIVDMWNVDSVIIVPIVVSAHGLIAKSLDQHLKRLTLGGWIKGLIQKAVLLDTARIVRRFLSLEPLPPVSWSLYPKSVVYYFLYF

SEQ ID NO: 27309 - protein, 811 aa, Spilarctia lutea
MTYVRPKNTIPAWQCRIERRIAETRTLIGKLVSFRSGNTRPRVMRFVKHAFSGTTISPGQYMSCVTERIDFLKQKVYAWANRIRRYRKRVDRYNQNRMFQRNEKWVYRKWEEPSPSVSDGQFPDDNATNTFWRSIWSVPVTHTEGDWCRDVERSCESILPMEPLTIGKDDVSCVARSLPNWKSPGPDGLHNFWLKWFRSSHACLASQFQAAVDSSSLPQFLTTGITHLLYKSGSAMDPKNFRPITCLPTVYKLLTSILRLKISTHINNNSIISVSQNGCRSGTRGTKELLIMDMTISQQVRRNRKSLATCWIDYKKAYDSVPHTWLLRVLELYKIDTTLCTFLRSCMGQWRTVLRYPGCRQSAMTDVLIKIERGIFQGDSLSPLWFCLALNPLSTLLEGSELGYRLRKDDRAISHLLYIDDLKLLAPTKLQLTELLKVTENFSNSIKMEFGVDKCAVMYVKKGLIVESEGIELSDSIKLRSLSATESYKYLGFSQSLGIPESDMKQALRERFFGRLKKVLKSLLSGGNKVRAYNGWVMPVLMYSFGVLRWTQTELDALDRRVRTLLTAFRMHHPRSSVMRLYIPRKFGGRGLLNIKTLHNREIYNLREYFLHTDVGIHRSVVAVDSGLTPLALAKENWRKPVVVSTNDRREVWRGKELHGRFYRALHGPDIDFKTSTSWLRYGDLFGETEGFVCAIMDEVIMTNNYRKYILKDGTVDICRACHRPGESIRHIISGCSRLANGEYLHRHNQVARIVHQQLALKYHLVNSEVPYYRYVPDPVLENGRATLYWDRSIITDRTIVANKPDIVVID

SEQ ID NO: 27310 - protein, 1199 aa, Spilarctia lutea
MLTRARSRAQLSPPDSSHRSTLPSPEAITEVPVDAEASSSSSSDEFFSPPTSKIPVRRQGRGRPPTSLGSRGPLTSNRAPAAGGDVRRMKWTHSINENVMRAYFRATELGTNLTAYRVRLVSLFQELEPSVNVSAQRLSDQVRAIQRCHLLDDAVLERIRSDIRNVLIVPSSSHAVDLVPINTPQLPHDHYVDELVESEDISVSTQCNNKIRSALEDAIQEYRYVNCNNRPRLPRLPIHKRNLALVSALDSLLSDYFDNSEDLSDTHSILYCAAVAVCRVANVKFKENMTYVRPKNTIPAWQCRIERRIAETRTLIGKLVSFRSGNTRPRVMRFVKHAFSGTTISPGQYMSCVTERIDFLKQKVYAWANRIRRYRKRVDRYNQNRMFQRNEKWVYRKWEEPSPCVSDGQFPDDNATNTFWRSIWSVPVTHTEGDWCRDVERSCESIIPMEPLTISKDDVSCAARSLPNWKSPGPDGLHNFWLKWFRSSHACLASQYRAAVDSSSLPQFLTTGITHLLYKSGSAMDPKNFRPITCLPTIYKLLTSILRLKISTHINNNSIISVSQNGCRSGTRGTKELLIMDMTISQQVRRNRKSLATCWIDYKKAYDSVPHTWLLRVLELYKIDTTLCTFLRSCMGQWRTVLRYPGCRQTAVNDVLINIERGIFQGDSLSPLWFCLALNPLSTLLEGSELGYRLRKDDRAISHLLYMDDLKLLAPTKLQLTELLKVTENFSNSIKMGFGVDKCAVMYVRKGLIVESEGLELSDSIKLRSLSATESYKYLGFSQSLGIPELDMKQALRERFFGRLKKVLKSLLSGGNKVRAYNGWVMPVLMYSFGVLRWTQTELDALDRRVRTLLTTFRMHHPRSSVMRLYIPRKFGGRGLLNIKTLHNREIYNLREYFLHTDVGMHRSVVAVDSGLTPLALAKENWRKPVVLSTNDRREVWKGKELHGRFYRALHGPDIDFKTSTSWLRYGDLFGETEGFVCAIMDEVIMTNNYRKYILRDGTVDICRACHRPGESIRHIISGCSRLANGEYLHRHNQVARIVHQQLALKYHLVNSEVPYYRYVPDPVLENGRATLYWDRSIITDRTIVANKPDIVVIDRLERRAIIIDIAVPHDENLVKVEKEKQIKYLDLSHEIVDMWNVDSAIIVPIVVSAHGLIAKSLDQHLKRLTLEGWIKGLIQKAVLLDTARIVRRFLSLEP

SEQ ID NO: 27311 - protein, 1195 aa, Arctia plantaginis
MITRARASRARLTPPDSSLRSAVQSPEVTTQVPVITEASSSTSSDEFFSPPTSPTPVRRQVKGRPPVFLGSRGPSASNRAPAIGGNVRRMKWTSSMNENVMRAYFVATEGETNLTAYRNRLLTLFQELEPTVNVTVQRLSDQVRAIKRCNLLNSSVLERLRSDLQISLTTFPSSQAVTHQDLEIPQASPAEGEEIDASSVSTQYNDIIRNTLEGAILEYGSMNFVNRPRLPRLPMHKRNKALVCALDSILPPYFEKCENLSDTHSILYCAAVTACRVAGVKFSRVDMAPRPKSLVPSWQYRIERRIAEARVLIGKLICFRSGNTRPRVMRFVNQAFSGTGIRSCDYMARVTERIDFLKQKVYAWANRIRRYKKRVARYTQNRTFQRDERWVYRRWAQPDLVSDGHFPDVKITNTFWRNIWSMPITHTEGEWMRDVERSCESINTMEPVSISDMDIAYAVRSLPNWKSAGPDGLHNFWLKWLRSSHVRLASHFQSCLESGSLPSFMTTGLTHLVYKSGSATDPKNYRPITCLPTLYKLLTSILRVKITSHITNNSIISHSQNGCRGGARGTKELLIIDMTINQQVRRNRKDLSTCWIDYKKAYDSVPHTWLLRVMELYKIDTTLCTFMETCMRQWRTVLCYPGCRQSQGDGEYIMIKRVIFQGDSLSPLWFCLALNPLSTMLEGSGLGYRLQRDGKVISHLLYMDDLKLFASSSSILMNLLEITKTFTKCIRMEFGVDKCAIMHVKRGRVVESDRLELSDSTHFTCLSANETYKYLGTSQALGVNELTMKQSLQERFFSRLKKVLNSLLSGGNKVRAYNDWVIPVLTYYFGILRWTQTELDTLDRRVRTLLTVYRMHHPRSSVMRLYIPRKCGGRGFLNVKTLHNREICNLRNYFLSVDVDMHRDVVAVDNGLTPLGLGKENWRKFAVLNITDRKEIWKGKELHGRFYRALNRPEVDQLASVFWLRFGDLFGETEGYVFAITDEVVMTNNYRKYILKDGTIDICRACHCPGESLRHIISGCSRLANGEYLHRHNQVARIVHQQLALKYNLVTVELPYYKYVPDPVLENGRAKLYWDRLIITDRTIVANKPDIVVIDRLERRAMIVDITIPHDDNLLKAEKDKQVKYLDLAHEIVDMWDVDSAIVVPIVISAHGLVAKSLDQHLQRLALGSWIKGLMQKAVLLDTARIVRKFLSLES

SEQ ID NO: 27312 - protein, 1195 aa, Arctia plantaginis
MITRARASRARLTPPDSSLRSAVQSPEVTTQVPVITEALSSTSSDEFFSPPTSPTPVRRQGRGRPPVCLGSRGPSASNRAPAIGGNVRRMKWTSSMNENVMRAYFVATEGETNLTAYRNRLLTLFQELEPTVNVTVQRLSDQVRAIKRCNLLNSSVLERLRSDLQISLTTFPSSQAVTHQDLEIPQASPAEGEEIDASSVSTQYNDIIRNTLEGAILEYGSMNFVNRPRLPRLPMHKRNKALVCALDSILPPYFEKCENLSDTHSILYCAAVTACRVAGVKFSRVDMAPRPKSLVPSWQYRIERRIAEARVLIGKLICFRSGNTRPRVMRFVNQAFSGTGIRFCDYMARVTERIDFLKQKVYAWANRIRRYKKRVDRYTQNRTFQRDERWVYRRWAQPDLVSDGHFPDVKITNTFWRNIWSMPITHTEGEWMRDVERSCESINTMEPVSISDIDIAYAVRSLPNWKSVGPDGLHNFWLKWLRSSHVRLASHFQSCLESGSLPSFMTTGLTHLVYKSGSATDPKNYRPITCLPTLYKLLTSILRVKITSHITNNSIISHSQNGCRGGARGTKELLIIDMTINQQVRRNRKDLSTCWIDYKKAYDSVPHTWLLRVMELYKIDTTLCTFMETCMRQWRTVLCYPGCRQSQGDGEYIMIKRGIFQGDSLSPLWFCLALNPLSTMLEGSGLGYRLQRDGKVISHLLYMDDLKLFASSSSILMNLLEITKTFSKCIRMEFGVDKCAIMHVQRGRVVESDRLELSDSTHFTCLSANETYKYLGMSQALGVNELTMKQSLQERFFSRLKKVLSSLLSGGNKVRAYNDWVIPVLTYSFGILRWTQTELDTLDRRVRTLLTVYRMHHPRSSVMRLYIPRKCGGRGFLNAKTLHNREICNLRNYFLSVDVDMHRDVVAVDNGLTPLGLGKENWRKFAVLNITDRKEIWKGKELHGRFYRALNRPEVDQLASVFWLRFGDLFGETEGFVFAITDEVVMTNNYRKYILKDGTIDICRACHCPGESLRHIISGCSRLANGEYLHRHNQVARIVHQQLALKYNLVTVELPYYKYVPDPVLENGRATLYWDRPIITDRTIVANKPDIVVIDRLERRAMIVDITIPHDDNLLKAEKDKQVKYLDLAHEIVDMWDVDSAIVVPIVISAHGLVAKSLDQHLQRLALGSWIKGLMQKAVLLDTARIVRKFLSLES

SEQ ID NO: 27313 - protein, 943 aa, Arctia plantaginis
MSCFVVRGDIYRSRNNSGSLVLFPIPCCTKTPPVECQFIGWWHLSHNIIFRATPLNNNNNNKICFRSGNTRPRVMRFVNQAFSGTGIRSCDYMARVTERIDSVILKQKVYAWANRIRRYKKRVDRYTQNRTFQRDERWVYRRWAQPDLVSDGHFPDVQITNTFWRSIWSMPITHTEGEWMRDVERSCESINTMELVSISDMDIAYAVRSLPNWKSAGPDGLHNFWLKWLRSSHVRLASHFQSCLESGSLPSFMTTGLTHLVYKSGSATDPKNYRPITCLPTLYKLLTSILRVKITSHITNNSIISHSQNGCRGGARGTKEILIIDMTINQQVRRNRKDLSTCWIDYKKAYDSVPHTWLLRVMELYKIDTTLCTFMETCMRQWRTVLCYPGCQQSQGDGEYIMIKRGIFQGDSLSPLWFCLALNPLSTMLEGSGLGYRLQRDGKVISHLLYMDDLKLFASSSSILMNLLEITKTFSKCIRMEFGVDKCAIMHVKRGRVVESDRLELSDSTHFTCLSANETYKYLGMSQALGVNELTMKQSLQERFFSRLKKVLNSLLSGGNKVRAYNDWVIPVLTYSFGILRWTQTELDTLDRRVRTLLTAYRMHHPRSSVMRLYIPRKCGGRGFLNAKTLHNREICNLRNYFLSVNVDMHRDVVAVDNGLTPLGLGKENWRKFAVLNITDRKVIWKGKELHGRFYRALNRPEVDKLASVFWLRFGDLFGETEGFVFAITDEVVMTNNYRKYILKDGTIDICRACHCPGESLRHIISGCSRLANGEYLHRHNQVARIVHQQLALKYNLVTVELPYYKYVPDPVLENGHATLYWDCPIITDRTIVANKPDIVVIDRLERRAMIVDVTIPHDDNLLKAEKDKQVKYLDLAHEIVDMWDVDSAIVVPIVISAHGLVAKSLDQHLQRLALGSWIKGLMQKAVLLDTARIVRKFLSLES

SEQ ID NO: 27314 - protein, 1195 aa, Arctia plantaginis
MITRARASRARLTPPDSSLRSAVQSPEVTTQVPVITEASSSTSSDEFFSPPTSPTPVRRQGRGRPPVCLGSRGPSASNRAPAIGGNVRRMKWTSSMNENVMRAYFVATEGETNLTAYRNRLLTLFQELEPTVNVTVQRLSDQVRAIKRCNLLNSSVLERLRSDLQISLTTFPSSQAVTHQDLEIPQASPAEGEEIDASSVSTQYNDIIRNTLEGAILEYGSMNFVNRPRLPRLPMHKRNKALVCALDSILPPYFEKCENLSDTHSILYCAAVTACRVAGVKFSRVDMAPRPKSLVPSWQYRIERRIAEARVLIGKLICFRSGNTRPRVMRFVNQAFSGTGIRSCDYMARVTERIDFLKQKVYAWANRIRRYKKRVDRYTQNRTFQRDERWVYRRWAQPDLVSDGHFPDVKITNTFWRNIWSMPITHTEGEWMRDVERSCESINTMEPVSISDMDIAYAVRSLPNWKSAGPDGLHNFWLKWLRSSHVRLASHFQSCLESGSLPSFMTTGLTHLVYKSGSATDPKNYRPITCLPTLYKLLTSILRVKITSHITNNSIISHSQNGCRGGARGTKELLIIDMTINQQVRRNRKDLSTCWIDYKKAYDSVPHTWLLRVMELYKIDTTLCTFMETCMRQWRTVLCYPGCRQSQGDGEYIMIKRGIFQGDSLSPLWFCLALNPLSTMLEGSGLGYRLQRDGKVISHLLYMDDLKLFASSSSILMNLLEITKTFSKCIRMEFGVDKCAIMHVKRGRVVESDRLELSDSTHFTCLSANETYKYLGMSQALGVNELTMKQSLQERFFSRLKKVLNSLLSGGNKVRAYNDWVIPVLTYSFGILRWTQTELDTLDRRVRTLLTVYRMHHPRSSVMRLYIPRKCGGRGFLNVKTLHNREICNLRNYFLSVDVDMHRDVVAVDNGLTPLGLGKENWRKFAVLNITDRKEIWKGKELHGRFYRALNRPEVDQLASVFWLRFGDLFGETEGFVFAITDEVVMTNNYRKYILKDGTIDICRACHCPGESLRHIISGCSRLANGEYLHRHNQVARIVHQQLALKYNLVTVELPYYKYVPDPVLENGRATLYWDRLIITDRTIVANKPDIVVIDRLERRAMIVDITIPHDDNLLKAEKDKQVKYLDLAHEIVDMWDVDSAIVVPIVISAHGLVAKSLDQHLQRLALGSWIKGLMQKAVLLDTARIVRKFLSLES

SEQ ID NO: 27315 - protein, 974 aa, Arctia plantaginis
MNFVNRPRLPRLPMHKRNKALVCALDSILPPYFEKCENLSDTHSILYCAAVTACRVAGVKFSRVDMAPRPKSLVPSWQYRIERRIAEARVLIGKLICFRSGNTRPRVMRFVNQAFSGTGIRFCDYMARVTERIDFLKQKVYAWANRIRRYKKRVDRYTQNRTFQRDERWVYRRWAQPDLVSDGHFPDVKITNTFWRNIWSMPITHTEGEWMRDVERSCESINTMEPVSISDMDIAYAVRSLPNWKSAGPDGLHNFWLKWLRSSHIRLASHFQSCLESGSLPSFMTTGLTHVVYKSGSATDPKNYRPITCLPTLYKLLTSILRVKITSHITNNSIISHSQNGCRGGARGTKELLIIDMTINQQVRRNRKDLSTCWIDYKKAYDSVPHTWILRVMELYKIDTTLCTFMETCMRQWRTVLCYPGCRQSQGDGEYIMIKRGIFQGDSLSPLWFCLALNPLSTMLEGSGLGYRLQRDGKVISHLLYMDDLKLFASSSSILMNLLGITKTFSKCIRMEFGVDKCAIMLVKRGRVVESDRLELSDSTHFTCLSANETYKYLGMSQALGVNELTMKQSLQERFFSRLKKVLNSLLSGGNKVRAYNDWVIPVLTYSFGILRWTQTELDTLHRRVRTLLTVYRMHHPRSSVMRLYIPRKCGGRGFLNAKTLHNREICNLRNYFLSVNVDIHRDVVAVDNGLTPLGLGKENWRKFAVLNITDRKEIWKGKELHGRFYRALNRPEVDQLASVFWLRFGDLFGETEGFVFAITDEVVMTNNYRKYILKDGTIDICRACHCPGESLRHIISGCSRLANGEYLHRHNQVARIVHQQLALKYNLVTVELPYYKYVPDPVLENGRATLYWDRPIITDRTIVANKPDIVVIDRLERRAMIVDITIPHDDNLLKAEKDKQVKYLDLAHEIVDMWDVDSAIVVPIVISAHGLVAKSLDQHLQRLALGSWIKGLMQKAVLLDTARIVRKFLSLES

SEQ ID NO: 27316 - protein, 1130 aa, Arctia plantaginis
MHKFQLYNCRLNNNNRAPAIGGNVRRMKWTSSMNEDVMRPYFVATEGETNLTAYRNRLLTLFQELEPTVNVTVQRLSDQVRAIKRCNLLNSSVLERLRSDLQISLTTFPSSQTVTHQDLEIPQASPAEGEEIDASSVSTQYNDIIRNTLEGAILEYGSMNFVNRPRLPRLPMHKRNKALVCALDSILPPYFEKCEKLSDTHSILYCATVTACRVAGVKFSRVDMAPRPKSLVPSWQYRIERRIAEARVLIGKLICFRSGNTRPRVMRFVNQAFSGTGIRSCDYMARVTERIDFLKQKVYAWANRIRRYKKRVDRYTQNRTFQRDERWVYRRWAQPDLVSDGHFPDVKITNTFWRNIWSMPITHTEGEWMRDVERSCESINTMEPVSISDMDITYAVRSLPNWKSAGPDGLHNFWLKWLRSSHVRLASHFQTCLESGSLSSFMTTGLTHLVYKSGSATDPKNYRPITCLPTLYKLLTSILRVKITSHITNNSIISHSQNGCRGGARGTKELLIIDMTINQQVRRNRKDLSTCWIDYKKAYDSVPHTWLLRVMELYKIDTTLCTFMETCMRQWRTVLCYPGCRQSQGEYIMIKRGIFQGDSLSPLWFCLALNPLSTMLEGSGLGYRLHRDSKVISHLLYMDDLKLFASSSSILMNLLEITKTFSKCIRMEFGVDKCAIMHVKRGRVVESDRLELSDSTHFTCLSANETYKYLGMSQALGVNELTMKQSLQERFFSRLKKVLNSLLSGGNKVRAYNDWVIPVLTYSFGILRWTQTELDTLDRRVRTLLTAYRMHHPRSSVMRLYIPRKCGGRGFLNAKTLHNREICNLRNYFLSVNVDIHRDVVAVDNGLTPLGLGKENWRKFAVLNITDRKEIWKGKELHGRFYRALNRPEVDQLASVFWLRFGDLFGETEGFVFAITDEVVMTNNYRKYILKDGTIDICRACHCPGESLRHIISGCSRLANGEYLHRHNQVARIVHQQLALKYNLVTVELPYYKYVPDPVLENGRVTLYWDRPIITDRTIVANKPDIVVIDRLERRAMIVVITIPHDDNLLKAEIDKQVKYLDLAHEIVDMWDVDSAIVVPIVISAHGLVAKSLDQHLQRLALGSWIKGLMQKAVLLDTARIVRKFLSLES

SEQ ID NO: 27317 - protein, 931 aa, Arctia plantaginis
MSSSSTCSNSRTIGGVKFSRVDMAPRPKSLVPSWQYRIERRIAEARVLIGKLICFRSGNTRPRVMRFVNQAFSGTGIRFCDYMARVTERIDFLKQKVYAWANRIRRYKKRVDRYTQNRTFQRDERWVYRRWAQPDLVSDGHFPDVKITNTFWRNIWSMPITHTEGEWMRDVERSCESINTMEPVSISDMDIAYAVRSLPNWKSAGPDGLHNFWLKWLRSSHVRLASHFQSCLESGSLPSFMTTGLTHLVYKSGSATDPKNYRPITCLPTLYKLLTSILRVKITSHITNNSIISHSQNGCRGGARGTKELLIIDMTINQQVRRNRKDLSTCWIDYKKAYDSVPHTWLLRVLELYKIDTTLCTFMETCMRQWRTVLCYPGCRQSQGDGEYIMIKRGIFQGDSLSPLWFCLALNPLSTMLEGSGLGYRLQRDGKVISHLLYMDDLKLFASSSSILMNLLGITKTFSKCIRMEFGVDKCAIMHVKRGRVVESDRLELSDSTHFTCLSANETYKYLGMSQALGVNELTLKQSLQERFFSRLKKVLNGLLSGGNKVRAYNDWVIPVLTYSFGILRWTQTELDTLDRRVRTLLTVYRMHHPRSSVMRLYIPRKCGGRGFLNAKTLHNREICNLRNYFLCVNVDIHRDVVAVDNGLTPLGLGKENWRKFAVLNITDRKEIWKGKELHGRFYRALNRPEVDQLASVFWLRFGDLFGETEGFVFAITDEVVMTNNYRKYILKDGTIDICRACHCPGESLRHIISGCSRLANGEYLHRHNQVARIVHQQLALKYNLVTVELPYYKYVPDPVLENGRATLYWDRPIITDRTIVANKPDIVVIDRLERRAMIVDITIPHDDNLLKAEKDKQVKYLDLAHEIVDMWDVDSAIVVPIVISAHGLVAKSLDQHLQRLALGSWIKGLMQKAVLLDTARIVRKFLSLES

SEQ ID NO: 27318 - protein, 1035 aa, Arctia plantaginis
MKWTSSMNENVMRAYFVATEGETNLTAYRNRLLTLFQELEPTVNVTVQRLSDQVRAIKRCNLLNSSVLERLRSDLQISLTTFPSSQAVTHQDLEIPQASPAEGEEIDASSVSTQYNDIIRNTLEGAILEYGSMNFVNRPRLPRLPMHKRNKALVCALDSILPPYFEKCENLSNTHSILYCAAVTACRVAGVKFSRVDMAPRPKSLVPSWQYRIERRIAEARVLIGKLICFRSGNTRPRVMRFVNQAFSGTGIRFCDYMARVTERIDFLKQKVYAWANRIRRYKKRVDRYTQNRTFQRDERWVYRRWAQPDLVSDGHFPDVKITNTFWRNIWSMPITHTEGELMRDVERSCESIKTMEPVSISDMDIAYAVRSLPNWKSAGPDGLHNFWLKWLRSSHVRLASHFQSCLESGSLPSFMTTGLTHLVYKSGSATDPKNYRPITCLPTLYKLLTSILRVKITSHITNNSIISHSQNGCRGGARGTKELLIIDMTINQQVRRNRKDLSTCWIDYKKAYDSVPHTWLLRVMELYKIDTTLCTFMETCMRQWRTVLCYPGCRQSQGDGEYIMIKRGIFQGDSLSPLWFCLALNPLSTMLEGSGLGYRLQRDGKVISHLLYMDDLKLFASSSSILMNLLEITKTFSECIRMEFGVDKCAIMHVKRGRVVESDRLELSDSTHFTCLSANETYKYLGMSQALGVNELTMKQSLQERFFSRLKKVLNSLLSGGNKVRAYNDWVIPVLTYSFGILRWTQTELDTLDRRVRTLLTVYRMHHPRSSVMRLYIPRKCGGRGFLNAKTLHNREICNLRNYFLSVDVDMHRDVVAVDNGLTPLGLGKENWRKFAVLNITDRKEIWKGKELHGRFYRALNRPEVDQLASVFWLRFGDLFGETEGFVFAITDEVVMTNNYRKYILKDGTIDICRACHCPGESLRHIISGCSRLANGEYLHRHNQVARIVHQQLALKYNLVTVELPYYKYVPDPVLENGRATLYWDRPIITDRTIVANKPDIVVIDRLERRAMIVDITIPHDRCTDSHIGPWISC

SEQ ID NO: 27319 - protein, 1195 aa, Arctia plantaginis
MITRARASRARLTPPDSSLRSAVQSPDVTTQVPVITETSSSTSSDEFFSPPTSPTPVRRQGRGRPPVCLGSRGPSASNRAPAIGGNVRRMKWTSSMNENVMRAYFVATEGETNLTAYRNRLLTLFQELEPTVNVTVQRLSDQVRAIKRCNLLNSSVLERLRSDLQISLTTFPSSQAVTHQDLEIPQASPAEGEEIDASSVSTQYNDIIRNTLEGAILEYGSMNFVNRPRLPRLPMHKRNKALVCALDSILPPYFEKCENLSDTHSILYCAAVTACRVAGVKFSRVDMAPRPKSLVPSWQYRIERRIAEARVLIGKLICFRSGNTRPRVMRFVNQAFSGTGIRSCDYMARVTERIDFLKQKVYAWANRIRRYKKRVDRYTQNRTFQRDERWVYRRWAQPDLVSDGHFPDVKITNTFWRNIWSMPITHTEGEWMRDVERSCESINTMEPVSISDIDIAYAVRSLPNWKSAGPDGLHNFWLKWLRSSHVRLASHFQSCLESGSLPSFMTTGLTHLVYKSGSATDPKNYRPITCLPTLYKLLTSILRVKITSHITNNSIISHSQNGCRGGARGTKELLIIDMTINQQVRRNRKDLSTCWIDYKKAYDSVPHTWLLRVMELYKIDTTLCTFMETCMRQWRTVLCYPGCRQSQGDGEYIMIKRGIFQGDSLSPLWFCLALIPLSTMLEGSGLGYRLQRDGKVISHLLYMDDLKLFASSSSILMNLLEITKTFSKCIRMEFGVDKCAIMHVKRGRVVESDRLELSNSTHFTCLSANETYKYLGMSQALGVNELTMKQSLQERFFSRLKKVLNSLLSGGNKVRAYNDWVIPVLTYFFGILRWTQTELDTLDRRVRTLLTVYRMHHPRSSVMRLYIPRKCGGRGFLNAKTLHNREICNLRNYFLSVDVDMHRDVVAVDNGLTPLGLGKENWRKFAVLNITDRKEIWKGKELHGRFYRALNRPEVDQLASVFWLRFGDLFGETEGFVFAITDEVVMTNNYRKYILKDGTIDICRACHCPGESLRHIISGCSRLANGEYLHRHNQVARIVHQQLALKYNLVTVELPYYKYVPDPVLENGRATLYWDRPIITDRTIVANKPDIVVIDRLERRAMIVDITIPHDDNLLKAEKDKQVKYLDLAHEIVDMWDVDSAIVVPIVISAHGLVAKSLDQHLQRLALGSWIKGLMQKAVLLDTARIVRKFLSLES

SEQ ID NO: 27320 - protein, 965 aa, Arctia plantaginis
MNFVNRPRLPRLPMHKRNKALVCALDSILPPYFEKCENLSDAHSILYCAAVTACRVAGVKFSRVDMAPRLKSLVPSWQYRIERRIAEARVLIGKLICFRSGNTRPRVMRFVNQAFSGTGIRSCEYMARVTERIDFLKQKVYAWANRIRRYKKRVDRYTQNRTFQRDERWVYRRWAQPDLVSDGHFPDVKITNTFWRNIWSMPITHTEGEWMRDVERSCESINTMEPVSISDMDIAYAVRSLPNWKSAGPDGLHNFCLKWLRSSHVRLASHFQSCLESGSLPSFMTTGLTHLVYKSGSATDPKNYRPITCLPTLYKLLTSILRVKITSHITNNSIISHSQNGCRGGARGTKELLIIDMTINQQVRRNRKDLSTCWIDYKKAYDSVPHTWLLRVMELYKIDTTLCTFMETCMWQWRTVLCYPGCRQSQGDGEYIMIKRGIFQGDSLSPLWFCLALNPLNTMFEGSGLGYRLQRDGKVISHLLYMDDLKLFASSSSILMNLLEITKTFSKCIRMEFGVDKCAIMHVKRGRVVESDRLELSDSTHFTCLSANETYKYLGMSQALGVNELTMKQSLQERFFSRLKKVVNSLLSGGNKVRAYNDWVIPVLTYSFGILRWTQTELDTLDRRVRTLLTVYRMHHPRSSVMRLYIPRKCGGRGFLNVKTLHNREICNLRNYFLSVVVDNGLTPLGLGKENWRKFAVLNITDRKEIWKGKELHGRFYRALNRPEVDQLASVFWLRFGDLFGETEGFVFAITDEVVMTNNYRKYILKDGTIDICRACHCPGESLRHIISGCSRLANGEYLHRHNQVARIVHQQLALKYNLVTVELPYYKYVPDPVLENGRATLYWDRLIITDRTIVANKPDIVVIDRLQRRAMIVDITIPHDDNLLKAKKDKQVKYLDLAHEIVDMWDVDSAIVVPIVISAHGLVAKSLDQHLQRLALGSWIKGLMQKAVLLDTARIVRKFLSLES

SEQ ID NO: 27321 - protein, 1186 aa, Arctia plantaginis
MITRARASRARLTPPDSSLRSAVQSPEVTTQVPVITEASSSTSSDEFFSPPTSPTPVRRQGRGRPPVCLGSRGPSASNRAPAIGGNVRRMKWTSSMNENVMRAYFVATEGETNLTAYRNRLLTLFQELEPTVNVTVQRLSDQVRAIKRCNLLNSSVLERLRSDLQISLTTFPSSQAVTHQDLEIPQASPAEGEEIDASSVSTQYNDIIRNTLEGAILEYGSMNFVNRPRLPRLPMHKRNKALVCALDSILPPYFEKCENLSDTHSILYCAAVTACRVAGVKFSRVDMAPRPKSLVPSWQYRIERRIAEARVLIGKIICFRSGNTRPRVMRFVNQAFSGTGIRSCDYMARVTERIDFLKQKVYAWANRIRRYKKRVDRYTQNRTFQRDERWVYRRWAQPDLVSDGHFPDVKITNTFWRNIWSMPITHTEGEWMRDVERSCESINTMEPVSISDMDIAYAVRSLPNWKSAGPDGLHNFWLKWLRSSHVRLVSHFQSCLESGSLPSFMTTGLTHLVYKSGSATDPKNYRPITCLPTLYKLLTSILRVKITSHITNNSIISHSQNGCRGKARGTKELLIIDMTINQQVRRNRKDLLTCWIDYKKAYDSVPHTWLLRVMELYKIDTTLCTFMETCMRQWRTVLCYPGCRQSQGDGEYIMIKRGIFQGDSLSPLWFCLALNPLSTMLEGSGLGYRLQRDGKVISHLLYMDDLKLFASSGSILMNLLEITKTFSKCIRMEFVKRDRVVESDRLELSDSTHFTCLSANETYKYLGMSQALGVNELTMKQSLQERFFSRLKKVLNSLLSGGNKVRAYNDWVIPVLTYSFGILRWTQTELDTLDRRVRTLLTVYRMHHPRSSVMRLYIPRKCGGRGFLNVKTLHNREICNLRNYFLSVDVDMHRDVVAVDNELTPLGLGKENWRKFAVLNITDRKEIWKGKELHGRFYRALNRPEVDQLASVFCLRCGDLFGETEGFVFAITDEVVMTNNYRKYILKDGTIDICRACHCPGESLRHIISGCSRLANGEYLHRHNQVARIVHQQLALKYNLVTVELPYYKYVPDPVLENGRATLYWDRLIITDRTIVANKPDIVVIDRLERRAMIVDITIPYDDNLLKAEKDKQVKYLDLAHEIVDMWDVDSAIVVPIVISAHGLVAKSLDQHLQRLALGSWIKGLMQIAVLLDTARIVRKFLSLES

SEQ ID NO: 27322 - protein, 1205 aa, Spilarctia lutea
MLTRARRRAQLSSPDSSLRSALPSPEEAIEVPAGAEASSSSSSDEFFSPPTSPIPIRRQGRGRPPTSLGSRRPLTSNRAPAAGGDVRRMKWTHSMNENVMRAYFRATELGTNLTAYRVRLVSLFQELEPAVNVSAQRLSDQVRAIQRCHLLDDAALERIRSEIRNSLTVPSSSHVLNVVTNSTPQVPQNDDISELVDSEIISVSTQYNDRIRSTLEDAIREYRYVNLNNRPRLSRLPVHKRNLALVSALDSLLPKYFSNSEDLSDTHSILYCAAIAVCRVAGVKFAEYTTTTRQENTLPAWQCRIERRIAEARTLIGKLMSFRSGNTRPRVMRFVKRAFLGTTISPQEYMSCVTERIDFLKQKVYAWANRIRRYRKRVDRYNQNRMFQGNEKWVYRKWENLSPCMSDGQVPDENATNSFCHSIWSVPVTHTEGDWCRDVERSCESLLPMEPISIDEEDVSCAVRSLPNWKAPGPDGLHNFWLKWFRSSHACLAAQFQTALDSGSLPQFLTTGITHLLYKSGDAMDPKNFRPITCLPTLYKLLTSILSHSRLSRLKITTHINHNSILSISQNGCRSGTRGTKELLIIDMTISQQVRRNRKSLATCWIDYKKAFDSVPHTWLLKVLELYKIDTTLCTFLKVCMGQWRTALRYPGCRQSAMNDVLIKIERGIFQGDSLSPLWFCLALNPLSTLLEGSGLGYRLQKDDRVISHLLYMDDLKLLAPTKLQLTALLKVTENFSNSIKMEFGVDKCAVMYVKKGEIVESEGIELSDSTKLRSLSATETYKYLGFSQSLGMPESDMKQTLRERFFSRLKKVLKSLLSGGNKVRACNGWVMPVLMYSFGVLRWTQTELDAIDRRVRTLLTAFRMHHPRSSVMRLYIPRRLGGRGLLNIKTLHNREVYNLREYFLQTDVGVHRSVVTVDTGLTPLALAKENWRKPVVLSTNDRREVWKGKVLHGRFYRALNGPDIDFKASTSWLRYSDLFGETEGFVCAIMDEVIMTNNYRKYILKDGTVDICRACHRPGESIRHIISGCSRLANGEYLHRHNQVARIVHQQLALKYNLVMSEVPYYRYVPDPVLENGRATLYWDRSIITDRTIVANKPDIVVIDRLERRAMIVDIAVPHDENLVKVEKEKQIKYLDLSHEIVDMWNVDSVIIVPIVVSAHGLIAKSLDQHLKRLTLGGWIKGLIQKAVLLDTARIVRRFLSLEP

SEQ ID NO: 27323 - protein, 1104 aa, Spilarctia lutea
MITRARFRALLPPSDSSRSSALPSSEARTEAPTVAEESSSSSSDEFFSPPTSPTPVRRQGRCRPPDTLGPRGPLTSNRAPATGGNVHRMKWTHSINENVMRAYFRATELGTNLTAYRVRLVSLFQELEPAINVSAQRLSDQVRAIQRCHLLDDAVLERIRSDIRNSLTVPSSSHVVDVVTNTTPRVQQNEDVSELVGSEIMSVSTQYNDRIRSTLEDAIREYRYANFKNRPRLSRLPIHKRNLALVSALDSLLPDYFSNSEDLSDTHSILYCAAIAVCRVAGVKFAENTTTTRQENTVPAWQCRIERRIAEARTLIGKLISFRSGNTRLRVMRFVKRAFLGTNFSPQEYTSYVTERIDFLKQKVYAWANRIRRYRKRIDRYNQNRMFQSNEKWVYRKWENQSPCMSDGQVPDENATNSFWHSIWSVPVTHTEGDWYRDVERSCESLLPMEPISIDEEDVSCAVRSLTNWKAPGPDGLHNFWLKWFRSSHACLASQFQTALDSGSLPQFLTTGITHLLFKSGSTMDPKNFRPITCLPTLYKLLTSILRLKITTHINHNSILSISQNGCRSGTRGTKELLIIDMTISQQVRRNRKSLATCWIDYKKAFDSVPHTWLLKVLELYKIDTTLCTFLKLCMGQWRTVLRYPGCRQSAMNDVLIKIERGIFQGDSLSPLWFCLALNPLSTLLEGSGLGYRLQKDDRVISHLLYMDDLKLLAPTKLQLTALLKVTENFSNSIKVEFGVDKCAVMYVKKGEIVESEGIELSDSTKLRSLSATETYKYLGFSQSLGIPESDMKQTFRERFFSRLRKVFKSLLSGGNKVRACNGWVMPVLMYSFGVLRWTQTELDAIDRRVRTLLTAFRMHHPRSSVMRLYIPRRLGGRGLLNIKTLHNREVYNLREYFLQTDVGVHRSVVTVDTGLNPLALAKENWRKPVVLSTNDRREVWKGKVLHGRFYRALNWPDIDFKASTSWLRYGDLFGETEGFVCAIMDEVIMTNNYRKYILKDGTVDICRACHRPGQSIRHIISGCSRLANGEYLHRHNQVARIIHQQLALKYNCGGTGIMFHPTQREDPPTRRGDHAWRATAQQLMLGCCIYDNRRGNFICAIQD

SEQ ID NO: 27324 - protein, 858 aa, Spilosoma lubricipeda
MRFVKQAFLGTTISPQQYMSSVTERIDFLKQKVHAWANRIRRYKKRGDRFNQNRMFQRNEKWVYRKWKAPNPCESDGDLPDENTTNSFWRNIWSVPVTHTDGDWMRDISRSCDSITSMEPVIINEDNISCAVRSLPNWKSPGPDGLHNFWLKWFRSSHACLASQLQAALDSGSLPQFLTTGITHLLYKSGSAMDPKNFRPITCLPTLYKLLTSILRLKITKHINNNSIISVSQNGCRSGTRGTKELLITDMTISQQVRRNRKSLATCWIDYKKAFDSVPHTWLLKVLELYKIDTTLCTFLKSCMRQWRTVLRYPGCRQTAVNDVPIKIERGIFQGDSLSPLWFCLALNPLSTLLEGSGLGYSLFYMDDLKLFAPTKLQLTALLRVTENFSNSIKMEFGIDKCAVMHVKKGVIVESEGIELSDSTRLRALSATETYKYLGFSQSLGIPESDVKQSLRERFFGRLKKVLKSLLSGGNKVRAYNGWVMPVLMYSFGILRWTQTELDALDRRVRTLLTTFRMHHPRSSVMRLYIPRKFGGRGLLNIKTLHNREIYNVREYILHTDVEMHRNVVAVDTGLTPLALAKENWRKPVVLSTHDRREVWKGKELHGRFYRALNGPDIDFKTSTSWLRYGDLFGETEGFVCAIMDEVIMTNNYRKYILKDGTVDICRACHRPGESFRHIISGCSRLANGEYLHRHNQVARIVHQQLALKYKLVSSEVPYYRYVPDPVLENSRATLYWDRSIITDRTIVANKPDIVVIDRLERRAMIVDIAVPHDENLVKVEKEKQIKYLDLSHKIVDMWNVDSAITVTIVVSAHGLIAKSLDQHLKRLTLDGWIKGLMQKAVLLDTARIVRRFLSLEP

SEQ ID NO: 27325 - protein, 838 aa, Spilosoma lubricipeda
MRFVKQAFLGTTISPQQYMSSVTERIDFLKQKVYAWANRIRRYRKRVDRFIQNRMFQRNEKWVYRKWEEPSPRVGEGRFPDENVTNTFWRNIWSVPVTHTEGDWYRDVERSCESITSMEPITISKDDIGCAVRSLPNWKSPGPDGLHNFWLKWFRSSHACLASQYQAAVDSGSLPQFLTTGITHLLYKSGSAMDPKNFRPITCLPTMYKLLTSILRLKISTHINNNLIMSVSQNGCRSGSRGTKELLIIDMTISQQVRRNRKSLATCWIDYKKAYDSVPHTWLLRVLELYKIDTTLCTFLKSCMGQWRTVLRYPGCRQTAVNDVLINIERGIFQGDSLSPLWFCLALNPLSALLEDSGLGYRLQKDDQVISHLFYMDDLKLLAPTKLQLTALLKVTENFSNSIKMDKCAVMYVKKGVIVESEGTELSDSTRLRSLSATETYKYLGFSQSLGIPEPDMKQSLRERFFGRLKKVLKSLLSGGNKVRAYNGLVMPVLMYSFGILRWTQTELDALDRRVRTLLTAFRMHHPRSSVMRLYIPRKFGGRGLLNAKTLHNREIYNLREYFLHTDVGVHRSVVTVDTGLTPLALAKENWRKPVVLSTNDRREVWKGKELHGRFYRALNGPDIDFKASTSWLRYGDLFGESEGFVCAIMDEVIMTNNYRKYILKDGTVDICRACHRPGESIRHIISGCSRLANGEYLHRHNQVARIVHQQLALKYHLVSSEVPYYRYVPDPVLENGRATLYWDRSIITDRTIVANKPDIVVIDRLERRAMIVDIAVPHDENLVKVEKEKQIKYLDLSHEIVDMWNVDSAIIVPIVVSAHGLIAKSLDQHLKRLTLEG

SEQ ID NO: 27326 - protein, 1064 aa, Spilarctia lutea
MIYVYTIILIIIIIIMTSNRAPATGGDVRRMKWTHSINENVMRAYFRATELGTNLTAYRVRLVSLFQELEPAVNVSAQRLSDQVRAIQRCHLLDDAVLERIRSDVRNTLTIPSSSHTVDVVVNTPQLPDNHDVDEQRESEIISVSTQCNDRIRSALEDAIQEYRYVNYNNRPRLPRLPIHKRNLALVGALNSLLPDYFGNSEDLSDTHSILYCAAIAVCRVVGVKFIERITTRTKNTVPAWQYRIERRIAETRTLIGKLISFKSGNTRPRVMRFVKQAFLGTTISPQQYMSSVTERIDFLKQKVCAWANRIRRYKKRGDRFNQNRMFQTNEKWVYRKWEAPNPCDRDGHLPDENATNTFWRNIWSVPVTHTDGDWMRDVKRSCESITNMEPVRINKEDVSCAVRSLPNWKAPGPDGLHNFWLKWFRSSHACLASQFQAALDSGSLPQFLTTGITHLLYKSGGTMDPKNFRPITCLPTLYKLLSSILRIKITTHINHNSILSISQNGCRSGTRGTKELLIIDMTISQQVRRNRRNLATCWIDYKKAYDSVPHTWLLKVLELYKIDKTLCTFLKSCMGQWRTVLRYPGCRQSPMTDVLIKIERGIFQGDSLSPLWFCLALNPLSTLLEGSELGYGLRKDDRVISHLLYMDDLKLLAPTKLQLTALLKITENFSNSIKMEFGVDKCAVMYVKKGLIVESEGVELSDSTKLRSLSVTEGYKYLGFTQSLGIPESDMKQALRERFFGRLKKVLKSLLSGGNKVRAYNGWVMPVLMYSFGILRWTQTELDALDRGVRTLLTAFRMHHPRSSVMRLYIPRKLGGRGLLNIKTLHNREIYNLREYFLHTDVGMHRSVVAVDTGLTPLALAKENWRKPVVLSTDDRREVWKGKELHGRFYRALHGPDIDFKTSTSWLRYGDLFGETEGFVCAIMDEVIMTNNYRKYILKDGTVDICRACHRPGESIRHIISGCSRLANGEYLHRHNQVARIVHQQLALKYNLVISEVPYYRYVPDPVLENGRATLYWDRSIITDRTIVANKPDIVVIDRLERRAIIIDIAVPHDENLVKVEKE

SEQ ID NO: 27327 - protein, 1190 aa, Spilarctia lutea
MLTRARRRALITSPDSSLRSALPSPEEAIEVPAGAEASSSSSSDEFFSPPTSPIPVRRQGRDRPPTSLGSRGPLTSNRAPATGGDVRRMKWTHSINENVMRAYFRATELGTNLTAYRVRLVSLFQELEPAVNVSAQRLSDQVRAIQRCHLLDDAVLERIRSDVRNTLTIPSSSHTVDVVVNTPQLPDNHDVDEQRESEIISVSTQCNDRIRSALEDAIQEYRYVNYNNRPRLPRLPIHKRNLALVGALNSLLPDYFGNSEDLSDTHSILYCAAIAVCRVVGVKFIERITTRTKNTVPAWQCRMERRIAETRTLIGKLISFKSGNTRPRVMRFVKQAFLGTTISPQQYMSSVTERIDFLKQKVCAWANRIRRYKKRGDRFNQNRMFQTNEKWVYRKWEAPNPCDRDGHLPDENATNTFWRNIWSVPVTHTDGDWMRDVKRSCESITNMEPVRINKEDVSCAVRSLPNWKAPGPDGLHNFWLKWFRSSHACLASQFQAALDSGSLPQFLTTGITHLLYKSGGTMDPKNFRPITCLPTLYKLLSSILRIKITTHINHNSILSISQNGCRSGTRGTKELLIIDMTISQQVRRNRRNLATCWIDYKKAYDSVPHTWLLKVLELYKIDKTLCTFLKSCMGQWRTVLRYPGCRQSPMTDVLIKIERGIFQGDSLSPLWFCLALNPLSTLLEGSELGYGLRKDDRVISHLLYMDDLKLLAPTKLQLTALLKITENFSNSIKMEFGVDKCAVMYVKKGLIVESEGVELSDSTKLRSLSVTEGYKYLGFTQSLGIPESDMKQALRERFFGRLKKVLKSLLSGGNKVRAYNGWVMPVLMYSFGILRWTQTELDALDRGVRTLLTAFRMHHPRSSVMRLYIPRKLGGRGLLNIKTLHNREIYNLREYFLHTDVGMHRSVVAVDTGLTPLALAKENWRKPVVLSTDDRREVWKGKELHGRFYRALHGPDIDFKTSTSWLRYGDLFGETEGFVCAIMDEVIMTNNYRKYILRDGTVDICRACHRPGESIRHIISGCSRLANGEYLHRHNQVARIVHQQLALKYNLVISEVPYYRYVPDPVLENGRATLYWDRSIITDRTIVVIDRLERRAIIIDIAVPHDENLVKVEKEKQIKYLDLSHEIVDMWNVDSVIIVPIVVSVHGLIARSLDQHLKRLTLDGWIKGLIQKAVLLDTARIVRRFLSLEP

SEQ ID NO: 27328 - protein, 1075 aa, Spilosoma lubricipeda
MLTRARSRAQLLTPDSSLRSALPSSDARTEVPTVAEASSSSSSDEFFSPPTSPTPVRRQERYRPPDSLGPRGPLTSNRTPAAGGNVRRMKWTHSINENVMRAYFRATELGTNLTAYRVRLVSLFQELEPAVNVSAQRLSDQVRAIQRCHLLDDAVLERIRSDIRNSLAVPSSSHVVDTIVNTTSQLPRSEYIDELVDSEIISVSTQCNDTIRSTLEDAIREYRYVDSNNRPRLSRLPIHKRNLALVSALDSLLPDYFNNSEDLSDTHSILYCAAIAVCRVAGVNFVECKTATRPKNTVPAWQCRIERRIAGTRTLIGKLISFRSGNTRPKVMRFVKQAFLGTTVSPQQYMSCVTERIDFLKQKVYAWANRIRRYRKRTDRYNQNRTFQRNEKWVYQKWEKLSPCMSDEHLPDKNATNYFWRNIWSTPVTHTEGHWCRDVERSCESITPMEPVRIDKEDVSCAVRSLANWKAPGPDGLHNFWLKWFRSSHAYLASQFQTALDSGSLPQFLTTGITHLLHKSGSTMDPKNFRPITCLPTLYKLLTSILRLKITTHINNNSIISVSQNGCRSGTRGTKELLIIDMTISQQVRRNRKSLATCWIDYKKAYDSVPHTWLLRVLELYKIDTTLCTFLKSCMGQWRTVLRYPGCRQTAVNDVPIKIERGIFQGDSLSPLWFCLALNPLSTLLESSGLGYRLQKDAALISHLFYMDDLKLFAPTKLQLTALLRVTENFSNSIKMEFCVDKCAVMHVKKGVIVESEGIELSDSTKLRFLSATETYKYLGFSQSLGIPESDMKQSLRERFFGRLKKVLKSLLSGGNKVRAYNGWVMPVLMYSFGILRWTQTELDALDRRVRTLLTTFRMHHPRSSVMRLYIPRKFGGRGLLNIKTLHNREIYNLREYFLHTDVEMHRNVVAVDTGLTPLALAKENWRKPVVLSTNDRREVWKGKELHGRFYRALNGPDIDFKASTSWLRYGDLFGETEGFVCAIMDEVIMTNNYRKYILKDGTVDICRACHRPGESIRHIISGCSRLANGEYLHRHNQVARIVHQQLALKYHLVNSEVPYYRYVPEPVLENGRAT

SEQ ID NO: 27329 - protein, 1043 aa, Eilema sororculum
MQVVPQETQPVQTDCELDNVATSVSTQYIEQIRNALECAVRDYRSMNYQIRPRLPRLPVHKRNIALVCALDSLLPNYLDNCEHLGDTHSILYCAAYAACRVAGVKFPECNTAIRPKSGKPRWQCRIERRIAETRALIGKLICFRSGNTRPRVMRFVNRVFSGTGVSPFDYTSRVTERIDFLKQKVYAWANRIKRYKKRCDRYTLNRTFQRDERWVYRNWERADSVGDEHFPDVTATNTFWRNIWSVPVAHTEGDWVRKVKRSCEAIETMEPVIISEDDIACVVRSLPNWKAAGPDGLHNFWLKWLRSSHARLAFQFQSALESGSLPSFMTTGITHLLFKSGCAMNPKNYRPITCLPTVYKLLTSVLRVKIASHITRNSILSYSQNGCRSGARGTKELLIIDTAVNQQVRRNRRDMATCWIDYKKAYDSVPHTWLLRVLELYKVDTTLCTFLEACMGQWSTALRYPGCRHIPDDGELIKIERGIFQGDSLSPLWFCLALNPLSTILEDSGLGYCLRRGSQVISHLLYMDDLKLFAPNNRQLMELLKVTETFSTSIRMEFGVDKCAVMHVKKGEIVESEGIELSDSTKLRSLSVNDTYKYLGISQALGVNESDMKQSLRERFFCRLKKVLKSLLSGGNKVRAYNDWVIPVLTYSFGILRWTQTELEALDRRVRTLLTAYRMHHPRSSVMRLYIPRKFGGRGFLNIKTLHNREICNLREYFLKVNVDVHRDVVAVDRGLTPLALAKENWRKPAILSINDRKEVWKSKELHGRFHRALYGPDVDLKASVSWLRFGDLFGETEGFVCAITDEVVMTNNYRRYILKDGTVDICRACHRPGESLRHIISGCSRLANGEYLHRHNQVARIVHQQLALKYKLVDSEVPYYRYVPDPVLDDGRVTLYWDRSVITDRTIVANKPDIVVIDRLERRAIIIDVTIPHDENLVKAEKDKQIKYLFGPGSRGCRHVECGFGDYCSDSRVGSRTDCQEPRPTPQEARVRQLGQGPDAEGGTPRHGTHCEEVPLLGALTTGSLVPVPDAGRVPTIFYIFK

SEQ ID NO: 27330 - protein, 1199 aa, Spilosoma lubricipeda
MLARARSRAQLLTPDSSLRSALPSSDARTEVPTVAEASSSSSSDEFFSPPTSPTPVRRQERYRPPDSLGPRGPLTSNRAPAAGGNVRRMKWTHSINENVMRAYFRATELGTNLTAYRVRLVSLFQELEPAVNVSAQRLSDQVRAIQRCHLLDDAVLERIRSDIRNSLAVPSSSHVVDTIVNNTSQLPRSEYIDELVDSEIISVSTQCNDTIRSTLEDAIREYRYVDSNNRPRLSRLPIHKRNLALVSALDSLLPDYFNNSEDLSDTHSILYCAAIAVCRVAGVNFVECKTATRPKNTVPAWQCRIERRIAGTRTLIGKLISFRSGNTRPKVMRFVKQAFLGTTVSPQQYMSCVTERIDFLKQKVYAWANRIRRYRKRTDRYNQNRTFQRNEKWVYQKWEKLSPCMSDEHLPDKNATNYFWRNIWSTPVIHTEGHWCRDVERSCESITPMEPVRIDKEDVSCAVRSLANWKAPGPDGLHNFWLKWFRSSHAYLASQFQTALDSGSLPQFLTTGITHLLHKSGSTMDPKNFRPITCLPTLYKLLTSILRLKITTHINNNSIISVSQNGCRSGTRGTKELLIIDMTISQQVRRNRKSLATCWIDYKKAYDSVPHTWLLRVLELYKIDTTLCTFLKSCMGQWRTVLRYPGCRQSTMNDVLIKIERGIFQGDSLSPLWFCLALNPLSTLLEGSGIGYRLQKDDRVISHLLYMDDLKLLAPTKSQLTALLKVTENFSNSIKMEFGVDKCAVMYVKKGLIVESEGVELSDSTKLRSLSATETYKYLGFSQSLGIPESDVKQMLRERFFGRLKKVLKSLLSGGNKVRAYNSWVMPVLMYSFGILRWTQTELDAFDRRVRTLLTAFRMHHPRSSVMRLYIPRKFGGRGLLNIKTLHNREIYNLREYFLHTDVEMHRNVVAVDTGLTPLALAKENWRKPVVLSTNDRREVWKGKELHGRFYRALNGPDIDFKASTSWLRYGDLFGETEGFVCAIMDEVIMTNNYRKYILKDGTVDICRACHRPGESIRHIISGCSRLANGEYLHRHNQVARIVHQQLALKYHLVNSEVPYYRYVPDPVLENGRATLYWDRSIITDRTIVANKPDIVVIDRLERRAMIVDIAVPHDENLVKAEKEKQIKYLDLSHEIVDMWNVDSAIIVPIVVSAHGLIARSLDQHLKRLTLDGWIKGLMQKAVLLDTARIVRRFLSLEP

SEQ ID NO: 27331 - protein, 1023 aa, Omphaloscelis lunosa
MSVIIPSQIITSQADERIDDRATNVSTQCNEELRSALEGAIQEYRFMSPELRPRLPRLPMHNKNKALVAVLDSQLSNYFDDCEDLTDTHSILYCAAVAACRVAHVKFANDSRATRPKPAAPAWQCRIERRIGGARTLIGKLICFREGNTRPRVMRFVRRAFLGTDISPQDYLTRVTERIDFLKQKVYAWANRIRSYKRRVERYTQNRTFQSDERWVYRAWERPDQGVADTHRPDDDAMCSFWRSIWSVPVNHTEGDWTREVERACDPIPEMGAITICPQDVARAVHPLPNWKSPGPDGLHNFWIKWFLRSHARLAAQYQTALESGSLPQFLTTGVTHLLHKSGSTAEPKNYRPITCLPTVYKVLTSILRAKINKHIDTNSIMSASQNGCRNGSRGTKELLLIDMAINQQVRRSRKDLSTCWIDYKKAYDSVPHTWLMRVLELYKVDTTLRTFLMSCMGQWRTVLRYPGCRNIQRNSEPIRIERGIFQGDSLSPLWFCLALNPLSTLLEASGLGYRLRRGGQVISHLLYMDDLKLFAPNNLQLMELLKVTETFSNAIRMEFGVDKCAVMHVKRGEIVESVGTQLSDSINLRALSASETYKYLGMSEALGINVTDMKQSLKERFFGRLKKVLNSLLSGGHKVRAFNGWVMPVLIYSFGILKWTQTELDALDRRVRTLLTAYRMHHPRSSVMRLYIPRKCGGRGFLNAKTLHNREICSLREYFLGVDVGMHRDVVVVDKGLTPLSLAKENWRKPVVLDTKDRMEIWQSKELHGRYFRALHGPDVDLPASVTWLRFGDLFGETEGFVCAIMDEVMMTNNYRRFIVKDGTVDICRACHRPGESIRHNNIISGCSRLANEEYLHRHNLVARIIHQQLALKYSLVESEMPYYRYVPDPVLENGNITLYWDRSIITDRTIVANKPDIVVVDRGERRTMIIDITVPHDKNFVKAEKDKQIKYLDLAREVVDMWDVDSAIIVPIVVTANGLIAKSLDQHLRRLSLGSWIKGLIQRAVLLDTARIVRRFLSLEP

SEQ ID NO: 27332 - protein, 867 aa, Arctia plantaginis
MRFVKQAFLGTTISPQRYKSCVTERIDFLKQKIYTWANRIRRYKKRIDRYNQNRMFERNEKWVYRKWEEPNPCVGDRHLPDENVTNTFWRNIWSVPVTHIEGDWLQNVRRSCESITPMEPVEIDKDDVSCAVRSLPNWKSPGPDGLHNFWLKWFRSSHARLASEFQAALDSGSLPQFLTTGITHLLYKSGSVMDPKNFRPITCLTTMYKLLTYILRLKITLYINNNSIMSVSQNGCRSGTRGTKDLLIIDMTISQQVRRNRKSLATCWIDYKKAYDSVPHTWLLKVLELYKIDTTLYTFLKSCMGQWRTALRYPGCRQTAIHDVLIKIERGIFQGDSLSPLWFCLALNPLSTLLEDSWLGYRLQKDDQVISHLLYMDDLKLLASNKLQLTKLLKVSENFSNSIKIEFGVDKCAVMYVKKGVIVESEGIELSDSTKLRSLSATETYKYLGISQSLGIPESNMKHTLQERFFARWKKVLKSLLSGGNKVRACNGWVMPVLMYSFGILRWTQTELDALDRKVRTLLTASRMHHPRSSVMRLYIPRKLGGRGLLNIKTLHNREICNLREYFLHTDVGVHRNVVAVDTGFTPLALAKENWRRPVVLSVNDRREVWKGKELHGRFHGALNGSDIDLKASTTWLRYGDLFGETEGFVCAIMDEVMTNNYRKYILKHGTVDICRACHRPGESIRHIISGCSRLANGEYLHRHNQVTRIVHQQLALKYHLVNLEVPYYRYVPDPVLENGRATLYWDRSIITDRTIVANKPDIVMIDRLERRAMIVDIAVPYDENLVKVEKEKQIKYLDLSYEIVDMWNVDSVIIVPIVVSAHGLIAKSLDQHLKRLTLDGWTKGLMQKAVLLDTARIVRRFLSLES

SEQ ID NO: 27333 - protein, 1197 aa, Spilarctia lutea
MITRARSRALLPPSDSSRSSALPSSEARTEAPTVAEASSSSSSDEFFSPPTSPTPVRRQGRCRPPDSLGPRGPLTSNRAPATGGNVHRMKWTHSINENVMRAYFRATELGTNLTAYRVRLVSLFQELEPAINVSAQRLSDQVRAIQRCHLLDDAALERIRSDIRNSLTVPSSSHVVDVVTNTTPQVPQNEDVSELVDSEIMSVSNQYNDRIRSTLEDAIREYRYVNFNNRPRLSRLPIHKRNLALVSALDSLLPDYFSNSEDLSDAHSILYCAAIAVCRVAGVKFAENTTTTRQENTVPAWQCRIERRIAEARTLIGKLISFRSGNMRPRVMRFVKRAFLGTTISPQEYMSCVAERIDFLKQKVYAWANRIRRYRKRVDRYNQNRMFQRNEKWVYRKWENLRPCLSDGQVPDENATNSFWHSIWSVPVTHTEGDWYRDVERSCESLLPMEPISINEEDVSCAVRSLPNWKAPGPDGLHNFWLKWFRSSHACLASQFQTALDSGSLPQFLTTGITHLLYKSGDAMDPKNFRPITCLPTLYKLLTSILRLKITTHINHNSILSISQNGCRSGTRGTKELLIIDMTISQQVRRNRKSLATCWIDYKKAFDSVPHTWLLRVLELYKIDTTLCTFLKLCMGQWRTALRYPECRQSAMNDVLIKIERGIFQGDSLSPLWFCLALNPLSTLLEGSGLGYRFRKDDRGISHLLYMDDLKLLAPTKLQLTGLLKVTENFSNSIKMEFGVDKCAVMYVKKGEIVESEGIELSDATKLRSLSVTETYKYLGFSQSLGIPEPDMKQTLRERFFSRLKKVLKSLLSGGNKVRACNGWVMPVLMYSFGVLRWTQTELDAIDRRVRTLLTAFRMHHPRSSVMRLYIPRKLGGRGLLNIKTLHNREVYNLREYFLQTDVGVHRSVVTVDTGLTPLALAKENWRKPVVLSTNDRREVWKGKVLHGRFYLNGPDIDFKASTSWLRYGDLFGETEGFVCAIMDEVIMTSNYRKYILKDGTVDICRACHRPGESIRHIVSGCSRLANGEYLHRHNQVARIVHQQLALKYNLVSSEVPYYRYVPDPVLENGRATLYWDRSIITDRTIVANKPDIVVMDRLERRAMIVDIAVPHDENLVKVEKEKQIKYLDLSHEIVDMWNVDSAIIVPIVVSAHGLIAKSLDQHLKRLTLGGWIKGLIQKAVLLDTARIVRRFLSLEP

SEQ ID NO: 27334 - protein, 1065 aa, Eilema depressum
MLTRAKAREIVQNAQNTPTDSSCSSASQPPDTISPRLATAEASSSDEYFSPPTTPTPVRRPGRGRPPASLGPRGLPASNRALATGGNVRRMAWTPAINENVMRAYYVATELGTNLTAYRARLLSLFQELEPAVNVSAQRLSDQVRAIQRCNLLDGAVLERLFSDVQNSLAIPTSSQAVPPVDTSAPTRVSSPQLVYADEVEESETISVSTQYNELLRSTLEDAILEYRSMIPSSRPRLPHLPMHKRNIALVCALDSILPNYLENSEDLGDTHSILYCAAVAACRVAGVKFIVTKPATRPKHAVPAWQYRIECRIAEARALIGKLICFRSGNTCPRVMRFVTQAFSGTNVSPQLYASCVTERIDFLKQKVYAWANRIRRYKKRVDRYNQNRIFQKDERWVYRKWEQPESGVDDIARPDADATNTFWCSIWSTPVVHTEGDWIGEVEQACENIQIMEPVTITPDDVASAVRSLPNWKSPGPDGLHNFWLKWLRNSHACLATQFQSALDSGSLPNFVTTGITHLLHKSGSVTDPKNYRPITCLPTVYKLLTSILRVKINSHLEKNSVISIFQNGCRRGARGTKELLLVDMAISQQVRRKRRNLATSWIDYKKAYDSVPHTWLLRVLELYKIDTTLATFLRSCMGQWKTVLRYPGCCQTNDAPIRIERGIFQGDSLSPLWFCLALNPLSTILENSGLGYRLRREGRVISHLLYMDDIKLFAPNNTQLIELLKMTESFSSSIKMEFGLDKCAVMHVERGGIVESEGLILSDSIKLKSLSSTETYKYLGMSQALGIPEAGVKQALRERFFGRLKKVLKSFLSGGNRVRACNGWVMPVLMYSFGILRWTQTELDALDRKVRTLLTTFRMHHPRSSVMRLYIPRKLGGRGFLNIKNLHNREIYNLRQYCLQVNTDMHRDVVAVDNGLTPLALAKENWRKPVVLSTADRREVWMGKELHGRFYRALNGPDIDLKASVSWLRFGDLFGETEGFVFAITDEVVMTNNYRKYILKDGTVDICRACHRPGESLRHIISGCSRLANGEYLHRHNQVAKIVHQQLALKYNLVIYLLSTSL

SEQ ID NO: 27335 - protein, 1238 aa, Eilema depressum
MLTRAKAREIVQNAQTTPTDSSCSSASQPPDTISPRLATAEASSSDEYFSPPTTPTPVRRPGRGRPPASLGPRGPPASNRALATGGNVRRMAWTPSINENVMRAYYVATELGTNLTAYRGRLLSLFQELEPAVNVSAQRLSDQVRAIQRCNLLDGAVLERLFSDVQNSLAILTSSQAVPPVETSAPTRVSPPQLVYADEVEESETISVSTQYNELLRSTLEDAMLEYRSIIPSSRPRLPHLPMHKRNIALVCALDSILPNYLENSEDLGDTHSILYCAAVAACRVAGVKFIVDKPATRPKHAVPAWQYRIECRIAEARALIGKLICFRSGNTRPRVMRFVTQAFAGTNVCPQQYASCVTERIDFLKQKVYAWANRIRRYKKRVDRYNQNRIFQKDERWVYRKWEQPESGVDDVARPDADATNTFWCSIWSTPVVHTEGDWIREVEQACENIQVMEPITITPDDVASAVRSLPNWKSPGPDGLHNFWLKWLRNSHACLATQFQSALDSGSLPSFVTTGITHLLHKSGSATDPKNYRPITCLPTVYKLLTSILRVKINSHLEKKSVISIFQNGCRKGARGTKELLIVDMAISQQVRRKRRNLATSWIDYKKAYDSVPHTWLLRVLELYKIDTTLATFLRSCMGQWKTVLRYPGCCQTNDAPIRIERGIFQGDSLSPLWFCLALNPLSTILENSGLGYRLRREGRVISHLLYMDDIKLFAPNNTQLIELLKMTESFSSSIKMEFGLDKCAVMHVERGGIVESEGLILSDSIKLKSLSSTETYKYLGMSQALGIPDAGVKQALRERFFGRLKKVLKSFLSGGNKVRACNGWVMPVLMYSFGILRWTQTELDALDRKVRTLLTTFRMHHPRSSVMRLYIPRKLGGRGFLNIKNLHNREIYNLRQYCLQVNTDMHRDVVAVDNGLTPLALAKENWRKPVVLSTADRREVWMGKELHGRFYRALNGPDIDLKASVSWLRFGDLFGETEGFVFAITDEVVMTNNYRKYILKDGTVDICRACHRPGESLRHIISGCSRLANGEYLHRHNQVAKIVHQQLALKYNLVSSEVPYYRYVPDPVLENGRVTLYWDRSIITDRTIVANKPDIVVIDRLERLAMIVDVTIPHDENLMKAEKDKQIKYLDLAHEVDMWNVDSAIIVPIVISAHGLIAKSLDQHLKRLSLGSWIKGLMQKAVLLDTARIVRRFLSLEPGALTTGGLVPIPDTGGALFFIFLNICFCIYIIMYLKI

SEQ ID NO: 27336 - protein, 1198 aa, Eilema sororculum
MLTRAKARKLAHPTPSDSSCSSASQAPETTSPRPTTAEASSSDEYFSPPTSPTPVRRPGRGRPPSSLGSRGPPASSGAPAAGGNVRRMKWTTSVNENVMRAYFVATAGGTNLTAYRVRMLPLFQELEPAVSVSAQRLSDQVRAIQRCHLLDDSVLERLLSDVQNSLATPTSSQAVPVETSVVMSVSTPQLVHADEVEESETISVSTQYNERLRSALEDAMLEYRSMIPSNRPRLPHLPVHKRNIALVCALDSLLSNYLENSEDLGDTHSILYCAAVAVCRVAGVRFIVDKPVTRHRPAVPAWQYRIECRIAKARALIGKLICFRSGNTRPRVMRFVTQAFSGTNISPEQYASCVTERIDFLKQKVYAWANRIRRYKKRVDRYNQNRIFQKDERWVYRKWEQPELNVNDTARPDADATNTFWRSIWSTPVVHTEDDWIRGVEQACENIQIMEPITITSDDVSSAVRSLPNWKSAGPDGLHNFWLKWLRNSHACLASQFQSALDSGSLPNFLTTGLTHLLYKSGSAMDPKNYRPITCLPTVYKLLTSILRVKINSHLERNSIISISQNGCRRGARGTKELLIVDMTISQQVRRKRKNLATSWIDYKKAYDSVPHTWLLRVLELYKIDITLAAFLRSCMGQWKTVLRYPGCYQTTDAPIRIERGIFQGDSLSPLWFCLALNPLSTILENSGLGYRLQREGRVISHLLYMDDLKLFAPNNAQLIELLKMTESFSSSIKMEFGLDKCAVMHVERGGIVESENLILSDSIKLKSLSSTETYKYLGMSQALGIPEAGMKQALQERFFGRLKKVLKSFLSGGNKVRACNGWVMPVLMYSFGILRWTQTELDALDRRVRSLLTTFRMHHPRSSVMRLYIPRKLGGRGFLNVKTLHNREIYNLREYFLHANTDMHRDVVAVDNGFTPLALAKENWRKPIVLDTADRREVWMGKELHGRFYRALNGPYIDLKASVSWLRFGDLFGETEGFIFAITDEVVMTNNYRKYILKDGTVDICRACHRPGESLRHIISGCSRLANGEYLHRHNQVAKIVHQQLALKYNLVDSEVPYYRYVPDPVLENGRITLYWDRSIITDRTIVANKPDIVVIDRLERLAMIIDVTIPHDENLMKAEKDKQMKYLDLAHEVVDMWNIDSAIIVPIVVSAHGLIAKSLDQHLKRLALGSWIKNLMQKAVLLDTARIVRKFLSLEP

SEQ ID NO: 27337 - protein, 1199 aa, Eilema sororculum
MLTRAKARKLAHPTPSDSSCSSASQAPETTSPRPTTAEASSSDEYFSPPTSPTPVRRPGRGRPPSSLGSRGPPASSGAPATGGNVRRMKWTTSVNENVMRAYFVATAGGTNLTAYRVRMLPLFQELEPAVSVSAQRLSDQVRAIQRCHLLDDSVLERLLSDVRNSLATPTSSQAVLPVETSVVMSVSTPQLVHADEVEESETISVSTQYNERLRSALEDAMLEYRSMIPSNRPRLPHLPVHKRNIALVCALDSLLSNYLENSEDLGDTHSILYCAAVAVCRVAGVRFIVNKPVTRHRPAVPAWQYRIECRIAKARALIGKLICFRSGNTRPRVMRFVTQAFSGTNISPEQYASCVTERIDFLKQKVYAWANRIRRYKKRVDRYNQNRIFQKDERWVYRKWEQPELNVDDTARPDADATNTFWRSIWSTPVVHIEGDWIRGVEQACENIQIMEPITITSDDVSSAVRSLPNWKSAGPDGLHNFWLKWLRNSHACLASQFQSALDSGSLPNFLTTGLTHLLYKSGSAMDPKNYRPITCLPTVYKLLTSILRVKINSHLERNSIISISQNGCRRGARGTKELLIVDMTISQQVRRKRKNLATSWIDYKKAYDSVPHTWLLRVLELYKIDTTLAAFLRSCMGQWKTVLRYPGCYQTTDAPIRIERGIFQGDSLSPLWFCLALNPLSTILENSGLGYRLQREGRVISHLLYMDDLKLLAPNNAQLIELLKMTESFSSSIKMEFGLDKCAVMHVERGGIVESENLILSDSIKLKSLSSTETYKYLGMSQALGIPEAGMKQALQERFFGRLKKVLKSFLSGGNKVRACNGWVMPVLMYSFGILRWTQTELDALDRRVRSLLTTFRMHHPRSSVMRLYIPRKLGGRGFLNVKTLHNREIYNLREYFLHANTDMHRDVVAVDNGFTPLALAKENWRKPIVLDTADRREVWMGKELHGRFYRALNGPDIDLKASVSWLRFGDLFGETEGFIFAITDEVVMTNNYRKYILKDGTVDICRACHRPGESLRHIISGCSRLANGEYLHRHNQVAKIVHQQLALKYNLVDSEVPYYRYVPDPVLENGRITLYWDRSIITDRTIVANKPDIVVIDRLERLAMIIDVTIPHDENLMKAEKDKQMKYLDLAHEVVDMWNIDSAIIVPIVVSAHGLIAKSLDQHLKRLALGSWIKNLMQKAVLLDTARIVRKFLSLEP

SEQ ID NO: 27338 - protein, 1112 aa, Eilema sororculum
MKWTTSVNENVMRAYFVATAGGTNLTAYRVRMLPLFQELEPAVSVSAQRLSDQVRAIQRCHLLDDSVLERLLFDVQNSLATPTSSQAVLPVETSVVMSVSTPQLVHADEVEESETISVSTQYNERLRSALEDAMLEYRSMIPSNRPRLPHLPVHKRNIALVCALDSLLSNYLENSEDLGDTHSILYCAAVAVCRVAGVRFIVDKPVTRHRPAVPAWRYRIECRIAKARALIGKLICFRSGNTRPRVMRFVTQAFSGTNISPEQYASCVTERIDFLKQKVYAWANRIRRYKKRVDRYNQNRIFQKDERWVYRKWEQPELNVDDTARPDADATNTFWRSIWSTPVVHTEGDWIGGVEQACENIQIMEPITITSDDVSSAVRSLPNWKSAGPDGLHNFWLKWLRNSHACLASQFQSALDSGSLPNFLTTGLTHLLYKSGSAMDPKNYRPITCLPTVYKLLTSILRVKINSHLERNSIISISQNGCRRGARGTKELLIVDMTISQQVRRKRKNLATSWIDYKKAYDSVPQTWLLRVLELYKIDTTLAAFLRSCMGQWKTVLRYPGCCQTTDAPIRIERGIFQGDSLSPLWFCLALNPLSTILENSGLGYRLQREGRVISHLLYMDDLKLLAPNNAQLIELLKMTESFSSSIKMEFGLDKCAVMHVERGGIVESENLILSDSIKLKSLSSTETYKYLGMSQALGIPEAGMKQALRERFFGRLKKVLKSFLSGGNKVRACNGWVMPVLMYSFGILRWTQTELDALDRRVRSLLTTFRMHHPRSSVMRLYIPRKLGGRGFLNVKTLHNREIYNLREYFLHANTDMHRDVVAVDNGFTPLALAKENWRKPIVLDTADRREVWMGKELHGRFYRALNGPDIDLKASVSWLRFGDLFGETEGFIFAITDEVVMTNNYRKYILRDGTVDICRACHRPGESLRHIISGCSRLANGEYLHRHNQVAKIVHQQLALKYNLVDSEVPYYRYVPDPVLENGRITLYWDRSIITDRTIVANKPDIVVIDRLERLAMIIDVTIPHDENLMKAEKDKQMKYLDLAHEVVDMWNIDSAIIVPIVVSAHGLIAKSLDQHLKRLALGSWIKNLMQKAVLLDTARIVRKFLSLEP

SEQ ID NO: 27339 - protein, 1202 aa, Eilema depressum
MLTRAKAREIVQNAQNTPTDSSCSSASQPPDTISPRLATAEASSSDEYFSPPTTPTPVRRPGRGRPPASLGPRGLPASNRALATGGNVRRMAWTPAINENVMRAYYVATELGTNLTAYRARLLSLFQELEPAVNVSAQRLSDQVRAIQRCNLLDGAVLERLFSDVQNSLTIPTSSQAVPPVETSAPTRVSSPQLVYADEVEESETISVSTQYNELLRSTLEDAILEYRSMIPSSRPRLPHLPMHKRNIALVCALDSILPNYLENSEDLGDTHSILYCAAVAACRVAGVKFIVTKPATRPKHAVPAWQYRIECRIAEARALIGKLICFRSGNTRPRVMRFVTQAFSGTNVSPQLYASCVTERIDFLKQKVYAWANRIRRYKKRVDRYNQNRIFQKDERWVYRKWEQPESGVDDIARPDADATNTFWCSIWSTPVVHTEGDWIGEVEQACENIQIMEPVTITPDDVASAVRSLPNWKSPGPDGLHNFWLKWLRNSHACLATQFQSALDSGSLPNFVTTGITHLLHKSGSVTDPKNYRPITCLPTVYKLLTSILRVKINSHLEKNSVISIFQNGCRRGARGTKELLLVDMAISQQVRRKRRNLATSWIDYKKAYDSVPHTWLLRVLELYKIDTTLATFLRSCMGQWKTVLRYPGCCQTNDAPIRIERGIFQGDSLSPLWFCLALNPLSTILENSGLGYRLRREGRVISHLLYMDDIKLFAPNNTQLIELLKMTESFSSSIKMEFGLDKCAVMHVERGGIVESEGLILSDSIKLKSLSSTETYKYLGMSQALGIPEAGVKQALRERFFGRLKKVLKSFLSGGNKVRACNGWVMPVLMYSFGILRWTQTELDALDRKVRTLLTTFRMHHPRSSVMRLYIPRKLGGRGFLNIKNLHNREIYNLRQYCLQVNTDMHRDVVAVDNGLTPLALAKENWRKPVVLSTADRREVWMGKELHGRFYRALNGPDIDLKASVSWLRFGDLFGETEGFVFAITDEVVMTNNYRKYILKDGTVDICRACHRPGESLRHIISGCSRLANGEYLHRHNQVAKIVHQQLALKYNLVTSEVPYYRYVPDPVLENGRVTLYWDRSIITDRTIVANRPDIVVIDRLERLAMIVDVTIPHDENLMKAEKDKQIKYLDLAHEVVDMWNVDSAIIVPIVISAHGLIAKSLDQHLKRLSLGSWIKGLMQKAVLLDTARIVRRFLSLEP

SEQ ID NO: 27340 - protein, 1199 aa, Eilema sororculum
MLTRAKARKLAHPTPSDSSCSSASQAPETTSPRPTTAEASSSDEYFSPPTSPTPVRRPGRGRPPSSLGSRGPPASSGAPATGGNVRRMKWTTSVNENVMRAYFVATAGGTNLTAYRVRMLPLFQELEPAVSVSAQRLSDQVRAIQRCHLLDDSVLERLLSDVRNSLATPTSSQAVLPVETSVVMSVSTPQLVHADEVEESETISVSTQYNERLRSALEDAMLEYRSMIPSNRPRLPRLPVHKRNIALVCALDSLLSNYLENSEDLGDTHSILYCAAVAVCRVAGVRFIVDKPVTRHRPAVPAWQYRIECRIAKARALIGKLICFRSGNTRPRVMRFVTQAFSGTNISPEQYASCVTERIDFLKQKVYAWANRIRRYKKRVDRYNQNRIFQKDERWVYRKWEQPELNVDDTARPDADATNTFWRSIWSTPVVHTEGDWIRGVEQACENIQIMEPITITSDDLSSAVRSLPNWKSAGPDGLHNFWLKWLRNSHACLASQFQSALDSGSLPNFLTTGLTHLLYKSGSAMDPKNYRPITCLPTVYKLLTSILRVKINSHLERNSIISISQNGCRRGARGTKELLIVDMTISQQVRRKRKNLATSWIDYKKAYDSVPHTWLLRVLELYKIDTTLAAFLRSCMGQWKTVLRYPGCYQTTDAPIRIERGIFQGDSLSPLWFCLALNPLSTILENSGLGYRLQREGRVISHLLYMDDLKLLAPNNAQLIELLKMTESFSSSIKMEFGLDKCAVMHVERGGIVESENLILSDSIKLKSLSSTETYKYLGMSQSLGIPEAGMKQALQERFFGRLKKVLKSFLSGGNKVRACNGWVMPVLMYSFGILRWTQTELDALDRRVRSLLTTFRMHHPRSSLMRLYIPRKLGGRGFLNVKTLHNREIYNLREYFLHANTDMHRDVVAVDNGFTPLALAKENWRKPIVLDTADRREVWMGKELHGRFYRALNGPDIDLKASVSWLRFGDLFGETEGFIFAITDEVVMTNNYRKYILKDGTVDICRACHRPGESLRHIISGCSRLANGEYLHRHNQVAKIVHQQLALKYNLVDSEVPYYRYVPDPVLENGRITLYWDRSIITDRTIVANKPDIVVIDRLERLAMIIDVTIPHDENLMKAEKDKQMKYLDLAHEVVDMWNIDSAIIVPIVVSAHGLIAKSLDQHLKRLALGSWIKNLMQKAVLLDTARIVRKFLSLEP

SEQ ID NO: 27341 - protein, 1199 aa, Eilema sororculum
MLTRAKARKLAHPTPSDSSCSSASQAPETTSPRPTTAEASSSDEYFSPPTSPTPVRRPGRGRPPSSLGSRGPPASSGAPATGGNVRRMKWTTSVNENVMRAYFVATAGGTNLTAYRVRMLPLFQELEPAVSVSAQRLSDQVRAIQRCHLLDDSVLERLLSDVQNSLATPTSSQAVLPVETSVVMSVSTPQLVHADEGEESETISVSTQYNERLRSALEDAMLEYRSMIPSNRPRLPHLPVHKRNIALVCALDSLLSNYLENSEDLGDTHSILYCAAVAVCRVAGVRFIVDKPVTRHRPAVPAWQYRIECRIAKARALIGKLICFRSGNTRPRVMRFVTQAFSGTNISPEQYASCVTERIDFLKQKVYAWANRIRRYKKRVDRYNQNRIFQKDERWVYRKWEQPELNVDDTARPDADATNTFWRSIWSTPVVHTEGDWIRGVEQACENIQIMEPITITSDDVSSAVRSLPNWKSAGPDGLHNFWLKWLRNSHACLASQFQSALDSGSLPNFLTTGLTHLLYKSGSAMDPKNYRPITCLPTVYKLLTSILRVKINSHLERNSIISISQNGCRRGARGTKELLIVDMTISQQVRRKRKNLATSWIDYKKAYDSVPHTWLLRVLELYKIDTTLAAFLRSCMGQWKTVLRYPGCCQTTDAPIRIERGIFQGDSLSPLWFCLALNPLSTILENSGLGYRLQREGRVISHLLYMDDLKLLAPNNAQLIELLKMTESFSSSIKMEFGLDKCAVMHVERGGIVESENLILSDSIKLKSLSSTDTYKYLGMSQALGIPEAGMKQALQERFFGRLKKVLKSFLSGGNKVRACNGWVMPVLMYSFGILRWTQTELDALDRRVRSLLTTFRMHHPRSSVMRLYIPRKLGGRGFLNVKTLHNREIYNLREYFLHANTDMHRDVVAVDNGFTPLALAKENWRKPIVLDTADRREVWMGKELHGRFYRALNGPDIDLKASVSWLRFGDLFGETEGFIFAITDEVVMTNNYRKYILKDGTVDICRACHRPGESLRHIISGCSRLANGEYLHRHNQVAKIVHQQLALKYNLVDSEVPYYRYVPDPVLENGRITLYWDRSIITDRTIVANKPDIVVIDRLERLAMIIDVTIPHDENLMKAEKDKQMKYLDLAHEVVDMWNIDSAIIVPIVVSAHGLIAKSLDQHLKRLALGSWIKNLMQKAVLLDTARIVRKFLSLEP

SEQ ID NO: 27342 - protein, 1202 aa, Eilema depressum
MLTRAKARQLVQNAQTTPTDSSCSSASQPPDAISPRLATAEASSSDEYFSPPTSPTPVRRPGRGRPPASLGPRGLPTSNRALATGGNVRRMAWTPAINENVMRAYYVATELGTNLTAYRGRLLSLFQELEPAVNVSAQRLSDQVRAIQRCNLLDGAVLERLFSDVQNSLAIPTSSQAVPPVETSAPTRVSPPQLVYADEVEESETISVSTQYNELLRSTLEDAMLEYRSMIPSSRPRLPRLPMHKRNIALVCALDSLLPNYLENSEDLGDTHSILYCAAVAACRVAGVKFIVNKPATRPKHAVPAWQYRIECRIAEARALIGKLICFRSGNTRPRVMRFVTQAFSGTNVSPQLYASCVTERIDFLKQKVYAWANRIRRYKKRVDRYNQNRIFQKDERWVYRKWEQPESGVDEIARPDADATNTFWCSIWSTPVVHTEGDWIREVEQACENIQIMEPITITPDDVASAVRSLPNWKSPGPDGLHNFWLKWLRNSHACLATQFQSALDSGSLPNFITTGITHLLHKSGSATDPKNYRPITCLPTVYKLLTSILRVKINTHLEKNSVISISQNGCRRGARGTKELLLVDMAISQQVRRKRRNLATSWIDYKKAYDSVPHTWLLRVLELYKIDTTLATFLRSCMGQWKTVLRYPGCCQINDAPIRIERGIFQGDSLSPLWFCLALNPLSTILENSGLGYRLQREGRVISHLLYMDDIKLFAPNNTQLIELLKMTESFSSSIKMEFGLDKCAAMHVERGGIVESEGLILSDSIKLKSLSSTETYKYLGMSQALGIPEAGVKQALRERFFGRLKKVLKSFLSGGNKVRACNGWVMPVLMYSFGILRWTQTELDALDRKVRTLLTTFRMHHPRSSVMRLYIPRKLGGRGFINIKNLHNREIYNLRQYCLQANTDMHRDVVAVDNGLTPLALAKENCRKPVVLSTADRREVWMGKELHGRFYRALNGPDIDLKASVSWLRFGDLFGETEGFVFAITDEVVMTNNYRKYILKDGTVDICRACHRPGESLRHIISGCSRLANGEYLHRHNQVAKIVHQQLALKYNLVTSEVPYYRYVPDPVLENGRVTLYWDRSIITDRTIVANKPDIVVMDRLERLAMIVDVTIPHDENLMKAEKDKQIKYLDLAHEVVDMWNVDSAIIVPIVISAHGLIAKSLDQHLKRLSLGSWIKGLMQKAVLLDTARIVRRFLSLEP

SEQ ID NO: 27343 - protein, 1202 aa, Eilema depressum
MLTRAKAREIVQNAQNTPTDSSCSSASQPPDTISPRLATAEASSSDEYFSPPTTPTPVRRPGRGRPPASLGPRGLPASNRALATGGNVRRMAWTPAINENVMRAYYVATELGTNLTAYRGRLLSLFQELEPAVNVSAQRLSDQVRAIQRCNLLDGAVLERLFSDVQNSLAIPTSSQAVPPVETSAPTRVSSPQLGYADEVEESETISVSTQYNELLRSTLEDAILEYRSMIPSSRPRLPHLPMHKRNIALVCALDSILPNYLENSEDLGDTHSILYCAAVAACRVAGVKFIVTKPATRPKHAVPAWQYRIECRIAEARALIGKLICFRSGNTRPRVMRFVTQAFSGTNVSPQLYASCVTERIDFLKQKVYAWANRIRRYKKRVDRYNQNRIFQKDERWVYRKWEQPESGVDDIARPDADATNTFWCSIWSTPVVHTEGDWIGEVEQACENIQIMEPVTITPDDVASAVRSLPNWKSPGPDGLHNFWLKWLRNSHACLATQFQSALDSGSLPNFVTTGITHLLHKSGSVTDPKNYRPITCLPTVYKLLTSILRVKINSHLEKNSVISIFQNGCRRGARGTKELLLVDMAISQQVRRKRRNLATSWIDYKKAYDSVPHTWLLRVLELYKIDTTLATFLRSCMGQWKTVLRYPGCCQTNDAPIRIERGIFQGDSLSPLWFCLALNPLSTILENSGLGYRLRREGRVISHLLYMDDIKLFAPNNTQLIELLKMTESFSSSIKMEFGLDKCAVMHVERGGIVESEGLILSDSIKLKSLSSTETYKYLGMSQALGIPEAGVKQALRERFFGRLKKVLKSFLSGGNKVRACNGWVMPVLMYSFGILRWTQTELDALDRKVRTLLTTFRMHHPRSSVMRLYIPRKLGGRGFLNIKNLHNREIYNLRQYCLQANTDMHRDVVAVDNGLTPLALAKENWRKPVVLGTADRREVWMGKELHGRFYRALNGPDIDLKASVSWLRFGDLFGETEGFVFAITDEVIMTNNYRKYILKDGTVDICRACHRPGESLRHIISGCSRLANGEYLHRHNQVAKIVHQQLALKYNLVTSEVPYYRYVPDPVLENGRVTLYWDRSIITDRTIVANKPDIVVIDRLERLAMIVDITVPHDENLMKAEKDKQIKYLDLAHEVVDMWNVDTAIIVPIVISAHGLIAKSLDQHLKRLSLGSWIKGLMQKAVLLDTARIVRRFLSLEP

SEQ ID NO: 27344 - protein, 979 aa, Eilema depressum
MLEYRSMIPSSRPRLPRLPMHKRNIALVCALDSLLPNYLENSEDLGDTHSILYCAAVAACRVAGVKFIVNKPATRPKHAVPAWQYRIECRIAEARALIGKLICFRSGNTRPRVMRFVTQAFSGTNVSPELYASCVTERIDFLKQKVYAWANRIRRYKKRVDRYNQNRIFQKDERWVYRKWEQPESGVDEIARPDADATNTFWCSIWSTPVVHTEGDWIREVEQACENIQIMEPITITPDDVASAVRSLPNWKSPGPDGLHNFWLKWLRNSHACLATQFQSALDSGSLPNFITTGITHLLHKSGSATDPKNYRPITCLPTVYKLLTSILRVKINTHLEKNSVISISQNGCRRGARGTKELLLVDMAISQQVRRKRRNLATSWIDYKKAYDSVPHTWLLRVLELYKIDTTLATFLRSCMGQWKTVLRYPGCCQINDAPIRIERGIFQGDSLSPLWFCLALNPLSTILENSGLGYRLQREGRVISHLLYMDDIKLFAPNNTQLIELLKMTESFSSSIKMEFGLDKCAVMHVERGGIVESEGLILSDSIKLKSLSSTETYKYLGMSQALGIPEAGVKQALRERFFGRLKKVLKSFLSGGNKVRACNGWVMPVLMYSFGILRWTQTELDALDRKVRTLLTTFRMHHPRSSVMRLYIPRKLGGRGFINIKNLHNREIYNLRQYCLQANTDMHRDVVAVDNGLTPLALAKENWRKPVVLSTADRRDVWMGKELHGRFYRALNGPDIDLKASVSWLRFGDLFGETEGFVFAITDEVVMTNNYRKYILKDGTVDICRACHRPGESLRHIISGCSRLANGEYLHRHNQVAKIVHQQLALKYNLVTSEVPYYRYVPDPVLENGRVTLYWDRSIITDRTIVANKPDIVVIDRLERLAMIVDVTIPHDENLMKAEKDKQIKYLDLAHEVVDMWNVDSAIIVPIVISAHGLIAKSLDQHLKRLSLGSWIKGLMQKAVLLDTARIVRRFLSLEP

SEQ ID NO: 27345 - protein, 1199 aa, Eilema sororculum
MLTRAKARKFAHPTPSDSSCSSASQAPETTSPKPTTAEASSSDEYFSPPTSPTPVRRPGRGRPPSSLGSRGPPASNRAPATGGNVRRMKWTTSINENVMRAYFVATAGGTNLTAYRVRMLPLFQELEPAVSVSAQRLSDQVRAIQRCHLLDDSVLERLLSDVQNSLATPTSSQAVLPVETSVVMSVSTPQLVHADEVEESETISVSTQYNERLRSALEDAMLEYRSMIPSNRPRLPHLPVHKRNIALVCALDSLLSNYLENSEDLGDTHSILYCAAVAVCRVAGVRFIVDKPVTRHRPAVPAWQYRIECRIAKARALIGKLICFRSGNTRPRVMRFVTQAFSGTNISPEQYASCVTERIDFLKQKVYAWANRIRRYKKRVDRYIQNRIFQKDERWVYRKWEQPELNVDDTARPDADATNTFWRSIWSTPVVHTEGDWIRGVEQACENIQIMEPITITSDDVSSSVRSLPNWKSAGPDGLHNFWLKWLRNSHACLASQFQSALDSGSLPNFLTTGLTHLLYKSGSAMDPKNYRPITCLPTVYKLLTSILRVKINSHLERNSIISISQNGCRRGGRGTKELLLVDMTISQQVRRKRKNLATSWIDYKKAYDSVPHTWLLRVLELYKIDTTLAAFLRSCMGQWKTVLRYPGCCQTTDAPIRIERGIFQGDSLSPLWFCLALNPLSTILENSGLGYRLQREGRVISHLLYMDDLKLLAPNNAQLIELLKMTESFSSSIKMEFGLDKCAVMHVERGGIVESENLILSDSIKLKSLSSTETYKYLGMSQALGIPEAGMKQALQERFFGRLKKVLKSFLSGGNKVRACNGWVMPVLMYSFGILRWTQTELDALDRRVRSLLTTFRMHHPRSSVMRLYIPRKLGGRGFLNVKTLHNREIYNLREYFLHANTDMHRDVVAVDNGFTPLALAKENWRKPIVLDTADRREVWMGKELHGRFYRALNGPDINLKASVSWLRFGDLFGETEGFIFAITDEVVMTNNYRRYILKDGTVDICRACHRPGESLRHIISGCSRLANGEYLHRHNQVAKIVHQQLALKYNLVDSEVPYYRYVPDPVLENGRITLYWDRSIITDRTIVANKPDIVVIDRLERLAMIIDVTIPHDENLMKAEKDKQMKYLDLAHEVVDMWNIDSAIIVPIVVSAHGLIAKSLDQHLKRLALGSWVKNLMQKAVLLDTARIVRKFLSLEP

SEQ ID NO: 27346 - protein, 1199 aa, Eilema sororculum
MLTRAKARKLAHPTPSDSSCSSASQAPETTSPRPTTAEASSSDEYFSPPTSPTPVRRPGRGRPPSSLGSRGPPASSGAPATGGNVRRMKWTTSVNENVMRAYFVATAGGTNLTAYRVRMLPLFQELEPAVSVSAQRLSDQVRAIQRCHLLDDSVLERLLSDVRNSLATPTSSQAVLPVETSVVMSVSTPQLVHADEVEESETISVSTQYNERLRSALEDAMLEYRSMIPSNRPRLPRLPVHKRNIALVCALDSLLSNYLENSEDLGDTHSILYCAAVAVCRVAGVRFIVDKPVTRHRPAVPAWQYRIECRIAKARALIGKLICFRSGNTRPRVMRFVTQAFSGTNISPEQYASCVTERIDFLKQKVYAWANRIRRYKKRVDRYNQNRIFQKDERWVYRKWEQPELNVDDTARPDADATNTFWRSIWSTPVVHTEGDWIRGVEQACENIQIMEPITITSDDVSSAVRSQPNWKSAGPDGLHNFWLKWLRNSHACLASQFQSALDSGSLPNFLTTGLTHLLYKSGSAMDPKNYRPITCLPTVYKLLTSILRVKINSHLERNSIISISQNGCRRGARGTKELLIVDMTISQQVRRKRKNLATSWIDYKKAYDSVPHTWLLRVLELYKIDTTLAAFLRSCMGQWKTVLRYPGCYQTTDASIRIERGIFQGDSLSPLWFCLALNPLSTILENSGLGYRLQREGRVISHLLYMDDLKLLAPNNAQLIELLKMTESFSSSIKMEFGLDKCAVMHVERGGIVESENLILSDSIKLKSLSSTETYKYLGMSQSLGIPEAGMKQALQERFFGRLKKVLKSFLSGGNKVRACNGWVMPVLMYSFGILRWTQTELDALDRRVRSLLTTFRMHHPRSSVMRLYIPRKLGGRGFLNVKTLHNREIYNLREYFLHANTDMHRDVVAVDNGFTPLALAKENWRKPIVLDTADRREVWMGKELHGRFYRALNGPDIDLKASVSWLRFGDLFGETEGFIFAITDEVVMTNNYRRYILKDGTVDICRACHRPGESLRHIISGCSRLANGEYLHRHNQVAKIVHQQLALKYNLVDSEVPYYRYVPDPVLENGRITLYWDRSIITDRTIVANKPDIVVIDRLERLAMIIDVTIPHDENLMKAEKDKQMKYLDLAHEVVDMWNIDSAIIVPIVVSAHGLIAKSLDQHLKRLALGSWIKNLMQKAVLLDTARIVRKFLSLEP

SEQ ID NO: 27347 - protein, 1199 aa, Eilema sororculum
MLTRAKARKFAHPTPSDSSCSSASQAPETTSPKPTTAEASSSDEYFSPPTSPTPVRRPGRGRPPSSLGSRGPPASNRAPATGGNVRRMKWTTSINENVMRAYFVATAGGTNLTAYRVRMLPLFQELEPAVSVSAQRLSDQVRAIQRCHLLDDSVLERLLCDVQNSLATPTSSQAVLPVETSVVMSVSTPQLVHADEVEESETISVSTQYNERLRSALEDAMLEYRSMIPSNRPRLPHLPVHKRNIALVCALDLLLSNYLENSEDLGDTHSILYCAAVAVCRVAGVRFIVDKPVTRHRPAVPAWQYRIECRIAKARALIGKLICFRSGNTRPRVMRLVTQAFSGTNISPEQYASCVTERIDFLKQKVYAWANRIRRYKKRVDRYNQNRIFQKDERWVYRKWEQPELNVDDTARPDADATNTFWRSIWSTPVVHTEGDWIGGVEQACENIPIMEPITITSDDVSSAVRSLPNWKSAGPDGLHNFWLKWLRNSHACLASQFQSALDSGSLPNFLTTGLTHLLYKSGSALDPKNYRPITCLPTVYKLLTSILRVKINSHLERNSIISISQNGCRRGGRGTKELLLVDMTISQQVRRKRKNLATSWIDYKKAYDSVPHTWLLRVLELYKIDTTLAAFLRSCMGQWKTVLRYPGCCQTTDAPIRIERGIFQGDSLSPLWFCLALNPLSTILENSGLGYRLQREGRVISHLLYMDDLKLLAPNNAQLIELLKMTESFSSSIKMEFGLDKCAVMHVERGGIVESENMILSDSIKLKSLSSTETCKYLGMSQALGIPEAGMKQALRERFFGRLKKVLKSFLSGGNKVRACNGWVMPVLMYSFGILRWTQTELDALDRRVRSLLTTFRMHHPRSSVMRLYIPRKLGGRGFLNVKTLHNREIYNLREYFLHANTDMHRDVVAVDNGFTPLALAKENWRKPIVLSTADRRGVWMGKELHGRFYRALNGPDIDLKASVSWLRFGDIFGETEGFIFAITDEVVMTNNYRKYILRDGTVDICRACHRPGESLRHIISGCSRLANGEYLHRHNQVAKIVHQQLALKYNLVDSEVPYYRYVPDPVLENGHITLYWDRSIITDRTIVANKPDIVVIDRLERLAMIVDVTIPHDENLMKAEKDKQMKYLDLAHEVVDMWNIDSAIIVPIVVSAHGLIAKSLDQHLKRLALGSWIKNLMQKAVLLDTARIVRKFLSLEP

SEQ ID NO: 27348 - protein, 1199 aa, Eilema sororculum
MLTRAKARKLAHSTPSDSSCSSASQAPETTSPRPTTAEASSSDEYFSPPTSPTPVRRPGRGRPPSSLGSRGPPASSGAPATGGNVRRMKWTTSVNENVMRAYFVATAGGTNLTAYRVRMLPLFQELEPAVSVSAQRLSDQVRAIQRCHLLDDSVLERLLSDVQNSLATPTSSQAVLPVETSVVMSVSTPQLVHADEVEESETISVSTQYNERLRSALEDAMLEYRSMIPSNRPRLPHLPVHKRNIALVCALDSLLSNYLENSEDLGDTHSILYCAAVAVCRVAGVRFIVDKPVTRHRPAVPAWQYRIECRIAKARALIGKLICFRSGNTRPRVMRFVTQAFSGTNISPEQYASCVTERIDFLKQKVYAWANRIRRYKKRVDRYNQNRIFQKDERWVYRKWEQPELNVDDTARPDADATNTFWRSIWSTPVVHTEGDWIRGVQQACENIQIMEPITITSDDVSSAVRSLPNWKSAGPDGLHNFWLKWLRNSHACLASQFQSALDSGSLPNFLTTGLTHLLYKSGSAMDPKNYRPITCLPTVYKLLTSILRVKINSHLERNSIISISQNGCRRGARGTKELLIVDMTISQQVRRKRKNLATSWIDYKKAYDSVPHTWLLRVLELYKIDTTLAAFLRSCMGQWKTVLRYPGCYQTTDAPIRIERGIFQGDSLSPLWFCLALNPLSTILENSGLGYRLQREGRVISHLLYMDDLKLLAPNNAQLIELLKMTESFSSSIKMEFGLDKCAVMHVERGGIVESENLILSDSIKLKSLSSTETYKYLGMSQSLGIPEAGMKQALQERFFGRLKKVLKSFLSGGNKVRACNGWVMPVLMYSFGILRWTQTELDALDRRVRSLLTTFRMHHPRSSVMRLYIPRKLGGRGFLNVKTLHNREIYNLREYFLHANTDMHRDVVAVDNGFTPLALAKENWRKPIVLDTADRREVWMGKELHGRFYRALNGPDIDLKASVSWLRFGDLFGETEGFIFAITDEVVMTNNYRKYILKDGTVDICRACHRPGESLRHIISGCSRLANGEYLHRHNQVAKIVHQQLALKYNLVDSEVPYYRYVPDPVLENGRITLYWDRSIITDRTIVANKPDIVVIDRLERLAMIIDVTIPHDENLMKAEKDKQMKYLDLAHEVVDMWNIDSAIIVPIVVSAHGLIAKSLDQHLKRLALGSWIKNLMQKAVLLDTARIVRKFLSLEP

SEQ ID NO: 27349 - protein, 973 aa, Eilema depressum
MIPSSRPRLPHLPMHKRNIALVCALDSILPNYLENSEDLGDTHSILYCAAVAACRVAGVKFIVTKPATRPKHAVPAWQYRIECRIAEARALIGKLICFRSGNTRPRVMRFVTQAFSGTNVSPQLYASCVTERIDFLKQKVYAWANRIRRYKKRVDRYNQNRIFQKDERWVYRKWEQPESGVDDIARPDADATNTFWCSIWSTPVVHTEGDWIGEVEQACENIQIMEPVTITPDDVASAVRSLPNWKSPGPDGLHNFWLKWLRNSHACLATQFQSALDSGSLPNFVTTGITHLLHKSGSVTDPKNYRPITCLPTVYKLLTSILRVKINSHLEKNSVISIFQNGCRRGARGTKELLLVDMAISQQVRRKRRNLATSWIDYKKAYDSVPHTWLLRVLELYKIDTTLATFLRSCMGQWKTVLRYPGCCQTNDAPIRIERGIFQGDSLSPLWFCLALNPLSTILENSGLGYRLRREGRVISHLLYMDDIKLFAPNNTQLIELLKMTESFSSSIKMEFGLDKCAVMHVERGGIVESEGLILSDSIKLKSLSSTETYKYLGMSQALGIPEAGVKQALRERFFGRLKKVLKSFLSGGNKVRACNGWVMPVLMYSFGILRWTQTELDALDRKVRTLLTTFRMHHPRSSVMRLYIPRKLGGRGFLNIKNLHNREIYNLRQYCLQVNTDMHRDVVAVDNGLTPLALAKENWRKPVVLSTADRREVWMGKELHGRFYRALNGPDIDLKASVSWLRFGDLFGETEGFVFAITDEVVMTNNYRKYILKDGTVDICRACHRPGESLRHIISGCSRLANGEYLHRHNQVAKIVHQQLALKYNLVTSEVPYYRYVPDPVLENGRVTLYWDRSIITDRTIVANRPDIVVIDRLERLAMIVDVTIPHDENLMKAEKDKQIKYLDLAHEVVDMWNVDSAIIVPIVISAHGLIAKSLDQHLKRLSLGSWIKGLMQKAVLLDTARIVRRFLSLEP

SEQ ID NO: 27350 - protein, 1202 aa, Eilema depressum
MLTRAKAREIVQNAQTTPTDSSCSSASQPPDTISPRLATAEASSSDEYFSPPTTPTPVRRPGRGRPPASLGPRGPPASNRALATGGNVRRMAWTPSINENVMRAYYVATELGTNLTAYRGRLLSLFQELEPAVNVSAQRLSDQVRAIQRCNLLDGAVLERLFSDVQNSLAILTSSQAVPPVETSAPSRVSPPQLVYADEVEESETISVSTQYNELLRSTLEDAMLEYRSIIPSSRPRLPHLPMHKRNIALVCALDSILPNYLENSEDLGDTHSILYCAAVTACRVAGVKFIVDKPATRPKHAVPAWQYRIECRIAEARALIGKLICFRSGNTRPRVMRFVTQAFAGTNVCPQQYASCVTERIDFLKQKVYAWANRIRRYKKRVDRYNQNRIFQKDERWVYRKWEQPESGVDDVARPDADATNTFWCSIWSTPVVHTEGDWIGEVEQACENIQVMEPITITPDDVASAVRSLPNWKSPGPDGLHNFWLKWLRNSHACLATQFQSALDSGSLPSFVTTGITHLLHKSGSATDPKNYRPITCLPTVYKLLTSILRVKINSHLEKNSVISIFQNGCRKGARGTKELLIVDMAISQQVRRKRRNLATSWIDYKKAYDSVPHTWLLRVLELYKIDTTLATFLRSCMGQWKTVLRYPGCCQTNDAPIRIERGIFQGDSLSPLWFCLALNPLSTILENSGLGYRLRREGRVISHLLYMDDIKLFAPNNTQLIELLKMTESFSSSIKMEFGLDKCAVMHVERGGIVESEGLILSDSIKLKSLSSTETYKYLGMSQALGIPDAGVKQALRERFFGRLKKVLKSFLSGGNKVRACNGWVMPVLMYSFGILRWTQTELDALDRKVRTLLTTFRMHHPRSSVMRLYIPRKLGGRGFLNIKNLHNREIYNLRQYCLQVNTDMHRDVVAVDNGLTPLALAKENWRKPVVLSTADRREVWMGKELHGRFYRALNGPDIDLKASVSWLRFGDLFGETEGFVFAITDEVVMTNNYRKYILKDGTVDICRACHRPGESLRHIISGCSRLANGEYLHRHNQVAKIVHQQLALKYNLVSSEVPYYRYVPDPVLENGRVTLYWDRSVITDRTIVANKPDIVVIDRLERLAMIVDVTIPHDENLMKAEKDKQIKYLDLAHEVVDMWNVDSAIIVPIVISAHGLIAKSLDQHLKRLSLGSWIKGLMQKAVLLDTARIVRRFLSLEP

SEQ ID NO: 27351 - protein, 1199 aa, Eilema sororculum
MLTRAKARKLAHPTPSDSSCSSASQAPETTSPRPTTAEASSSDEYFSPPTSPTPVRRPGRGRPPSSLGSRGPPASSGAPATGGNVRRMKWTTSVNENVMRAYFVATAGGTNLTAYRVRMLPLFQELEPAVSVFAQRLSDQVRAIQRCHLLDDSVLERLLSDVQNSLATPTSSQAVLPVETSVVMSVSTPQLVHADEVEESETISVSTQYNERLRSALEDAMLEYRSMIPSNRPRLLHLPVHKRNIALVCALDSLLSNYLENSEDLGDTHSILYCAAVAVCRVAGVRFIVDKPVTRHRPAVPAWQYRIECRIAKARALIGKLICFRSGNTRPRVMRFVTQAFSGTNISPEQYASCVTERIDFLKQKVYAWANRIRRYKKRVDRYNQNRIFQKDERWVYRKWEQPELNVDDTARPDADATNTFWRSIWSTPVVHTEGDWIRGVEQACENIQIMEPITITSDDVSSAVRSLPNWKSAGPDGLHNFWLKWLRNSHACLASQFQSALDSGSLPNFLTTGLTHLLYKSGSAMDPKNYRPITCLPTVYKLLTSILRVKINSHLERNSIISISQNGCRRGARGTKELLIVDMTISQQVRRKRKNLATSWIDYKKAYDSVPHTWLLRVLELYKIDTTLAAFLRSCMGQWKTVLRYPGCYQTTDAPIRIERGIFQGDSLSPLWFCLALNPLSTILENSGLGYRLQREGRVISHLLYMDDLKLLAPNNAQLIELLKMTESFSSSIKMEFGLDKCAVMHVERGGIVESENLILSDSIKLKSLSSTETYKYLGMSQALEIPEAGMKQALQERFFGRLKKVLKSFLSGGNKVRACNGWVMPVLKMYSFGILRWTQTELDALDRRVRSLLTTFRMHHPRSSVMRLYIPRKLGGRGFLNVKTLHNREIYNLREYFLHANTDMHRDVVAVDGFTPLALAKENWRKPIVLDTADRREVWMGKELHGRFYRALNGPDIDLKASVSWLRFGDLFGETEGFIFAITDEVVMTNNYRKYVLKDGTVDICRACHRPGESLRHIISGCSRLANGEYLHRHNQVAKIVHQQLALKYNLVDSEVPYYRYVPDPVLENGRITLYWDRSIITDRTIVANKPDIVVIDRLERLAMIIDVTIPHDENLMKAEKDKQMKYLDLTHEVVDMWNIDSAIIVPIVVSAHGLIAKSLDQHLKRLALGSWIKNLMQRAVLLDTARIVRKFLSLEP

SEQ ID NO: 27352 - protein, 964 aa, Eilema depressum
MIPSSRPRLPHLPMHKRNIALVCALDSILPNYLENSEDLGDTHSILYCAAVAACRVAGVKFIVNKPATRPKHAVPAWQYRIECRIAEARALIGKLICFRSGNTRPRVMRFVTQAFSGTNVSPQLYASCVTERIDFLKQKVYAWANRIRRYKKRVDRYNQNRIFQKDERWVYRKWEQPESGVDDIARPDADATNTFWCSIWSTPVVHTEGDWIGEVEQACENIQIMEPVTITPDDVASAVRSLPNWKSPGPDGLHNFWLKWLRNSHACLATQFQSALDSGSLPNFVTTGITHLLHKSGSVTDPKNYRPITCLPTVYKLLTSILRVKINSHLEKNSVISIFQNGCRRGARGTKELLLVDMAISQQVRRKRRNLATSWIDYKKAYDSVPHTWLLRVLELYKIDTTLATFLRSCMGQWKTVLRYPGCCQTNDAPIRIERGIFQGDSLSPLWFCLALNPLSTILENSGLGYRLRREGRVISHLLYMDDIKLFAPNNTQLIELLKMTESFSSSIKMEFGLDKCAVMHVERGGIVESEGLILSDSIKLKSLSSTETYKYLGMSQALGIPEAGVKQALRERFFGRLKKVLKSFLSGGNKVRACNGWVMPVLMYSFGILRWTQTELDALDRKVRTLLTTFRMHHPRSSVMRLYIPRKLGGRGFLNIKNLHNREIYNLRQYCLQVNTDMHRDVVAVDNGLTPLALAKENWRKPVVLSTADRREVWMGKELHGRFYRALNGPDIDLKASVSWLRFGDLFGETEGFVFAITDEVVMTNNYRKYILKDGTVDICRACHRPGESLRHIISGCSRLANGEYLHRHNQVAKIVHQQLALKYNLVTSEVPYYNGRVTLYWDRSIITDRTIVANRPDIVVIDRLERLAMIVDVTIPHDENLMKAEKDKQIKYLDLAHEVVDMWNVDSAIIVPIVISAQGLIAKSLDQHLKRLSLGSWIKGLMQKAVLLDTARIVRRFLSLEP

SEQ ID NO: 27353 - protein, 1199 aa, Eilema sororculum
MLTRAKARKLAHPTPSDSSCSSASQAPETTSPRPTTAEASSSDEYFSPPTSPTPVRRPGRGRPPSSLGSRGPPASSGAPATGGNVRRMKWTTSVNENVMRAYFVATAGGTNLTAYRVRMLPLFQELEPAVSVSAQRLSDQVRAIQRCHLLDDSVLERLLSDVQNSLATPTSSQAVLPVETSVVMSVSTPQLVHADEVEESETISVSTQYNERLRSALEDAMLEYRSMIPSNRPRLPHLPVHKRNIALVCALDSLLSNYLENSEDLGDTHSILYCAAVAVCRVAGVRFIVDKPVTRHRPAVPAWQYRIECRIAKARALIGKLICFRSGNTRPRVMRFVTQAFSGTNISPEQYASCVTERIDFLKQKVYAWANRIRRYKKRVDRYNQNRIFQKDERWVYRKWEQPELNVDDTARPDADATNTFWRSIWSTPVVHTEGDWIGGVEQACENIQIMEPITITSDDVSSAVRSLPNWKSAGPDGLHNFWLKWLRSSHACLASQFQSALDSGSLPNFLTTGLTHLLYKSGSAMDPKNYRPITCLPTVYKLLTSILRVKINSHLERNSIISISQNGCRRGARGTKELLIVDMTISHQVRRKRNNLATSWIDYKKAYDSVPHTWLLRVLELYKIDTTLAAFLRSCMGQWKTVLRYPGCCQTTDAPIRIERGIFQGDSLSPLWFCLALNPLSTILENSGLGYRLQREGRVISHLLYMDDLKLLAPNNAQLIELLKMTESFSSSIKMEFGLDKCAVMHVERGGIVESENLILSDSIKLKSLSSTETYKYLGMSQALGIPEAGMKQALQERFFGRLKKVLKSFLSGGNKVRACNGWVMPVLMYSFGILRWTQTELDALDRRVRSLLTTFRMHHPRSSVMRLYIPRKLGGRGFLNVKTLHNREIYNLGEYFLHANTDMHRDVVAVDNGFTPLALAKENWRKPIVLDTADRREVWMGKELHGRFYRALNGPDIDLKASVSWLRFGDLFGETEGFIFAITDEVVMTNNYRRYILKDGTVDICRACHRPGESLRHIISGCSRLANGEYLHRHNQVAKIVHQQLALKYNLVDSEVPYYRYVPDPVLENGRITLYWDRSIITDRTIVANKPDIVVIDRLERLAMIIDVTIPHDENLMKAEKDKQMKYLDLAHEVVDMWNIDSAIIVPIVVSAHGLIAKSLDQHLKRLALGSWIKNLMQKAVLLDTARIVRKFLSLEP

SEQ ID NO: 27354 - protein, 866 aa, Eilema depressum
MRFVTQAFSGTNVSPQLYASCVTERIDFLKQKVYAWANRIRRYKKRVDRYNQNRIFQKDERWVYRKWEQPESGVDDIARPDADATNTFWCSIWSTPVVHTEGDWIGEVEQACENIQIMEPVTITPDDVASAVRSLPNWKSPGPDGLHNFWLKWLRNSHACLATQFQSALDSGSLPNFVTTGITHLLHKSGSVTDPKNYRPITCLPTVYKLLTSILRVKINSHLEKNSVISIFQNGCRRGARGTKELLLVDMAISQQVRRKRRNLATSWIDYKKAYDSVPHTWLLRVLELYKIDTTLATFLRSCMGQWKTVLRYPGCCQTNDAPIRIERGIFQGDSLSPLWFCLALNPLSTILENSGLGYRLRREGRVISHLLYMDDIKLFAPNNTQLIELLKMTESFSSSIKMEFGLDKCAVMHVERGGIVESEGLILSDSIKLKSLSSTETYKYLGMSQALGIPEAGVKQALRERFFGRLKKVLKSFLSGGNKVRACNGWVMPVLMYSFGILRWTQTELDALDRKVRTLLTTFRMHHPRSSVMRLYIPRKLGGRGFLNIKNLHNREIYNLRQYCLQANTDMHRDVVAVDNGLTPLALAKENWRKPVVLGTADRREVWMGKELHGRFYRALNGPDIDLKASVSWLRFGDLFGETEGFVFAITDEVIMTNNYRKYILKDGTVDICRACHRPGESLRHIISGCSRLANGEYLHRHNQVAKIVHQQLALKYNLVTSEVPYYRYVPDPVLENGRVTLYWDRSIITDRTIVANKPDIVVIDRLERLAMIVDITVPHDENLMKAEKDKQIKYLDLAHEVVDMWNVDTAIIVPIVISAHGLIAKSLDQHLKRLSLGSWIKGLMQKAVLLDTARIVRRFLSLEP

SEQ ID NO: 27355 - protein, 979 aa, Eilema depressum
MLEYRSMIPSSRPRLPRLPMHKCNIALVCALDSLLPNYLENSEDLGDTHSILYCAAVAACRVAGVKFIVNKPATRPKHAVPAWQYRIECRIAEARALIGKLICFRSGNTRPRVMRFVTQAFSGTHVSPQLYASCVTERIDFLKQKVYAWANRIRRYKKRVDRYNQNRIFQKDERWVYRKWEQPESGVDEIARPDADATNTFWCSIWSTPVVHTEGDWIREVEQACENIQIMEPITITPDDVASAVRSLPNWKSPGPDGLHNFWLKWLRNSHACLATQFQSALDSGSLPNFITTGITHLLHKSGSATDPKNYRPITCLPTVYKLLTSILRVKINTHLEKNSVISISQNGCRRGARGTKELLLVDMAISQQVRRKRRNLATSWIDYKKAYDSVPHTWLLRVLELYKIDTTLATFLRSCMGQWKTVLRYPGCCQINDAPIRIERGIFQGDSLSPLWFCLALNPLSTILENSGLGYRLQREGRVISHLLYMDDIKLFAPNNTQLMELLKMTESFSSSIKMEFGLDKCAVMHVERGGIVESEGLILSDSIKLKSLSSTETYKYLGMSQALGIPEAGVKQALRERFFGRLKKVLKSFLSGGNKVRACNGWVMPVLMYSFGILRWTQTELDALDRKVRTLLTTFRMHHPRSSVMRLYIPRKLGGRGFINIKNLHNREIYNLRQYCLQANTDMHRDVVAVDNGLTPLALAKENWRKPVVLSTADRRDVWMGKELHGRFYRALNGPDIDLKASVSWLRFGDLFGETEGFVFAITDKVVMTNNYRKYILKDGTVDICRACHRPGESLRHIISGCSRLANGEYLHRHNQVAKIVHQQLALKYNLVTSEVPYYRYVPDPVLENGRVTLYWDRSIITDRTIVANKPDIVVIDRLERLAMIVDVTIPHDENLMKAEKDKQIKYLDLAHEVVDMWNVDSAIIVPIVISAHGLIAKSLDQHLKRLSLGSWIKGLMQKAVLLDTARIVRRFLSLEP

SEQ ID NO: 27356 - protein, 1159 aa, Eilema depressum
MFVGYFSPPTTPTPVRRPGRGRPPASLGPRGLPASNRALATGGNVRRMAWTPAINENVMRAYYVATELGTNLTAYRGRLLSLFQELEPAVNVSAQRLSDQVRAIQRCNLLDGAVLERLFSDVQNSLAIPTLSQAVPPVETSAPTRVSSPQLGYADEVEESETISVSTQYNELLRSTLEDAILEYRSMIPSSRPRLPHLPMHKRNIALVCALDSILPNYLENSEDLGDTHSILYCAAVAACRVAGVKFIVTKPATRPKHAVPAWQYRIECRIAEARALIGKLICFRSGNTRPRVMRFVTQAFSGTNVSPQLYASCVTERIDFLKQKVYAWANRIRRYKKRVDRYNQNRIFQKDERWVYRKWEQPESGVDDIARPDADATNTFWCSIWSTPVVHTEGDWIGEVEQACENIQIMEPVTITPDDVASAVRSLPNWKSPGPDGLHNFWLKWLRNSHACLATQFQSALDSGSLPNFVTTGITHLLHKSGSVTDPKNYRPITCLPTVYKLLTSILRVKINSHLEKNSVISIFQNGCRRGARGTKELLLVDMAISQQVRRKRRNLATSWIDYKKAYDSVPHTWLLRVLELYKIDTTLATFLRSCMGQWKTVLRYPGCCQTNDAPIRIERGIFQGDSLSPLWFCLALNPLSTILENSGLGYRLRREGRVISHLLYMDDIKLFAPNNTQLIELLKMTESFSSSIKMEFGLDKCAVMHVERGGIVESEGLILSDSIKLKSLSSTETYKYLGMSQALGIPEAGVKQALRERFFGRLKKVLKSFLSGGNKVRACNGWVMPVLMYSFGILRWTQTELDALDRKVRTLLATFRMHHPRSSVMRLYIPRKLGGRGFLNIKNLHNREIYNLRQYCLQANTDMHRDVVAVDNGLTPLALAKENWRKPVVLGTADRREVWMGKELHGRFYRALNGPDIDLKASVSWLRFGDLFGETEGFVFAITDEVIMTNNYRKYILKDGTVDICRACHRPGESLRHIISGCSRLANGEYLHRHNQVAKIVHQQLALKYNLVTSEVPYYRYVPDPVLENGRVTLYWDRSIITDRTIVANKPDIVVIDRLERLAMIVDITVPHDENLMKAEKDKQIKYLDLAHEVVDMWNVDTAIIVPIVISAHGLIAKSLDQHLKRLSLGSWIKGLMQKAVLLDTARIVRRFLSLEP

SEQ ID NO: 27357 - protein, 1199 aa, Eilema sororculum
MLTRAKARKLAHPTPSDSSCSSASQAPETTSPRPTTAEASSSDEYFSPPTSPTPVRRPGRGRPPSSLGSRGPPASSGAPATGGNVRRMKWTTSVNENVMRAYFVATAGGTNLTAYRVRMLPLFQELEPAVSVSAQRFSDQVRAIQRCHLLDDSVLERLLSDVRNSLATPTSSQAVLPVETSVVMSVSTPQLVHADEVEESETISVSTQYNERLRSALEDAMLEYRSMIPSNRPRLPRLPVHKRNIALVCALDSLLSNYLENSEDLGDTHSILYCAAVAVCRVAGVRFIVDKPVTRHRPAVPAWQYRIECRIAKARALIGKLICFRSGNTRPRVMRFVTQAFSGTNISPEQYASCVTERIDFLKQKVYAWANRIRRYKKRVDRYNQNRIFQKDERWVYRKWEQPELNVDDTARPDADATNTFWRSIWSTPVVHTEGDWIRGVEQACENIQIMEPITITSDDVSSAVRSLPNWKSAGPDGLHNFWLKWLRNSHACLASQFQSALDSGSLPNFLTTGLTHLLYKSGSAMDPKNYRPITCLPTVYKLLTSILRVKINSHLERNSIISISQNGCRRGARGTKELLIVDMTISQQVRRKRKNLATSWIDYKKAYDSVPHTWLLRVLELYKIDTTLAAFLRSCMGQWKTVLRYPGCYQTTDAPIRIERGIFQGDSLSPLWFCLALNPLSTILENSGLGYRLQREGRVISHLLYMDDLKLLAPNNAQLIELLKMTESFSSSIKMEFGLDKCAVMHVERGGIVESENLILSDSIKLKSLSSTETYKYLGMSQSLGIPEAGMKQALQERFFGRLKKVLKSFLSGGNKVRACNGWVMPVLMYSFGILRWTQTELDALDRRVRSLLTTFRMHHPRSSVMRLYIPRKLGGRGFLNVKTLHNREIYNLREYFLHANTDMHRDVVAVDNGFTPLALAKENWRKPIVLDTADRREVWMGKELHGRFYRALNGPDIDLKASVSWLRFGDLFGETEGFIFAITDEVVMTNNYRKYILKDGTVDICRACHRPGESLRHIISGCSRLANGEYLHRHNQVAKIVHQQLALKYNLVDSEVPYYRYVPDPVLENGRITLYWDRSIITDRTIVANKPDIVVKDRLERLAMIIDVTIPHDENLMKAEKDKQMKYLDLAHEVVDMWNIDSAIIVPIVVSAHGLIAKSLDQHLKRLALGSWIKNLMQKAVLLDTARIVRKFLSLEP

SEQ ID NO: 27358 - protein, 1057 aa, Eilema depressum
MIIIIIITLFQELEPAVNVSAQRLSDQVRAIQRCNLLDGAVLERLFSDVQNSLAIPTSSQAVPPVETSAPTRVSPPQLVYADEVEESETISVSTQYNELLRSTLEDAMLEYRSMIPSSRPRLPRLPMHKRNIALVCALDSLLPNYLENSEDLGDTHSILYCAAVAACRVAGVKFIVNKPATRPKHAVPAWQYRIECRIAEARALIGKLICFRSGNTRPRVMRFVTQAFSGTNVSPQLYASCVTERIDFLKQKVYAWANRIRRYKKRVDRYNQNRVFQKDERWVYRKWEQPESGVDEIARPDADATNTFWCSIWSTPVVHTEGDWIREVEQACENIQIMEPITITPDDVASAARSLPNWKSPGPDGLHNFWLKWLRNSHACLATQFQSALDSGSLPNFITTGITHLLHKSGSATDPKNYRPITCLPTVYKLLTSILRVKINTHLEKNSVISISQNGCRRGARGTKELLLVDMAISQQVRRKRRNLATSWIDYKKAYDSVPHTWLLRVLELYKIDTTLATFLRSCMGQWKTVLRYPGCCQINDAPIRIERGIFQGDSLSPLWFCLALNPLSTILENSGLGYRLQREGRVISHLLYMDDIKLFAPNNTQLIELLKMTESFSSSIKMEFGLDKCAVMHVERGGIVESEGLILSDSIKLKSLSSTETYKYLGMSQALGIPEAGVKQALRERFFGRLKKVLKSFLSGGNKVRACNGWVMPVLMYSFGILRWTQTELDALDRKVRTLLTTFRMHHPRSSVMRLYIPRKLGGRGFINIKNLHNREIYNLRQYCLQANTDMHRDVVAVDNGLTPLALAKENWRKPVVLSTADRREVWMGKELHGRFYRALNGPDIDLKASVSWLRFGDLFGETEGFVFAITDEVVMTNNYRKYILKDGTVDICRACHRPGESLRHIISGCSRLANGEYLHRHNQVAKIVHQQLALKYNLVTSEVPYYWYVPDPVLENGRVTLYWDRSIITDRTIVANKPDIVVIDRLERLAMIVDVTIPHDENLMKAEKDKQIKYLDLAHEVVDMWNVDSAIIVPIVISAHGLIAKSLDQHLKINK

SEQ ID NO: 27359 - protein, 1199 aa, Eilema sororculum
MLTRAKARKLAHPTPSDSSCSSASQAPETTSPRPTTAEASSSDEYFSPPTSPTPVRRPGRGRPPSSLGSRGPPASSGAPATGGNVRRMKWTTSVNENVMRAYFVAIAGGTNLTAYRVRMLPLFQELEPAVSVSAQRLSDQVRAIQRCHLLDDSVLERLLSDVQNSLATPTSSQAVLPVKTSVVMSVSTPQLVHADEVEESETISVSTQYNERLRSALEDAMLEYRSMIPSNRPRLPHLPVHKRNIALVCALDSLLSNYLENSEDLGDTHSILYCAAVAVCRVAGVRFIVDKPVTRHRPAVPAWQYRIECRIAKARALIGKLICFRSGNTRPRVMRFVTQAFSGTNISPEQYASCVTERIDFLKQKVYAWANRIRRYKKRVDRYNQNRIFQKDERWVYRKWEQPELNVDDTARPDADATNTFWRSIWSTPVVHTEGDWIRGVEQACENIQIMEPITITSDDVSSAVRSLPNWKSAGPDGLHNFWLKWLRNSHACLASQFQSALDSGSLPNFLTTGLTHLLYKSGSAMDPKNYRPITCLPTVYKLLTSILRVIINSHLERNSIISISQNGCRRGARGTKELLIVDMTISQQVRRKRKNLAISWIDYKKAYDSVPHTWLLRVLELYKIDTTLAAFLRSCMGQWKTVLRYPGCYQTTDAPIRIERGIFQGDSLSPLWFCLALNPLSTILENSGLGYRLQREGRVISHLLYMDDLKLLAPNNAQLIELLKMTESFSSSLKMEFGLDKCAVMHVERGGIVESENLILSDSIKLKSLSSTETYKYLGMSQALGIPEAGMKQALQERFFGRLKKVLKSFLSGGNKVRACNGWVMPVLMYSFGILRWTQTELDALDRRVRSLLTTFRMHHPRSSVMRLYIPRKLGGRGFLNVKTLHNREIYNLREYFLHANTDMHRDVVAVDNGFTPLALAKENWRKPIVLDTADRREVWMGKELHGRFYRALNGPDIDLKAFVSWLRFGDLFGETEGFIFAITDEVVMTNNYRKYILKDGTVDICRACHRPGESLRHIISGCSRLANGEYLHRHNQVAKIVHQQLALKYNLVDSEVPYYRYVPDPVLENGRITLYWDRSIITDRTIVANKPDIVVIDRLERLAMIIDVTIPHDENLMKAEKDKQMKYLDLAHEVVDMWNIDSAIIVPIVVSAHGLIAKSLDQHLKRLALGSWIKNLMQKAVLLDSARIVRKFLSLEP

SEQ ID NO: 27360 - protein, 1202 aa, Eilema depressum
MLTRAKAREIVQNAQNTPTDSSCSSASQPPDTISPRLATAEASSSDEYFSPPTTPTPVRRPGRGRPPASLGPRGLPASNRALATGGNVRRMAWTPAINENVMRAYYVATELGTNLTAYRARLLSLFQELEPAVNVSAQRLSDQVRAIQRCNLLDGAVLERLFSDVQNSLAIPTSSQAVPPVETSAPTRVSSPQLVYADEVEESETISVSTQYNELLRSTLEDAILEYRSMIPSSRPRLPHLPMHKRNIALVCALDSILPNYLENSEDLGDTHSILYCAAVAACRVAGVKFIVTKPATRPKHAVPAWQYRIECRIAEARALIGKLICFRSGNTRPRVMRFVTQAFSGTNVSPQLYASCVTERIDFLKQKVYAWANRIRRYKKRVDRYNQNRIFQKDERWVYRKWEQPESGVDDIARPDADATNTFWCSIWSTPVVHTEGDWIGEVEQACENIQIMEPVTITPDDVASAVRSLPNWKSPGPDGLHNFWLKWLRNSHACLATQFQSALDSGSLPNFVTTGITHLLHKSGSVTDPKNYRPITCLPTVYKLLTSILRVKINSHLEKNSVISIFQNGCRRGARGTKELLLVDMAISQQVRRKSRNLATSWIDYKKAYDSVPHTWLLKVLELYKIDTTLATFLRSCMGQWKTVLRYPGCCQTNDAPIRIERGIFQGDSLSPLWFCLALNPLSTILENSGLGYRLRREGRVISHLLYMDDIKLFAPNNTQLIELLKMTESFSSSIKMEFGLDKCAVMHVERGGIVESEGLILSDSIKLKSLSSTETYKYLGMSQALGIPEAGVKQALRERFFGRLKKVLKSFLSGGNKVRACNGWVMPVLMYSFGILRWTQTELDALDRKVRTLLTTFRMHHPRSSVMRLYIPRKLGGRGFLNIKNLHNREIYNLRQYCLQVNTDMHRDVVAVDNGLTPLALAKENWRKPVVLSTADRREVWMGKELHGRFYRALNGPDIDLKASVSWLRFGDLFGETEGFVFAITDEVVMTNNYRKYILKDGTVDICRACHRPGESLRHIISGCSRLANGEYLHRHNQVAKIVHQQLALKYNLVTSEVPYYRYVPDPVLENGRVTLYWDRSIITDRTIVANRPDIVVIDRLERLAMIVDVTIPHDENLMKAEKDKQIKYLDLAHEVVDMWNVDSAIIVPIVISAHGLIAKSLDQHLKRLSLGSWIKGLMQKAVLLDTARIVRRFLSLEP

SEQ ID NO: 27361 - protein, 1202 aa, Eilema depressum
MLTRAKAREIVQNAQNTPTDSSCSSASQPPDTISPRLATAEASSSDEYFSPPTTPTPVRRPGRGRPPASLGPRDQPASNRALATGGNVRRMAWTPAINENVMRAYYVATELGTNLTAYRARLLSLFQELEPAVNVSAQRLSDQVRAIQRCNLLDGAVLERLFSDVQNSLAIPTSSQAVPPVETSAPTRVSSPQLVYADEVEESETIPVSTQYNELLRSTLEDAILEYRSMIPSSRPRLPHLPMHKRNIALVCALDSILPNYLENSEDLGDTHSILYCAAVAACRVAGVKFIVTKPATRPKHAVPAWQYRIECRIAEARALIGKLICFRSGNTRPRVMRFVTQAFSGTNVSPQLYASCVTERIDFLKQKVYAWANRIRRYKKRVDRYNQNRIFQKDERWVYRKWEQPESGVDDIARPDADATNTFWCSIWSTPVVHTEGDWIGEVEQACENIQIMEPVTITPDDVASAVRSLPNWKSPGPDGLHNFWLKWLRNSHACLATQFQSALDSGSLPNFVTTGITHLLHKSGSVTDPKNYRPITCLPTVYKLLTSILRVKINSHLEKNSVISIFQNGCRRGARGTKELLLVDMAISQQVRRKRRNLATSWIDYKKAYDSVPHTWLLRVLELYKIDTTLATFLRSCMGQWKTVLRYPGCCQTNDAPIRIERGIFQGDSLSPLWFCLALNPLSTILENSGLGYRLRREGRVISHLLYMDDIKLFAPNNTQLIELLKMTESFSSSIKMEFGLDKCAVMHVERGGIVESEGLILSDSIKLKSLSSTETYKYLGMSQALGIPEAGVKQALRERFFGRLKKVLKSFLSGGNKVRACNGWVMPVLMYSFGILRWTQTELDALDRKVRTLLTTFRMHHPRSSVMRLYIPRKLGGRGFLNIKNLHNREIYNLRQYCLQVNTDMHRDVVAVDNGLTPLALAKENWRKPVVLSTADRREIWMGKELHGRFYRALNGPDIDLKASVSWLRFGDLFGETEGFVFAITDEVVMTNNYRKYILKDGTVDICRACHRPGESLRHIISGCSRLANGEYLHRHNQVAKIVHQQLALKYNLVTSEVPYYRYVPDPVLENGRVTLYWDRSIITDRTIVANRPDIVVIDRLERLAMIVDVTIPHDENLMKAEKDKQIKYLDLAHEVVDMWNVDSAIIVPIVISAHGLIAKSLDQHLKRLSLGSWIKGLMQKAVLLDTARIVRRFLSLEP

SEQ ID NO: 27362 - protein, 1202 aa, Eilema depressum
MLTRAKARQLVQNAQTTPTDSSCSFASQPPDAISPRLATAEASSSDEYFSPPTSPTPVRRPGRGRPPASLGPRGLPASNRALATGGNVRRMAWTPAINENVMRAYYVATELGTNLTAYRGRLLSLFQELEPAVNVSAQRLSDQVRAIQRCNLLDGAVLERLFSDVQNSLAIPTSSQAVPPVETSAPTRVSPPQLVYADEVEESETISVSTQYNELLRSTLEDAMLEYRSMIPSSRPRLPRLPMHKRNIALVCALDSLLPNYLENSEDLVDTHSILYCAAVAACRVAGVKFIVNKPATRPKHAVPAWQYRIECRIAEARALIGKLICFRSGNTRPRVMRFVTQAFSGTNVSPQLYASCVTERIDFLKQKVYAWANRIRRYKKRVDRYNQNRIFQKDERWVYRKWEQPESGVDEIARPDADATNTFWCSIWSTPVVHTEGDWIREVEQACENIQIMEPITITPDDVASAVRSLPNWKSPGPDGLHNFWLKWLRNSHACLATQFQSALDSGSLPNFITTGITHLLHKSGSATDPKNYRPITCLPTVYKLLTSILRVKINTHLEKNSVISISQNGCRRGARGTKELLLVDMAISQQVRRKRRNLATSWIDYKKAYDSVPHTWLLRVLELYKIDTTLATFLRSCMGQWKTVLRYPGCCQINDAPIRIERGIFQGDSLSPLWFCLALNPLSTILENSGLGYRLQREGRVISHLLYMDDIKLFAPNNTQLIELLKMTESFSSSIKMEFGLDKCAVMHVERGGIVESEGLILSDSIKLKSLSSTETYKYLGMSQALGIPEAGVKQALRERFFGRLKKVLKSFLSGGNKVRACNGWVMPVLMYSFGILRWTQTELDALNRKVRTLLTTFRMHHPRSSVMRLYIPRKLGGRGFINIKNLHNREIYNLRQYCLQANTDMHRDVVAVDNGLTPLALAKENWRKPVVLSTADRRDVWMGKELHGRFYRALNGPDIDLKASVSWLRFGDLFGETEGFVFAITDEVVMTNNYRKYILKDGTVDICRACHRPGESLRHIISGCSRLANGEYLHRHNQVAKIVHQQLALKYNLVTSEVPYYRYVPDPVLENGRVTLYWDRSIITDRTIVANKPDIVVIDRLERLAMIVDVTIPHDENLMKAEKDKQIKYLDLAHEVVDMWNVDSGIIVPIVISAHGLIAKSLDQHLKRLALGSWIKGLMQKAVLLDTARIVRRFLSLEP

SEQ ID NO: 27363 - protein, 866 aa, Eilema depressum
MRFVTQAFSGTNVSPQLYASCVTERIDFLKQKVYAWANRIRRYKKRVDRYNQNRIFQKDERWVYRKWEQPESGVDDIARPDADATNTFWCSIWSTPVVHTEGDWIGEVEQACENIQIMEPVTITPDDVACAVRSLPNWKSPGPDGLHNFWLKWLRNSHACLATQFQSALDSGSLPNFVTTGITHLLHKSGSVTDPKNYRPITCLPTVYKLLTSILRVKINSHLEKNSVISIFQNGCRRGARGTKELLLVDMAISQQVRRKRRNLATSWIDYKKAYDSVPHTWLLRVLELYKIDTTLATFLRSCMGQWKTVLRYPGCYQTNDAPIRIERGIFQGDSLSPLWFCLALNPLSTILENSGLGYRLRREGRVISHLLYMDDIKLFAPNNTQLIELLKMTESFSSSIKMEFGLDKCAVMHVERGGIVESEGLILSDSIKLKSLSSTETYKYLGMSQALGIPEAGVKQALRERFFGRLKKVLKSFLSGGNKVRACNGWVMPVLMYSFGILRWTQTELDALDRKVRTLLTTFRMHHPRSSVMRLYIPRKLGGRGFLNIKNLHNREIYNLRQYCLQANTDMHRDVVAVDNGLTPLALAKENWRKPVVLGTADRREVWMGKELHGRFYRALNGPDIDLKASVSWLRSGDLFGETEGFVFAITDEVIMTNNYRKYILKDGTVDICRACHRPGESLRHIISGCSRLANGEYLHRHNQVAKIVHQQLALKYNLVTSEVPYYRYVPDPVLENGRVTLYWDRSIITDRTIVANKPDIVVIDRLERLAMIVDITVPHDENLMKAEKDKQIKYLDLAHEVVDMWNVDTAIIVPIVISAHGLIAKSLDQHLKRLSLGSWIKGLMQKAVLLDTARIVRRFLSLEP

SEQ ID NO: 27364 - protein, 973 aa, Eilema depressum
MIPSSRPRLPHLPMHKRNIALVCALDSILPNYLENSEDLGDTHSILYCAAVAACRVAGVKFIVTKPATRPKHAVPAWQYRIECRIAEARALIGKLICFRSGNTRPRVMRFVTQAFSGTNVSPQLYASCVTERIDFLKQKVYAWANRIRRYKKRVDRYNQNRIFQKDERWVYRKWEQPESGVDDIARPDADATNTFWCSIWSTPVVHTEGDWIGEVEQACENIQIMEPVTITPDDVASAVRSLPNWKSPGPDGLHNFWLKWLRNSHACLATQFQSALDSGSLPNFVTTGITHLLHKSGSVTDPKNYRPITCLPTVYKLLTSILRVKINSHLEKNSVISIFQNGCRRGARGTKELLLVDMAISQQVRRKRRNLATSWIDYKKAYDSVPHTWLLRVLELYKIDTTLATFLRSCMGQWKTVLRYPGCCQTNDAPIRIERGIFQGDSLSPLWFCLALNPLSTILENSGLGYRLRREGRVISHLLYMDDIKLFAPNNTQLIELLKMTESFSSSIKMEFGLDKCAVMHVERGGIVESEGLILSDSIKLKSLSSTETYKYLGMSQALGIPEAGVKQALRERFFGRLKKVLKSFLSGGNKVRACNGWVMPVLMYSFGILRWTQTELDALDRKVRTLLTTFRMHHPRSSVMRLYIPRKLGGRGFLNIKNLHNREIYNLRQYCLQANTDMHRDVVAVDNGLTPLALAKENWHKPVVLGTADRREVWMGKELHGRFYRALNGPDIDLKASVSWLRFGDLFGETEGFVFAITDEVIMTKNYRKYILKDGTVDICRACHRPGESLRHIISGCSRLANGEYLHRHNQVAKIVHQQLALKYNLVTSEVPYYRYVPDPVLENGRVTLYWDRSIITDRTIVANKPDIVVIDRLERLAMIVDITVPHDENLMKAEKDKQIKYLDLAHEVVDMWNVDTAIIVPIVISAHGLIAKSLDQHLKRLSLGSWIKGLMQKAVLLDTARIVRRFLSLEP

SEQ ID NO: 27365 - protein, 1199 aa, Eilema sororculum
MLTRAKARKLAHPTPSDSSCSSASQAPETTSPRPTTAEASSSDEYFSPPTSPTPVRRPGRGRPPSSLGSRGPPASSGAPATGGNVRRMKWTMSVNENVMRAYFVATAGGTNLTAYRVRMLPLFQELEPAVSVSAQRLSDQVRAIQRCHLLDDSVLERLLSDVRNSLATPTSSQAVLPVETSVVMSVSTPQLVHADEVEECETISVSTQYNERLRSALEDAMLEYRSMIPSNRPRLPRLPVHKRNIALVCALDSLLSNYLENSEDLGDTHSILYCAAVAVCRVAGVRFIVDKPVTRHRPAVPAWQYRIECRIAKARALIGKLICFRSGNTRPRVMRFVTQAFSGTNISPEQYASCVTERIDFLKQKVYAWANRIRRYKKRVDRYNQNRIFQKDERWVYRKWEQPELNVDDTARPDADATNTFWRSIWSTPVVHTEGDWIRGVEQACENIQIMEPITITSDDVSSAVRSLPNWKSAGPDGLHNFWLKWLRNSHACLASQFQSALDSGSLPNFLTTGLTHLLYKSGSAMDPKNYRPITCLPTVYKLLTSILRVKINSHLERNSIISISQNGCRRGARGTKELLIVDMTISQQVRRKRKNLATSWIDYKKAYDSVPHTWLLRVLELYKIDTTLAAFLRSCMGQWKTVLRYPGCYQTTDAPIRIERGIFQGDSLSPLWFCLALNPLSTILENSGLGYRLQREGRVISHLLYMDDLKLLAPNNAQLIELLKMTESFSSSIKMEFGLDKCAVMHVERGGIVESENLILSDSIKLKSLSSTETYKYLGMSQSLGIPEAGMKQALQERFFGRLKKVLKSFLSGGNKVRACNGWVMPVLMYSFGILRWTQTELDALDRRVRSLLTTFRMHHPRSSVMRLYIPRKLGGRGFLNVKTLHNREIYNLREYFLHANTDMHRDVVAVDNGFTPLALAKENWRKPIVLDTADRREVWMGKELHGRFYRALNGPDIDLKASVSWLRFGDLFGETEGFIFAITDEVVMTNNYRKYILKDGTVDICRACHRPGESLRHIISGCSRLANGEYLHRHNQVAKIVHQQLALKYNLVDSEVPYYRYVPDPVLENGRITLYWDRSIITDRTIVANKPDIVVIDRLERLAMIIDVTISHDENLMKAEKDKQMKYLDLAHEVVDMWNIDSAIIVPIVVSAHGLIAKSLDQHLKRLALGSWIKNLMQKAVLLDTARIVRKFLSLEP

SEQ ID NO: 27366 - protein, 1202 aa, Eilema depressum
MLTRAKAREIVQNAQNTPTDSSCSSASQPPDTISPRLATAEASSSDEYFSPPTTPTPVRRPGRGRPPASLGPRGLPASNRALATGGNVRRMAWTPAINENVMRAYYVATELGTNLTAYRGRLLSLFQELEPAVNVSAQRLSDQVRAIQRCNLLDGAVLERLFSDVQNSLAIPTSSQAVPPVETSAPTRVSSPQLGYADEVEESETISVSTQYNELLRSTLEDAILEYRSMIPSSRPRLPHLPMHKRNIALVCALDSILPNYLENSEDLGDTHSILYCAAVAACRVAGVKFIVTKPATRPKHAVPAWQYRIECRIAEARALIGKLICFRSGNTRPRVMRFVTQAFSGTNVSPQLYASCVTERIDFLKQKVYAWANRIRRYKKRVDRYNQNRIFQKDERWVYRKWEQPESGVDDIARPDADATNTFWCSIWSTPVVHTEGDWIGGVEQACENIQIMEPVTITPDDVASAVRSLPNWKSPGPDGLHNFWLKWLRNSHACLATQFQSALDSGSLPNFVTTGITHLLHKSGSVTDPKNYRPITCLPTVYKLLTSILRVKINSHLEKNSVISIFQNGCRRGARGTKELLLVDMAISQQVRRKRRNLATSWIDYKKAYDSVPHTWLLRVLELYKIDTTLATFLRSCMGQWKTVLRYPGCCQTNDAPIRIERGIFQGDSLSPLWFCLALNPLSTILENSGLGYRLRREGRVISHLLYMDDIKLFAPNNTQLIELLKMTESFSSSIKMEFGLDKCAVMHVERGGIVESEGLILSDSIKLKSLSSTETYKYLGMSQALGIPEAGVKQALRERFFGRLKKVLKSFLSGGNKVRACNGWVMPVLMYSFGILRWTQTELDALDRKVRTLLTTFRMHHPRSSVMRLYIPRKLGGRGFLNIKNLHNREIYNLRQYCLQANTDMHRDVVAVDNGLTPLALAKENWRKPVVLGTADRREVWMGKELHGRFYRALNGPDIDLKASVSWLRFGDLFGETEGFVFAITDEVIMTNNYRKYILKDGTVDICRACHRPGESLRHIISGCSRLANGEYLHRHNQVAKIVHQQLALKYNLVTSEVPYYRYVPDPVLENGRVTLYWDRSIITDRTIVANKPDIVVIDRLERLAMIVDITVPHDENLMKAEKDKQIKYLDLAHEVVDMWNVDTAIIVPIVISAHGLIAKSLDQHLKRLSLGSWIKGLMQKAVLLDTARIVRRFLSLEP

SEQ ID NO: 27367 - protein, 1091 aa, Eilema sororculum
MLTRAKARKFAHPTPSESSCSSASQAPETTSPKPTTAEASSSDEYFSPPTSPTPVRRPGRGRPPSSLGSRSPPASNRAPATGGNVRRMKWTTSINENVMRAYFVATAGGTNLTAYRVRMLPLFQELEPAVSVSAQRLSDQVRAIQRCHLLDDSILERLLCDVQNSLTTPTSSQAVLPVETSAVMSVSTPQLVHADEVEESETISVSTQYNERLRSALEDAMLEYRSMIPSNRPRLPHLPVHKRNIALVCALDSLLSNYLENSEDLGDTHSILYCAAVAVCRVAGVRFIVDKPVTRHRPAVPAWQYRIECRIAKARALIGKLICFRSGNTRPRVMRFVTQAFSGTNISPEQYASCVTERIDFLKQKVYAWENRIRRYKKRVDRYNQSRIFQKDERWVYRKWEQPELNVDDTARPDADATNTFWRSIWSTPVVHTEGDWIRGVEQACENIPIMEPITITSDDVSSAVRSLPNWKSAGPDGLHNFWLKWLRNSHACLASQFQSALDSGSLPNFLTTGLTHLLYKSGSALDPKNYRPITCLPTVYKLLTSILRVKINSHLERNSIISISQNGCRRGARGTKELLLVDMTISQQVRRKRKNLATSWIDYKKAYDSVPHTWLLRVLELYKIDTTLAAFLRSCMGQWKTVLRYPGCCQTTDAPIRIERCIFQGDSLSPLWFCLALNPLSTILENSGLGYRLQREGRVISHLLYMDDLKLLAPNNAQLIELLKMTESFSSSIKMEFGLDKCAVMHVERGGIVESENMILSDSIKLKSLSSTETYKYLGMSQALGIPEAGMKQALRERFFGRLKKVLKSFLSGGNKVRACNGWVMPVLMYSFGILRWTQTELDALDRRVRSLLTTFRMHHPRSSVMRLYIPRKLGGRGFLNVKTLHNREIYNLREYFLHANTDMHRDVVAVDNGFTPLALAKENWRKPIVLSTADRREVWMGKELPGRFYRALNGPDIDLKASVSWLRCGDIFGETEGFIFAITDEVVMTNNYRKYILRDGTVDICRACHRPGESLRHIISGCSRLANGEYLHRHNQVAKIVHQQLALKYNLVDSEVPYYRYVPDPVLENGHITLYWDRSFITDSSLADC

SEQ ID NO: 27368 - protein, 1202 aa, Eilema depressum
MLTRAKAREIVQNAQNTPTDSSCSSASQPPDTISPRLATAEASSSDEYFSPPTTPTPVRRPGRGRPPASLGPRGLPASNRALATGGNVRRMAWTPAINENVMRAYYVATELGTNLTAYRGRLLSLFQELEPAVNVSAQRLSDQVRAIQRCNLLDGAVLERLFSDVQNSLAIPTSSQAVPPVETSAPTRVSSPQLGYADEVEESETISVSTQYNELLRSTLEDAILEYRSMIPSSRPRLPHLPMHKRNIALVCALDSILPNYLENSEDLGDTHSILYCAAVAACRVAGVKFIVTKPATRPKHAVPAWQYRIECRIAEARALIGKLICFRSGNTRPRVMRFVTQAFSGTNVSPQLYASCVTERIDFLKQKVYAWANRIRRYKKRVDRYNQNRIFQKDERWVYRKWEQPESGVDDIARPDADATNTFWCSIWSTPVVHTEGDWIGEVEQACENIQIMEPVTITPDDVASAVRSLPNWKSPGPDGLHNFWLKWLRNSHACLATQFQSALDSGSLPNFVTTGITHLLHKSGSVTDPKNYRPITCLPTVYKLLTSILRVKINSHLEKNSVISIFQNGCRRGARGTKELLLVDMAISQQVRRKRRNLATSWIDYKKAYDSVPHTWLLRVLELYKIDTTLATFLRSCMGQWKTVLRYPGCCQTNDAPIRIERGIFQGDSLSPLWFCLALNPLSTILENSGLGYRLRREGRVISHLLYMDDIKLFAPNNTQLIELLKMTESFSSSIKMEFGLDKCAVMHVERGGIVESEGLILSDSIKLKSLSSTETYKYLGMSQALGIPEAGVKQALRERFFGRLKKVLKSFLSGGNKVRACNGWVMPVLMYSFGILRWTQTELDALDRKVRTLLTTFRMHHPRSSVMRLYIPRKLGGRGFLNIKNLHNREIYNLRQYCLQANTDMHRDVVAVDNGLTPLALAKENWRKPVVLGTADRREVWMGKELHGRFYRALNGPDIDLKASVSWLRFGDLFGETEGFVFAITDEVIMTNNYRKYILKDGTVDICRACHRPGESLRHIISGCSRLANGEYLHRHNQVAKIVHQQLALKYNLVTSEVPYYRYVPDPVLENGRVTLYWDRSIITDRTIVANKPDIVVMDRLERLAMIVDITVPHDENLMKAEKDKQIKYLDLAHEVVDMWNVDTAIIVPIVISAHGLIAKSLDQHLKRLSLGSWIKGLMQKAVLLDTARIVRRFLSLEP

SEQ ID NO: 27369 - protein, 1199 aa, Eilema sororculum
MLTRAKARKFAHPTPSDSSCSSASQAPETTSPKPTTAEASSSDEYFSPPTSPTPVRRPGRGRPPSSLGSRGPPASNRAPATGGNVRRMKWTTSINENVMRAYFVATAGGTNLTAYRVRMLPLFQELEPAVSVSAQRLSDQVRAIQRCHLLDDSVLERLLCDVQNSLATPTSSQAVLPVETSVVMSVSTPQLVHADEVEESETISVSTQYNERLRSALEDAMLEYRSMIPSNRPRLPHLPVHKRNIALVCALDSLLSNYLENSEDLGDTHSILYCAAVAVCRVAGVRFIVDKPVTRHRPAVPAWQYRIECRIAKARALIGKLICFRSGNTRPRVMRFVTQAFSGTNISPEQYASCVTERIDFLKQKVYAWANRIRRYKKRVDRYNQNRIFQKDERWVYRKWEQPELNVDDTARPDADATNTFWRSIWSTPVVHTEGDWIRGVEQACENIPIMEPITLTSDDVSSAVRSLPNWKSAGPDGLHNFWLKWLRNSHACLASQFQSALDSGSLPNFLTTGLTHLLYKSGSALDPKNYRPITCLPTVYKLLTSILRVKINSHLERNSIISISQNGCRRGARGTKELLLIDMTISQQVRRKRKNLATSWIDYKKAYDSVPHTWLLRVLELYKIDTTLAAFLRSCMGQWKTVLRYPGCCQTTDAPIRIERGIFQGDSLSPLWFCLALNPLSTILENSGLGYRLQREGRVISHLLYMDDLKLLAPNNAQLIELLKMTESFSSSIKMEFGLDKCAVMHVERGGIVESENMILSDSIKLKSLSSTETYKYLGMSQALGIPEAGMKQALRERFFGRLKKVLKSFLSGGNKVRACNGWVMPVLMYSFGILRWTQTELDALDRRVRSLLTTFRMHHPRSSVMRLYIPRKLGGRGFLNFKTLHNREIYNLREYFLHANTDMHRDVVAVDNGFTPLALAKENWRKPIVLSTADRREVWMGKELHGRFYRALNGPDIDLKASVSWLRFGDIFGETEGFIFAITDEVVMTNNYRKYILRDGTVDICRACHRPGESLRHIISGCSRLANGEYLHRHNQVAKIVHQQLALKYNLVDSEVPYYRYVPDPVLENGHITLYWDRSIITDRTIVANKPDIVVIDRLERLAMIVDVTIPHDENLIKAEKDKQMKYLDLAHEVVDMWNIDSAIIVPIVVSAHGLIAKSLDQHLKRLALGSWIKNLMQKAVLLDTARIVRRFLSLEP

SEQ ID NO: 27370 - protein, 1202 aa, Eilema depressum
MLTRAKAREIVQNAQNTPTDSSCSSASQPPDTISPRLATAEASSSDEYFSPPTTPTPVRRPGRGRPPASLGPRGLPASNRALATGGNVRRMAWTPAINENVMRAYYVATELGTNLTAYRARLLSLFQELEPAVNVSAQRLSDQVRAIQRCNLLDGAVLERLFSDVQNSLAIPTSSQAVPPVETSAPTRVSSPQLVYADEVEESETISVSTQYNELLRSTLEDAILEYRSMIPSSRPRLPHLPMHKRNIALVCALDSILPNYLENSEDLGDTHSILYCAAVAACRVAGVKFIVTKPATRPKHAVPAWQYRIECRIAEARALIGKLICFRSGNTRPRVMRFVTQAFSGTNVSPQLYASCVTERIDFLKQKVYAWANRIRRYKKRVDRYNQNRIFQKDERWVYRKWEQPESGVDDIARPDADATNTFWCSIWSTPVVHTEGDWIGEVEQACENIQIMEPVTITPDDVASAVRSLPNWKSPGPDGLHNFWLKWLRNSHACLATQFQSALDSGSLPNFVTTGITHLLHKSGSVTDPKNYRPITCLPTVYKLLTSILRVKINSHLEKNSVISIFQNGCRRGARGTKELLLVDMAISQQVRRKRRNLATSWIDYKKAYDSVPHTWLLRVLELYKIDTTLATFLRSCMGQWKTVLRYPGCCQTNDAPIRIERGIFQGDSLSPLWFCLALNPLSTILENSGLGYRLRREGRVISHLLYMDDIKLFAPNNTQLIELLKMTESFSSSIKMEFGLDKCAVMHVERGGIVESEGLILSDSIKLKSLSSTETYKYLGMSQALGIPEAGVKQALRERFFGRLKKVLKSFLSGGNKVRACNGWVMPVLMYSFGILRWTQTELDALDRKVRTLLTTFRMHHPRSSVMRLYIPRKLGGRGFLNIKNLHNREIYNLRQYCLQVNTDMHRDVVAVDNGLTPLALAKENWRKPVVLSTADRREVWMGKELHGRFYRALNGPDIDLKASVSWLRFGDLFGETEGFVFAITDEVVMTNNYRKYILKDGTVDICRACHRPGESLRHIISGCSRLANGEYLHRHNQVAKIVHQQLALKYNLVTSEVPYYRYVPDPVLENGRVTLYWDRSIITDRTIVANRPDIVVIDRLERLAMIVDVTIPHDENLMKAEKDKQIKYLDLAHEVVDMWNVDSAIIVPIVISAHGLIAKSLDQHLKRLSLGSWIKGLMQKAVLLDTARIVRRFLSLEP

SEQ ID NO: 27371 - protein, 866 aa, Eilema depressum
MRFVTQAFSGTNVSPQLYASCVTERIDFLKQKVYAWANRIRRYKKRVDRYNQNRIFQKDERWVYRKWEQPESGVDDIARPDADATNTFWCSIWSTPVVHTEGDWIGEVEQACENIQIMEPVTITPDDVASAVRSLPNWKSPGPDGLHNFWLKWLRNSHACLATQFQSALDSGSLPNFVTTGITHLLHKSGSVTDPKNYRPITCLPTVYKLLTSILRVKINSHLEKNSVISIFQNGCRRGARGTKELLLVDMAISQQVRRKRRNLATSWIDYKKAYDSVPHTWLLRVLELYKIDTTLATFLRSCMGQWKTVLRYPGCCQTNDAPIRIERGIFQGDSLSPLWFCLALNPLSTILENSGLGYRLRREGRVISHLLYMDDIKLFAPNNTQLIELLKMTESFSSSIKMEFGLDKCAVMHVERGGIVESEGLILSDSIKLKSLSSTETYKYLGMSQALGIPEAGVKQALRERFFGRLKKVLKSFLSGGNKVRACNGWVMPVLMYSFGILRWTQTELDALDRKVRTLLTTFRMHHPRSSVMRLYIPRKLGGRGFLNIKNLHNREIYNLRQYCLQVNTDMHRDVVAVDNGLTPLALAKENWRKPVVLSTADRREVWMGKELHGRFYRALNGPDIDLKASVSWLRFGDLFGETEGFVFAITDEVVMTNNYRKYILKDGTVDICRACHRPGESLRHIISGCSRLANGEYLHRHNQVAKIVHQQLALKYNLVTSEVPYYRYVPDPVLENGRVTLYWDRSIITDRTIVANRPDIVVIDRLERLAMIVDVTIPHDENLMKAEKDKQIKYLDLAHEVVDMWNVDSAIIVPIVISAHGLIAKSLDQHLKRLSLGSWIKGLMQKAVLLDTARIVRRFLSLEP

SEQ ID NO: 27372 - protein, 1199 aa, Eilema sororculum
MLTRAKARKLAHPTPSDSSCSSASQAPETTSPRPTTAEASSSDEYFSPPTSPTPVRRPGRGRPPSSLGSRGPPASSGAPATGGNVRRMKWTTSVNENVMRAYFVATAGGTNLTAYRVRMLPLFQELEPAVSVSAQRLSDQVRAIQRCHLLDDSVLERLLSDVRNSLATPTSSQAVLPVETSVVMSVSTPQLVHADEVEESETISVSTQYNERLRSALEDAMLEYRSMIPSNRPRLPRLPVHKRNIALVCALDSLLSNYLENSEDLGDTHSILYCAAVAVCRVAGVRFIVDKPVTRHRPAVPAWQYRIECRIAKARALIGKLICFRSGNTRPRVMRFVTQAFSGTNISPEQYASCVTERIDFLKQKVYAWANRIRRYKKRVDRYNQNRIFQKDERWVYRKWEQPELNVDDTARPDADATNTFWRSIWSTPVVHTEGDWIGGVEQACENIQIMEPITITSDDVSSAVRSLPNWKSAGPDGLHNFWLKWLRNSHACLASQFQSALDSGSLPNFLTTGLTHLLYKSGSAMDPKNYRPITCLPTVYKLLTSILRVKINSHLERNSIISISQNGCRRGARGTKELLIVDMTISQQVRRKCKNLATSWIDYKKAYDSVPHTWLLRVLELYKIDTTLAAFLRSCMGQWKTVLRYPGCYQTTDAPIRIERGIFQGDSLSPLWFCLALNPLSTILENSGLGYRLQREGRVISHLLYMDDLKLLAPNNAQLIELLKMTESFSSSIKMEFGLDKCAVMHVERGGIVESENLILSDSIKLKSLSSTETYKYLGMSQSLGIPEAGMKQALQERFFGRLKKVLKSFLSGGNKVRACNGWVMPVLMYSFGMLRWTQTELDALDRRVRSLLTTFRMHHPRSSLMRLYIPRKLGGRGFLNVKTLHNREIYNLREYFLHANTDMHRDVVAVDNGFTPLALAKENWRKPIVLDTADRREVWMGKELHGRFYRALNGPDIDLKASVSWLRFGDLFGETEGFIFAITDEVVMTNNYRKYILKDGTVDICRACHRPGESLRHIISGCSRLANGEYLHRHNQVAKIVHQQLALKYNLVDSEVPYYRYVPDPVLENGRITLYWDRSIITDRTIVANKPDIVVIDRLERLAMIIDVTIPHDENLMKAEKDKQMKYLDLAHEVVDMWNIDSAIIVPIVVSAHGLIAKSLDQHLKRLALGSWIKNLMQKAVLLDTARIVRKFLSLEP

SEQ ID NO: 27373 - protein, 1202 aa, Eilema depressum
MLTRAKAREILQNAQNTPTDSSCSSASQPPDTISPRLATAEASSSDEYFSPPTTPTPVRRPGRGRPPASLGPRGLPASNRALATGGNVRRMAWTPAINENVMRAYYVATELGTNLTAYRARLLSLFQELEPAVNVSAQRLSDQVRAIQRCNLLDGAVLERLFSDVQNSLAIPTSSQAVPPVETSAPTRVSSPQLVYADEVEESETISVSTQYNELLRSTLEDAIMEYRSMIPSSRPRLPHLPMHKRNIALVCALDSILPNYLENSEDLGDTHSILYCAAVAACRVAGVKFIVTKPATRPKHAVPAWQYRIECRIAEARALIGKLICFRSGNTRPRVMRFVTQAFSGTNVSPQLYASCVTERIDFLKQKVYAWANRIRRYKKRVDRYNQNRIFQKDERWVYRKWEQPESGVDDIARPDADATNTFWCSIWSTPVGHTEGDWIGEVEQACENIQIMEPVTITPDDVASAVRSLPNWKSPGPDGLHNFWLKWLRNSHACLATQFQSALDSGSLPNFVTTGITHLLHKSGSVTDPKNYRPITCLPTVYKLLTSILRVKINSHLEKNSVISIFQNGCRRGARGTKELLLVDMAISQQVRRKRRNLATSWIDYKKAYDSVPHTWLLRVLELYKIDTTLATFLRSCMGQWKTVLRYPGCCQTNDAPIRIERGIFQGDSLSPLWFCLALNPLSTILENSGLGYRLRREGRVISHLLYMDDIKLFAPNNTQLIELLKMTESFSSSIKMEFGLDKCAVMHVERGGIVESEGLILSDSIKLKSLSSTETYKYLGMSQALGIPEAGVKQALRERFFGRLKKVLKSFLSGGNKVRACNGWVMPVLMYSFGILRWTQTELDALDRKVRTLLTTFRMHHPRSSVMRLYIPRKLGGRGFLNIKNLHNREIYNLRQYCLQANTDMHRDVVAVDNGLTPLALAKENWRKPVVLGTADRREVWMGKELHGRFYRALNGPDIDLKASVSWLRFGDLFGETEGFVFAITDEVIMTNNYRKYILKDGTVDICRACHRPGESLRHIISGCSRLANGEYLHRHNQVAKIVHQQLALKYNLVTSEVPYYRYVPDPVLENGRVTLYWDRSIITDRTIVANKPDIVVIDRLERLAMIVDITVPHDENLMKAEKDKQIKYLDLAHEVVDMWNVDTAIIVPIVISAHGLIAKSLDQHLKRLSLGSWIKGLMQKAVLLDTARIVRRFLSLEP

SEQ ID NO: 27374 - protein, 1202 aa, Eilema depressum
MLTRAKAREIVQNAQNTPTDSSCSSASQPPDTISPRLATAEASSSDEYFSPPTTPTPVRRPGRGRPPASLGPRGLPASNRALATGGNVRRMAWTPAINENVMRAYYVATELGTNLTAYRGRLLSLFQELEPAVNVSAQRLSDQVRAIQRCNLLDGAVLERLFSDVQNSLAILTSSQAVPPVETSAPTRVSSPQLGYADEVEESETISVSTQYNELLRSTLEDAILEYRSMIPSSRPRLPHLPMHKRNIALVCALDSILPNYLENSEDLGDTHSILYCAAVAACRVAGVKFIVTKPATRPKHAVPAWQYRIECRIAEARALIGKLICFRSGNTRPRVMRFVTQAFSGTNVSPQLYASCVTERIDFLKQKVYAWANRIRRYKKRVDRYYQNRIFQKDERWVYRKWEQPESGVDDIARPDADATNTFWCSIWSTPVVHTEGDWIGEVEQACENIQIMEPVTITPDDVASAVRSLPNWKSPGPDGLHNFWLKWLRNSHACLATQFQSALDSGSLPNFVTTGITHLLHKSGSVTDPKNYRPITCLPTVYKLLTSILRVKINSHLEKNSVISIFQNGCRRGARGTKELLLVDMTISQQVRRKRRNLATSWIDYKKAYDSVPHTWLLRVLELYKIDTTLATFLRSCMGQWKTVLRYPGCCQTNDAPIRIERGIFQGDSLSPLWFCLALNPLSTILENSGLGYRLRREGRVISHLLYMDDIKLFAPNNTQLIELLKMTESFSSSIKMEFGLDKCAVMHVERGGIVESEGLILSDSIKLKSLSSTETYKYLGMSQALGIPEAGVKQALRERFFGRLKKVLKSFLSGGNKVRACNGWVMPVLMYSFGILRWTQTELDALDRKVRTLLTTFRMHHPRSSVMRLYIPRKLGGRGFLNIKNLHNREIYNLRQYCLQANTDMHRDVVAVDNGLTPLALAKENWRKPVVLGTADRREVWMGKELHGRFYRALNGPDIDLKASVSWLRFGDLFGETEGFVFAITDEVIMTNNYRKYILKDGTVDICRACHRPGESLRHIISGCSRLANGEYLHRHNQVAKIVHQQLALKYNLVTSEVPYYRYVPDPVLENGRVTLYWDRSIITDRTIVANKPDIVVIDRLERLAMIVDITVPHDENLMKAEKDKQIKYLDLAHEVVDMWNVDTAIIVPIVISAHGLIAKSLDQHLKRLSLGSWIKGLMQKAVLLDTARIVRRFLSLEP

SEQ ID NO: 27375 - protein, 1202 aa, Eilema depressum
MLTRAKAREIVQNAQNTPTDSSCSSASQPPDTISPRLATAEASSSDEYFSPPTTPTPVRRPGRGRPPASLGPRGLPASNRALATGGNVRRMAWTPAINENVMRAYYVATELGTNLTAYRGRLLSLFQELEPAVNVSAQRLSDQVRAIQRCNLLDGAVLERLFSDVQNSLAIPTSSQAVPPVETSAPTRVSSPQLGYADEVEESETISVSTQYNELLRSTLEDAILEYRSMIPSSRPRLPHLPMHKRNIALVCALDSILPNYLENSEDLGDTHSILYCAAVAACRVAGVKFIVTKPATRPKHAVPAWQYRIECRIAEARALIGKLICFRSGNTRPRVMRFVTQAFSGTNVSPQLYASCVTERIDFLKQKVYAWANRIRRYKKRVDRYNQNRIFQKDERWVYRKWEQPESGVDDIARPDADATNTFWCSIWSTPVVHTEGDWIGEVEQACENIQIMEPVTITPDDVACAVRSLPNWKSPGPDGLHNFWLKWLRNSHACLATQFQSALDSGSLPNFVTTGITHLLHKSGSVTDPKNYRPITCLPTVYKLLTSILRVKINSHLEKNSVISIFQNGCRRGARGTKELLLVDMAISQQVRRKRRNLATSWIDYKKAYDSVPHTWLLRVLELYKIDTTLATFLRSCMGQWKTVLRYPGCCQTNDAPIRIERGIFQGDSLSPLWFCLALNPLSTILENSGLGYRLRREGRVISHLLYMDDIKLFAPNNTQLIELLKMTESFSSSIKMEFGLDKCAVMHVERGGIVESEGLILSDPIILKSLSSTETYKYLGMSQALGIPEAGVKQALRERFFGRLKKVLKSFLSGGNKVRACNGWVMPVLMYSFGILRWTQTELDALDRKVRTLLTTFRMHHPRSSVMRLYIPRKLGGRGFLNIKNLHNREIYNLRQYCLQANTDMHRDVVAVDNGLTPLALAKENWRKPVVLGTADRREVWMGKELHGRFYRALNGPDIDLKASVSWLRFGDLFGETEGFVFAITDEVIMTNNYRKYILKDGTVDICRACHRPGESLRHIISGCSRLANGEYLHRHNQVAKIVHQQLALKYNLVTSEVPYYRYVPDPVLENGRVTLYWDRSIITDRTIVANKPDIVVIDRLERLAMIVDITVPHDENLMKAEKDKQIKYLDLAHEVVDMWNVDTAIIVPIVISAHGLIAKSLDQHLKRLSLGSWIKGLMQKAVLLDTARIVRRFLSLEP

SEQ ID NO: 27376 - protein, 1202 aa, Eilema depressum
MLTRAKARQIEQNAQTTPTDSSCSSASQPPDAISPRLATAEASSSDEYFSPPTSPTPVRRPGRGRPPASLGPRGPPASNRALATGGNVRRMAWTSSINENVMRAYYVATELGTNLTAYRGRLLSLFQELEPAVNVSAQRLSDQVRAIQRCNLLDGAVLERLFSDVQNSLAIPTSSQAVPPVETSAPTRVSPPQLVYADEVEESETISVSTQYNEPLRSTLEDAMLEYRSMIPSSRPRLPHLPMHKRNIALVCALDSLLPNYLENSEDLGDTHSILYCAAVAACRVAGVKFIVNKPATRPKHAVPAWQYRIECRIAEARALIGKLICFRSGNTRPRVMRFVTQAFSGTNVSPQQYASCVTERIDFLKQKVYAWANRIRRYKKRVDRYNQNRIFQKDERWVYRKWEQPESGVDDVARPDADATNTFWCSIWSTPVVHTEGDWIREVEQACENIQVMEPITITPDDVASAVRSLPNWKSPGPDGLHNFWLKWLRNSHACLATQFQSALDSGSLPSFVTTGITHLLHKSGSATDPKNYRPITCLPTVYKLLTSILRVKINSHLEKNSVISIFQNGCRKGARGTKELLIVDMAISQQVRRKRRNLATSWIDYKKAYDSVPHTWLLRVLELYKIDTTLATFLRSCMGQWKTVLRYPGCCQTNDAPIRIERGIFQGDSLSPLWFCLALNPLSTILENSGLGYRLRSEGRVISHLLYMDDIKLFAPNNTQLIELLKMTESFSSSIKMEFGLDKCAVMHVERGGIVESEGLILSDSIKLKSLSSTETYKYLGMSQALGIPDAGVKQALRERFFGRLKKVLKSFLSGGNKVRACNGWVMPVLMYSFGILRWTQTELDALDRKVRTLLTTFRMHHPRSSVMRLYIPRKLGGRGFLNIKNLHNREIYNLRQYCLQVNTDMHRDVVAVDNGLTPLALAKENWRKPVVLSTADRREVWMGKELHGRFYRALNGPDIDLKASVSWLRFGDLFGETEGFVFAITDEVVMTNNYRKYILKDGTVDICRACHRPGESLRHIISGCSRLANGEYLHRHNQVAKIVHQQLALKYNLVTSEVPYYRYVPDPVLENGRVTLYWDRSIITDRTIVANKPDIVVIDRLERLTMIVDITIPHDENLMKAEKDKQIKYLDLAHEVVDMWNVDSAIIVPIVISAHGLIAKSLDQHLKRLSLGSWIKGLMQKAVLLDTARIVRRFLSLEP

SEQ ID NO: 27377 - protein, 1199 aa, Eilema sororculum
MLTRAKARKFAHPTPSDSSCSSASQAPETTSPKPTTAEASSSDEYFSPPTSPTPVRRPGRGRPPSSLGSRGPPASNRAPATGGNVRRMKWTTSINENVMRAYFVATAGGTNLTAYRVRMLPLFQELEPAVSVSAQRLSDQVRAIQRCHLLDDSVLERLLSDVQNSLATPTSSQAVLPVETSVVMSVSTPQLVHADEVEESETISVSTQYNERLRSALEDAMLEYRSMIPSNRPRLPHLPVHKRNIALVCALDSLLSNYLENSEDLGDTHSILYCAAVAVCRVAGVRFIVDKPVTRHRPTVPAWQYRIECRIAKARALIGKLICFRSGNTRPRVMRFVTQAFSGTNISPEQYASCVTERIDFLKQKVYAWANRIRRYKKRVDRYIQNRIFQKDERWVYRKWEQPELNVDDTARPDADATNTFWRSIWSTPVVHTEGDWIRGVEQACENIQIMEPITITSDDVLSAVRSLPNWKSAGPDGLHNFWLKWLRNSHACLASQFQSALDSGSLPNFLTTGLTHLLYKSGSAMDPKNYRPITCLPTVYKLLTSILRVKINFHLERNSIISISQNGCRRGARGTKELLLVDMTISQQVRRKRKNLATSWIDYKKAYDSVPHTWLLRVLELYKIDTTLAAFLRSCMGQWKTVLRYPGCCQTTDAPIRIERGIFQGDSLSPLWFCLALNPLSTILENSGLGYRLQREGRVISHLLYMDDLKLLAPNNAQLIELLKMTESFSSSIKMEFGLDKCAVMHVERGGIVESENLILSDSIKLKSLSSTETYKYLGMSQALGIPEAGMKQALQERFFGRLKKVLKSFLSGGNKVRACNGWVMPVLMYSFGILRWTQTELDALDRRVRSLLTTFRMHHPRSSVMRLYIPRKLGGRGFLNVKTLHNREIYNLREYFLHANTDMHRDVVAVDNGFTPLALAKENWRKPIVLDTADRREVWMGKELHGRFYRALNGPDIDLKASVSWLRFGDLFGETEGFIFAITDEVVMTNNYRKYILKDGTVDICRACHRPGESLRHIISGCSRLANGEYLHRHNQVAKIVHQQLALKYNLVDSEVPYYRYVPDPVLENGRITLYWDRSIITDRTIVANKPDIVVIDRLERLAMIIDVTIPHDENLMKAEKDKQMKYQDLAHEVVDMWNIDSAIIVPIVVSAHGLIAKSLDQHLKRLALGSWIKNLMQKAVLLDTARIVRKFLSLEP

SEQ ID NO: 27378 - protein, 1199 aa, Eilema sororculum
MLTRAKARKFAHPTPSDSSCSSASQAPETTSPKPTTAEASSSDEYFSPPTSPTPVRRPGRGRPPSSLGSRGPPASNRAPATGGNVRRMKWTTSINENVMRAYFVATAGGTNLTAYRVRMLPLFQELEPAVSVSAQRLSDQVRAIQRCHLLDDSVLERLLSDVQNSLATPTSSQAVLPVETSVVMSVSTPQLVHADEMEESETISVSTQYNERLRSALEDAMLEYRSMIPSNRPRLPHLPVHKRNIALVCALDSLLSNYLENSEDLGDTHSILYCAAVAVCRVAGVRFIVDKPVTRHRPTVPAWQYRIECRIAKARALIGKLICFRSGNTRPRVMRFVTQAFSGTNISPEQYASCVTERIDFLKQKVYAWANRIRRYKKRVDRYIQNRIFQKDERWVYRKWEQPELNVDDTARPDADATNTFWRSIWSTPVVHTEGDWIRGVEQACENIQIMEPITITSDDVLSAVRSLPNWKSAGPDGLHNFWLKWLRNSHACLASQFQSALDSGSLPNFLTTGLTHLLYKSGSAMDPKNHRPITCLPTVYKLLTSILRVKINSHLERNSIISISQNGCRRGARGTKELLLVDMTISQQVRRKRKNLATSWIDYKKAYDSVPHTWLLRVLELYKIDTTLAAFLRSCMGQWKTVLRYPGCCQTTDAPIRIERGIFQGDSLSPLWFCLALNPLSTILENSGLGYRLQREGRVISHLLYMDDLKLLAPNNAQLIELLKMTESFSSSIKMEFGLDKCAVMHVERGGIVESENLILSDSIKLKSLSSTETYKYLGMSQALGIPEAGMKQALQERFFGRLKKVLKSFLSGGNKVRACNGWVMPVLMYSFGILRWTQTELDALDRRVRSLLTTFRMHHPRSSVMRLYIPRKLGGRGFLNVKTLHNREIYNLREYFLHANTDMHRDVVAVDNGFTPLALAKENWRKPIVLDTADRREVWMGKELHGRFYRALNGPDIDLKASVSWLRFGDLFGETEGFIFAITDEVVMTNNYRKYILKDGTVDICRACHRPGESLRHIISGCSRLANGEYLHRHNQVAKIVHQQLALKYNLVDSEVPYYRYVPDPVLENGRITLYWDRSIITDRTIVANKPDIVVIDRLERLAMIIDVTIPHDENLMKAEKDKQMKYQDLAHEVVDMWNIDSAIIVPIVVSAHGLIAKSLDQHLKRLALGSWIKNLMQKAVLLDTARIVRRFLSLEP

SEQ ID NO: 27379 - protein, 1159 aa, Eilema depressum
MLTRAKAREIVQNAQTTPTDSSCSSASQPPDTISPRLATAEASSSDEYFSPPTTPTPVRRPGRGRPPASLGPRGPPASNRALATGGNVRRMAWTPSINENVMRAYYVATELGTNLTAYRGRLLSLFQELEPAVNVSAQRLSDQVRAIQRCNLLDGAVLERLFSDVQNSLAILTSSQAVPPVETSAPTRVSPPQLVYADEVEESETISVSTQYNELLRSTLEDAMLEYRSIIPSSRPRLPHLPMHKRNIALVCALDSILPNYLENSEDLGDTHSILYCAAVAACRVAGVKFIVDKPATRPKHAVPAWQYRIECRIAEARALIGKLICFRSGNTRPRVMRFVTQAFAGTNVCPQQYASCVTERIDFLKQKVYAWANRIRRYKKRVDRYNQNRIFQKDERWVYRKWEQPESGVDDVARPDADATNTFWCSIWSTPVVHTDGLHNFWLKWLRNSHACLATQFQSALDSGSLPSFVTTGITHLLHKSGSATDPKNYRPITCLPTVYKLLTSILRVKINSHLEKNSVISIFQNGCRKGARGTKELLIVDMAISQQVRRKRRNLATSWIDYKKAYDSVPHTWLLRVLELYKIDTTLATFLRSCMGQWKTVLRYPGCCQTNDAPIRIERGIFQGDSLSPLWFCLALNPLSTILENSGLGYRLRREGRVISHLLYMDDIKLFAPNNTQLIELLKMTESFSSSIKMEFGLDKCAVMHVERGGIVESEGLILSDSIKLKSLSSTETYKYLGMSQALGIPDAGVKQALRERFFGRLKKVLKSFLSGGNKVRACNGWVMPVLMYSFGILRWTQTELDALDRKVRTLLTTFRMHHPRSSVMRLYIPRKLGGRGFLNIKNLHNREIYNLRQYCLQVNTDMHRDVVAVDNGLTPLALAKENWRKPVVLSTADRREVWMGKELHGRFYRALNGPDIDLKASVSWLRFGDLFGETEGFVFAITDEVVMTNNYRKYILKDGTVDICRACHRPGESLRHIISGCSRLANGEYLHRHNQVAKIVHQQLALKYNLVTSEVPYYRYVPDPVLENGRVTLYWDRSIITDRTIVANKPDIVVIDRLERLAMIVDITIPHDENLMKAEKDKQIKYLDLAHEVVDMWNVDSAIIVPIVISAHGLIAKSLDQHLKRLSLGSWIKGLMQKAVLLDTARIVRRFLSLEP

SEQ ID NO: 27380 - protein, 1202 aa, Eilema depressum
MLTRAKAREIVQNAQNTPTDSSCSSASQPPDTISPRLATAEASSSDEYFSPPTTPTPVRRPGRGRPPASLGPRGLPASNRALATGGNVRRMAWTPAINENVMRAYYVATELGTNLTAYRARLLSLFQELEPAVNVSAQRLSDQVRAIQRCNLLDGAVLERLFSDVQNSLAIPTSSQAVPPVETSAPTRVSSPQLVYADEVEESETISVSTQYNELLRSTLEDAILEYRSMIPSSRPRLPHLPMHKRNIALVCALDSILPNYLENSEDLGDTHSILYCAAVAACRVAGVKFIVTKPATRPKHAVPAWQYRIECRIAEARALIGKLICFRSGNTRPRVMRFVTQAFSGTNVSPQLYASCVTERIDFLKQKVYAWANRIRRYKKRVDRYNQNRIFQKDERWVYRKWEQPESGVDDIARPDADATNTFWCSIWSTPVVHTEGDWIGEVEQACENIQIMEPVTITPDDVASAVRSLPNWKSPGPDGLHNFWLKWLRNSHACLATQFQSALDSGSLPNFVTTGITHLLHKSGSVTDPKNYRPITCLPTVYKLLTSILRVKINSHLEKNSVISIFQNGCRRGARGTKELLLVDMAISQQVRRKRRNLATSWIDYKKAYDSVPHTWLLRVLELYKIDTTLATFLRSCMGQWKTVLRYPGCCQTNDAPIRIERGIFQGDSLSPLWFCLALNPLSTILENSGLGYRLRREGRVISHLLYMDDIKLFAPNNTQLIELLKMTESFSSSIKMEFGLDKCAVMHVERGGIVESEGLILSDSIKLKSLSSTETYKYLGMSQALGIPEAGVKQALRERFFGRLKKVLKSFLSGGNKVRACNGWVMPVLMYSFGILRWTQTELDALDRKVRTLLTTFRMHHPRSSVMRLYIPRKLGGRGFLNIKNLHNREIYNLRQYCLQVNTDMHRDVVAVDNGLTPLALAKENWRKPVVLSTADRREVWMGKELHGRFYRALNGPDIDLKASVSWLRFGDLFGETEGFVFAITDEVVMTNNYRKYILKDGTVDICRACHRPGESLRHIISGCSRLANGEYLHRHNQVAKIVHQQLALKYNLVTSEVPYYRYVPDPVLENGRVTLYWDRSVITDRTIVANRPDIVVIDRLERLAMIVDVTIPHDENLMKAEKDKQIKYLDLAHEVVDMWNVDSAIIVPIVISAHGLIAKSLDQHLKRLSLGSWIKGLMQKAVLLDTARIVRRFLSLEP

SEQ ID NO: 27381 - protein, 1125 aa, Eilema depressum
MLTRAKAREIVQNAQNTPTDSSCSSASQPPDTISPRLTTAEASSSDEYFSPPTTPTPVRRPGRGRPPASLGPRGLPASNRALATGGNVRRMAWTPAINENVMRAYYVATELGTNLTAYRARLLSLFQELEPAVNVSAQRLSDQVRAIQRCNLLDGAVLERLFSDVQNSLAIPTSSQAVPPVETSAPTRVSSPQLVYADEVEESETISVSTQYNELLRSTLEDAILEYRSMIPSSRPRLPHLPMHKRNIALVCALDSILPNYLENSEDLGDTHSILYCAAVAAWRVAGVKCIVTKPATRPKHAVPAWQYRIECRIAEARALIGKLICFRSGNTRPRVMRFVTQAFSGTNVSPQLYASCVTERIDFLKQKVYAWANRIRRYKKRVDRYNQNRIFQKDERWVYRKWEQPESGVDDIARPDADATNTFWCSIWSTPVVHTEGDWIGEVEQACENIQIMEPVTITPDDVASAVRSLPNWKSPGPDGLHNFWLKWLRNSHACLATQFQSALDSGSLPNFVTTGITHLLHKSGSVTDPKNYRPITCLPTVYKLLTSILRVKINSHLEKNSVISIFQNGYRRGARGTKELLLVDMAISQQVRRKRRNLATSWIDYKKAYDSVPHTWLLRVLELYKIDTTLATFLRSCMGQWKTVLRYPGCCQTNDAPIRIERGIFQGDSLSPLWFCLALNPLSTILENSGLGYRLRREGRVISHLLYMDDIKLFAPNNTQLIELLKMTESFSSSIKMEFGLDKCAVVHVERGGIVESEGLILSDSIKLKSLSSTETYKYLGMSQALGIPEAGVKQALRERFFGRLKKVLKSFLSGGNKVRACNGWVMPVLMYSFGILRWTQTELDALDRKVRTLLTTFRMHHPRSSVMRLYIPRKLGGRGFLNIKNLHNREIYNLRQYCLQVNTDMQRDVVAVDNGLTPLALAKENWRKPVVLSTADRREVWMGKELHGRFYRALNGPDIDLKASVSWLRFGDLFGETEGFVFAITDEVVMTNNYRKYILKDGTVDICRTCHRPGESLRHIISGCSRLANGEYLHRHNQVAKIVHQQLALKYNLVTSEVPYYRYVPDPVLENGRVTLYWDRSIITDRTIVANRPDIVVIDRLERLAMIVDVTIPHDENLMKAE

SEQ ID NO: 27382 - protein, 1147 aa, Eilema depressum
MPPRRKISLSKVEKAKKKSEQAKKRLEKIKSDPVLLAEYKEKERLKYLRKKEKGQRKCVKDMTPREHRKVKKNWITYSAAYRQNKKNVRHADQYMEENTPPSSDGENDLQAPVEINPERQLDVIDVPCIADQRQAEAKRRSILQRKIRNKQLQKKNHLITKLKKKLNNERQKNKRLKHRIKQSKKALTPRSRIEEMANDPNKKVELVKKALFGEIIQTQVLEEKKKTSNNNNNKQINKPATRPKHAVPAWQYRIECRIAEARALIGKLICFRSGNTRPRVMRFVTQAFSGTNVSPQLYASCVTERIDFLKQKVYAWANRIRRYKKRVDRYNQNRIFQKDERWVYRKWEQPESGVDDVARPDADATNTFWCSIWSTPVVHTEGDWIREVEQACEDIQIMEPIIITPDDVASAVRSLPNWKSPGPDGLHNFWLKWLRNSHACLATQFQSALDSGSLPNFVTTGITHLLHKSGSATDPKNYRPITCLPTVYKLLTSILRVKINSHLEKNSVISIFQNGCRKGARGTKELLIVDMAISQQVRRKRRNLATSWIDYKKAYDSVPHTWLLRVLELYKIDTTLATFLRSCMGQWKTVLRYPGCCQTNDAPIRIERGIFQGDSLSPLWFCLALNPLSTILENSGLGYRLRREGRVISHLLYMDDIKLFAPNNTQLIELLKMTESFSSSIKMEFGLDKCAVMHVERGGIVESEGLILSDSIKLKSLSSTETYKYLGMSQALGIPEAGVKQALRERFFGRLKKVLKSFLSGGNKVRACNGWVMPILMYSFGILRWTQTELDALDRKVRSLLTTFRMHHPRSSVMRLYIPRKLGGRGFLNIKNLHNREIYNLRQYCLQQANTDMHRDVVAVDNDLTPLALAKENWRKPVVLSTADRREVWMGKELHGRFYRALNGPDIDLKASVSWLRFGDLFGETEGFVFAIMDEVVMTNNYRKYIMKDGTVDICRACHRPGESLRHIISGCSRLANGEYLHRHNQVAKIVHQQLALKYNLVTSEVPYYRYVPDPVLENGRVTLYWDRSIITDRTIVANKPDIVVIDRLERLAMIVDITIPHDENLMKAEKDKQIKYLDLAHEVVDMWNVDSAIIVPIVISAHGLIAKSLDQHLKRLSLGSWIKGLMQKAVLLDTARIVRRFLSLEP

SEQ ID NO: 27383 - protein, 1203 aa, Eilema depressum
MLTRAKARQIQQNAQTTPTDSSCSSASQPPDAISPRLATAEASSSDEYFSPPTSPTPVRRPGRGRPPASLGPRGPPASNRALATGGNVHRMAWTSSINENVMRAYYVATELGTNLTAYRGRLLSLFQELEPAVNVSAQRLSDQVRAIQRCNLLDGAVLERLFSDVQNSLAIPTSSQAVPPVETSAPTRVRPPQLVSADEVEESETISVSTQYNELLRSTLEDAMLEYRSMIPSSRPRLPHLPMHKRNIALVCALDSLLPNYLENSEDLGDTHSILYCAAVAACRVAGVKFIVNKPATRPKHAVPAWQYRIECRIAEARALIGKLICFRSGNTRPRVMRFVTQAFSGTNVSPQLYTSCVTERIDFLKQKVYAWANRIRRYKKRVDRYNQNRIFQKDERWVYRKWEQPESGVDDVARPDADATNTFWCSIWSTPVVHTEGDWIREVEQACEDIQIMEPIIITPDDVASAVRSLPNWTSPEPDGLHNFWLKWLRNSHACLATQFQSALDSGSLPNFVTTGITHLLHKSGSATDPKNYRPITCLPTVYKLLTSILRVKINSHLEKNSVISIFQNGCRKGARGTKELLIVDMAISQQVRRKRRNLATSWIDYKKAYDSVPHTWLLRVLELYKIDTTLATFLRSCMGQWKTVLRYPGCCQTNDAPIRIERGIFQGDSLSPLWFCLALNPLSTILENSGLGYRLRREGRVISHLLYMDDIKLFAPNNTQLIELLKMTESFSSSIKMEFGLDKCAVMHVERGGIVESEGLILSDSIKLKSLSSTETYKYLGMSQALGIPEAGVKQALRERFFGRLKKVLKSFLSGGNKVRACNGWVMPVLMYSFGILRWTQTELDALDRKVRSLLTTFRMHHPRSSVMRLYIPRKLGGRGFLNIKNLHNREIYNLRQYCLQQANTDMHRDVVAVDNGLTPLALAKENWRKPVVLSTADRREVWMGKELHGRFYRALNGPDIDLKASVSWLRFGDLFGETEGFVFAIMDEVVMTNNYRKYIMKDGTVDICRACHRPGESLRHIISGCSRLANGEYLHRHNQVAKIVHQQLALKYNLVTSEVPYYRYVPDPVLENGRVTLYWDRSIITDRTIVANKPDIVVIDRLERLAMIVDITIPHDENLMKAEKDKQIKYLDLAHEVVDMWNVDSAIIVPIVISAHGLIAKSLDQHLKRLSLGSWIKGLMQKAVLLDTARIVRRFLSLEP

SEQ ID NO: 27384 - protein, 1203 aa, Eilema depressum
MLTRAKARQIQQNAQTTPTDSSCSSASQPPDAISPRLATAEASSSDEYFSPPTSPTPVRRPGRGRPPASLGPRGPPASNRALATGGNVRRMAWTSSINENVMRAYYVATELGTNLTAYRGRLLSLFQELEPAVNVSAQRLSDQVRAIQRCNLLDGAVLERLFSDVRNSLAIPTSSQAVPPVETSAPTRVRPPQLVSADEVEESETISVSTQYNELLRSTLEDAMLEYRSMIPSSRPRLPHLPMHKRNIALVCALDSLLPNYLENSEDLGDTHSILYCAAVAACRVAGVKFIVNKPATRPKHAVPAWQYRIECRIAEARALIGKLICFRSGNTRPRVMRFVTQAFSGTNVSPQLYTSCVTERIDFLKQKVYAWANRIRRYKKRVDRYNQNRIFQKDERWVYRKWEQPESGVDDVARPDADATNTFWCSIWSTPVVHTEGDWIREVEQACEDIQIMEPIIITPDDVASAVRSLPNWKSPGPDGLHNFWLKWLRNSHACLATQFQSALDSGSLPNFVTTGITHLLHKSGSATDPKNYRPITCLPTVYKLLTSILRVKINSHLEKNSVISIFQNGCRKGARGTKELLIVDMAISQQVRRKRRNLATSWIDYKKAYDSVPHTWLLRVLELYKIDTTLATFLRSCMGQWKTVLRYPGCCQTNDAPIRIERGIFQGDSLSPLWFCLALNPLSTILENSGLGYRLRREGRVISHLLYMDDIKLFAPNNTQLIELLKMTESFSSSIKMEFGLDKCAVMHVERGGIVESEGLILSDSIKLKSLSSTETYKYLGMSQALGIPEAGVKQALRERFFGRLKKVLKSFLSGGNKVRACNGWVMPVLMYSFGILRWTQTELDALDRKVRSLLTTFRMHHPRSSVMRLYIPRKLGGRGFLNIKNLHNREIYNLRQYCLQQANTDMHRDVVAVDNGLTPLALAKENWRKPVVLSTADRREVWMGKELHGRFYRALNGPDIDLKASVSWLRFGDLFGETEGFVFAIMDEVVMTNNYRKYIMKDGTVDICRACHRPGESLRHIISGCSRLANGEYLHRHNQVAKIVHQQLALKYNLVTSEVPYYRYVPDPVLENGRVTLYWDRSIITDRTIVANKPDIVVIDRLERLAMIVDITIPHDENLMKAEKDKQIKYLDLAHEVVDMWNVDSAIIVPIVISAHGLIAKSLDQHLKRLSLGSWIKGLMQKAVLLDTARIVRRFLSLEP

SEQ ID NO: 27385 - protein, 1203 aa, Eilema depressum
MLTRAKARQIQQNAQTTPTDSSCSSASQPPDAISPRLATAEASSSDEYFSPPTSPTPVRRPGRGRPPASLGPRGPPASNRALATGGNVRRMAWTSSINENVMRAYYVATELGTNLTAYRGRLLSLFQELEPAVNVSAQRLSDQVRAIQRCNLLDGAVLERLFSDVQNSLAIPTSSQAVPPVETSAPTRVSPPQLVSADEVEESETISVSTQYNELLRSTLEDAMLEYRSMIPSSRPRLPHLPMHKRNIALVCALDSLLPNYLENSEDLGDTHSILYCAAVAACRVAGVKFIVNKPATRPKHAVPAWQYRIECRIAEARALIGKLICFRSGNTRPRVMRFVTQAFAGTNVSPQLYASCVTERIDFLKQKVYAWANRIRRYKKRVDRYNQNRIFQKDERWVYRKWEQPESGVDDVARPDADATNTFWCSIWSTPVVHTEGDWIREVEQACEDIQIMEPIIITPDDVASAVRSLPNWKSPGPDGLHNFWLKWLRNSHACLATQFQSALDSGSLPNFVTTGITHLLHKSGSATDPKNYRPITCLPTVYKLLTSILRVKINSHLEKNSVISIFQNGCRKGARGTKELLIVDMAISQQVRRKRRNLATSWIDYKKAYDSVPHTWLLRVLELYKIDTTLATFLRSCMGQWKTVLRYPGCCQTNDAPIRIERGIFQGDSLSPLWFCLALNPLSTILENSGLGYRLRREGRVISHLLYMDDIKLFAPNNTQLIELLKMTESFSSSIKMEFGLDKCAVMHVERGGIVESEGLILSDSIKLKSLSSTETYKYLGMSQALGIPEAGVKQALRERFFGRLKKVLKSFLSGGNKVRACNGWVMPVLMYSFGILRWTQTELDALDRKVRSLLTTFRMHHPRSSVMRLYIPRKLGGRGFLNIKNLHNREIYNLRQYCLQQANTDMHRDVVAVDNGLTPLALAKENWRKPVVLSTADRREVWMGKELHGRFYRALNGPDIDLKASVSWLRFGDLFGETEGFVFAIMDEVVMTNNYRKYIMKDGTVDICRACHRPGESLRHIISGCSRLANGEYLHRHNQVAKIVHQQLALKYNLVTSEVPYYRYVPDPVLENGRVTLYWDRSIITDRTIVANKPDIVVIDRLERLAMIVDITIPHDENLMKAEKDKQIKYLDLAHEVVDMWNVDSAIIVPIVISAHGLIAKSLDQHLKRLSLGSWIKGLMQKAVLLDTARIVRRFLSLEP

SEQ ID NO: 27386 - protein, 1203 aa, Eilema depressum
MLTRAKARQIQQNAQTTPTDSSCSSASQPPDAISPRLATAEASSSDEYFSPPTSPTPVRRPGRGRPPASLGPRGPPASNRALATGGNVRRMAWTSSINENVMRAYYVATELGTNLTAYRGRLLSLFQELEPAVNVSAQRLSDQVRAIQRCNLLDGTVLERLFSDVQNSLAIPTSSQAVPPVETSAPTRVSPPQLVSADEVEESETISVSTQYNELLRSTLEDAMLEYRSMIPSSRPRLPHLPMHKRNIALVCALDSLLPNYLENSEDLGDTHSILYCAVVAACRVAGVKFIVNKPATRPKHAVPAWQYRIECRIAEARALIGKLICFRSGNTRPRVMRFVTQAFSGTNVSPQLYASCVTERIDFLKQKVYAWANRIRRYKKRVDRYNQNRIFQKDERWVYRKWEQPESGVDDVARPDADATNTFWCSIWSTPVVHTEGDWIREVEQACEDIQIMEPIIITPDDVASAVRSLPNWKSPGPDGLHNFWLKWLRNSHACLATQFQSALDSGSLPNFVTTGITHLLHKSGSATDPKNYRPITCLPTVYKLLTSILRVKINSHLEKNSVISIFQNGCRKGARGTKELLIVDMAISQQVRRKRRNLATSWIDYKKAYDSVPHTWLLRVLELYKIDTTLATFLRSCMGQWKTVLRYPGCCQTNDAPIRIERGIFQGDSLSPLWFCLALNPLSTVLENSGLGYRLRREGRVISHLLYMDDIKLFAPNNTQLIELLKMTESFSSSIKMEFGLDKCAVMHVERGGIVESEGLILSDSIKLKSLSSTETYKYLGMSQALGIPEAGVKQALRERFFGRLKKVLKSFLSGGNKVRACNGWVMPVLMYSFGILRWTQTELDALDRKVRSLLTTFRMHHPRSSVMRLYIPRKLGGRGFLNIKNLHNREIYNLRQYCLQQANTDMHRDVVAVDNGLTPLALAKENWRKPVVLSTADRREVWMGKELHGRFYRALNGPDIDLKASVSWLRFGDLFGETEGFVFAIMDEVVMTNNYRKYIMKDGTVDICRACHRPGESLRHIISGCSRLANGEYLHRHNQVAKIVHQQLALKYNLVTSEVPYYRYVPDPVLENGRVTLYWDRSIITDRTIVANKPDIVVIDRLERLAMIVDITIPHDENLMKAEKDKQIKYLDLAHEVVDMWNVDSAIIVPIVISAHGLIAKSLDQHLKRLSLGSWIKGLMQKAVLLDTARIVRRFLSLEP

SEQ ID NO: 27387 - protein, 1113 aa, Eilema depressum
MAWTSSINENVMRAYYVATELGANLTAYRGRLLSLFQELEPAVNVSAQRLSDQVRAIQRCNLLDGAVLERLFSDVQNSLAIPTSSQAVPPVETSAPTRVSPPQLVSADEVEESETISVSTQYNELLRSTLEDAMLEYRSMIPSSRPRLPHLPMHKRNIALICALDSLLPNYLENSEDLGDTHSILYCAAVAACRVAGVKFIVNKPATRPKHAVPAWQYRIECRIAEARALIGKLICFRSGNTRPRVMRFVTQAFSGTNVSPQLYASCVTERIDFLKQKVYAWANRIRRYKKRVDRYNQNRIFQKDERWVYRKWEQPESGVDDVARPDADATNTFWCSIWSTPVVHTEGDWIREVEQACEDIQIMEPIIITPDDVASAVRSLPNWKSPGPDGLHNFWLKWLRNSHACLATQFQSALDSGSLPNFVTTGITHLLHKSGSATDPKNYRPITCLPTVYKLLTSILRVKINSHLEKNSVISIFQNGCRKGARGTKELLIVDMAISQQVRRKRRNLATSWIDYKKAYDSVPHTWLLRVLELYKIDTTLATFLRSCMGQWKTVLRYPGCCQTNDAPIRIERGIFQGDSLSPLWFCLALNPLSTILENSGLGYRLRREGRVISHLLYMDDIKLFAPNNTQLIELLKMTESFSSSIKMEFGLDKCAVMHVERGGIVESEGLILSDSIKLKSLSSTETYKYLGMSQALGIPEAGVKQALRERFFGRLKKVLKSFLSGGNKVRACNGWVMPVLMYSFGILRWTQTELDALDRKVRSLLTTFRMHHPRSSVMRLYIPRKLGGRGFLNIKNLHNREIYNLRQYCLQQANTDMHRDVVAVDNGLTPLALAKENWRKPVVLSTADRREVWMGKELHGRFYRALNGPDIDLKASVSWLRFGDLFGETEGFVFAIMDEVVMTNNYRKYIMKDGTVDICRACHRPGESLRHIISGCSRLANGEYLHRHNQVAKIVHQQLALKYNLVTSEVPYYRYVPDPVLENGRVTLYWDRSIITDRTIVANKPDIVVIDRLERLAMIVDITIPHDENLMKAEKDKQIKYLDLAHEVVDMWNVDSAIIVPIVISAHGLIAKSLDQHLKRLSLGSWIKGLMQKAVLLDTARIVRRFLSLEP

SEQ ID NO: 27388 - protein, 867 aa, Eilema depressum
MRFVTQAFSGTNVSPQLYASCVTERIDFLKQKVYAWANRIRRYKKRVDRYNQNRIFQKDERWVYRKWEQPESGVDDVARPDADATNTFWCSIWSTPVVHTEGDWIREVEQACEDIQIMEPIIITPDDVASAVRSLPNWKSPGPDGLHNFWLKWLRNSHACLATQFQSALDSGSLPNFVTTGITHLLHKSGSATDPKNYRPITCLPTVYKLLTSILRVKINSHLEKNSVISIFQNGCGKGARGTKELLIVDMAISQQVRRKRRNLATSWIDYKKAYDSVPHTWLLRVLELYKIDTTLATFLRSCMGQWKTVLRYPGCCQTNDAPIRIERGIFQGDSLSPLWFCLALNPLSTILENSGLGYRLRREGRVISHLLYMDDIKLFAPNNTQLIELLKMTESFSSSIKMEFGLDKCAVMHVERGGIVESEGLILSDSIKLKSLSSTETYKYLGMSQALGIPEAGVKQALRERFFGRLKKVLKSFLSGGNKVRACNGWVMPVLMYSFGILRWTQTELDALDRKVRSLLTTFRMHHPRSSVMRLYIPRKLGGRGFLNIKNLHNREIYNLRQYCLQQANTDMHRDVVAVDNGLTPLALAKENWRKPVVLSTADRREVWMGKELHGRFYRALNGPDIDLKASVSWLRFGDLFGETEGFVFAIMDEVVMTNNYRKYIMKDGTVDICRACHRPGESLRHIISGCSRLANGEYLHRHNQVAKIVHQQLALKYNLVTSEVPYYRYVPDPVLENGRVTLYWDRSIITDRTIVANKPDIVVIDRLERLAMIVDITIPHDENLMKAEKDKQIKYLDLAHEVVDMWNVDSAIIVPIVISAHGLIAKSLDQHLKRLSLGSWIKGLMQKAVLLDTARIVRRFLSLEP

SEQ ID NO: 27389 - protein, 1203 aa, Eilema depressum
MLTRAKARQIEQNAQTTPTDSSCSSASQPPDAISPRLATAEASSSDEYFSPPTSPTPVRRPGRGRPPASLGPRGPPTSNRALATGGNVRRMAWTSSINENVMRAYYVATELGTNLTAYRGRLLSLFQELEPAVNVSAQRLSDQVRAIQRCNLLDGAVLERLFSDVQNSLAIPTSSQAVPPVETSAPTRVSPPQLVSADEVEESETISVSTQYSELLRSTLEDAMLEYRSMIPSSRPRLPHLPMHKRNIALVCALDSLLPNYLENSEDLGDTHSILYCAAVAACRVAGVKFIVNKPATRPKHAVPAWQYRIECRIAEARALIGKLICFRSGNTRPRVMRFVTQAFSGTNVSPQLYASCVTERIDFLKQKVYAWANRIRRYKKRVDRYNQNRIFQKDERWVYRKWEQPESGVDDVARPDADATNAFWCSIWSTPVVHTEGDWIREVEQACEDIQIMEPIIITPDDVASAVRSLPNWKSPGPDGLHNFWLKWLRNSHACLATQFQSALDSGSLPNFVTTGITHLLHKSGSATDPKNYRPITCLPTVYKLLTSILRVKINSHLEKNSVISIFQNGCRKGARGTKELLIVDMAISQQVRRKRRNLATSWIDYKKAYDSVPHTWLLRVLELYKIDTTLATFLRSCMGQWKTVLRYPGCCQTNDAPIRIERGIFQGDSLSPLWFCLALNPLSTILENSGLGYRLRREGQVISHLLYMDDIKLFAPNNTQLIELLKMTESFSSSIKMEFGLDKCAVMHVERGGIVESEGLILSDSIKLKSLSSTETYKYLGMSQALGIPEAGVKQALRERFFGRLKKVLKSFLSGGNKVRACNGWVMPVLMYSFGILRWTQTELDALDRKVRSLLTTFRMHHPRSSVMRLYIPRKLGGRGFLNIKNLHNHEIYNLRQYCLQQANTDMHRDVVAVDNGLTPLALAKENWRKPVVLSTADRREVWMGKELHGRFYWALNGPDIDLKASVSWLRFGDLFGETEGFVFAIMDEVVMTNNYRKYIMKDGTVDICRACHRPGESLRHIISGCSRLANGEYLHRHNQVAKIVHQQLALKYNLVTSEVPYYRYVPDPVLENGRVTLYWDRSIITDRTIVANKPDIVVIDRLERLAMIVDITIPHDENLMKAEKDKQIKYLDLAHEVVDMWNVDSAIIVPIVISAHGLIAKSLDQHLKRLSLGSWIKGLMQKAVLLDTARIVRRFLSLEP

SEQ ID NO: 27390 - protein, 867 aa, Eilema depressum
MRFVTQAFSGTNVSPQLYASCVTERIDFLKQKVYAWANRIRRYKKRVDRYNQNRIFQKDERWVYRKWEQPESGVDDVARPDADATNTFWCSIWSTPVVHTEGDWIREVEQACEDIQIMEPIIITPDDVASAVRSLPNWKSPGPDGLHNFWLKWLRNSHACLATQFQSALDSGSLPNFVTTGITHLLHKSGSATDPKNYRPITCLPTVYKLLTSILRVKINSHLEKNSVISIFQNGCRKGARGTKELLIVDMAISQQVRRKRRNLATSWIDYKKAYDSVPHTWLLRVLELYKIDTTLATFLRSCMGQWKTVLRYPGCCQTNDAPIRIERGIFQGDSLSPLWFCLALNPLSTILENSGLGYRLRREGQVISHLLYMDDIKLFAPNNTQLIELLKMTESFSSSIKMEFGLDKCAVMHVERGGIVESEGLILSDSIKLKSLSSTETYKYLGMSQALGIPEAGVKQALRERFFGRLKKVLKSFLSGGNKVRACNGWVMPVLMYSFGILRWTQTELDALDRKVRSLLTTFRMHHPRSSVMRLYIPRKLGGRGFLNIKNLHNREIYNLRQYCLQQANTDMHRDVVAVDNGLTPLALAKENWRKPVVLSTADRREVWMGKELHGRFYRALNGPDIDLKASVSWLRFGDLFGETEGFVFAIMDEVVMTNNYRKYIMKDGTVDICRACHRPGESLRHIISGCSRLANGEYLHRHNQVAKIVHQQLALKYNLVTSEVPYYRYVPDPVLENGRVTLYWDRSIITDRTIVANKPDIVVIDRLERLAMIVDITIPHDENLMKAEKDKQIKYLDLAHEVVDMWNVDSAIIVPIVISAHGLIAKSLDQHLKRLSLGSWIKGLMQKAVLLDTARIVRRFLSLEP

SEQ ID NO: 27391 - protein, 1203 aa, Eilema depressum
MLTRAKARQIEQNAQTTPTDSSCSSASQPPDAISPRLATAEASSSDEYFSPPTSPTPVRRPGRGRPPASLGPRGPPASNRALATGGNVRRMAWTSSINENVMRAYYVATELGTNLTAYRGRLLSLFQELEPAVNVSAQRLSDQVRAIQRCNLLDGAVLERLFSDVQNSLAIPTSSQAVPPVETSAPTRVSPPQLVSADEVEESETISVSTQYSELLRSTLEDAMLEYRSMIPSSRPRLPHLPMHKRNIALVCALDSLLPNYLENSEDLGDTHSILYCAAVAACRVAGVKFIVNKPATRPKHAVPAWQYRIECRIAEARALIGKLICFRSGNTRPRVMRFVTQAFSGTNVSPQLYASCVTERIDFLKQKVYAWANRIRRYKKRVDRYNQNRIFQKDERWVYRKWEQPESGVDDVARPDADATNTFWCSIWSTPVVHTEGDWIREVEQACEDIQIMEPIIITPDDVASAVRSLPNWKSPGPDGLHNFWLKWLRNSHACLATQFQSALDSGSLPNFVTTGITHLLHKSGSATDPKNYRPITCLPTVYKLLTSILRVKINSHLEKNSVISIFQNGCRKGARGTKELLIVDMAISQQVRRKRRNLATSWIDYKKAYDSVPHTWLLRVLELYKIDTTLATFLRSCMGQWKTVLRYPGCCQTNDAPIRIERGIFQGDSLSPLWFCLALNPLSTILENSGLGYRLRREGQVISHLLYMDDIKLFAPNNTQLIELLKMTESFSSSIKMEFGLDKCAVMHVERGGIVESEGLILSDSIKLKSLSSTETYKYLGMSQALGIPEAGVKQALRERFFGRLKKVLKSFLSGGNKVRACNGWVMPVLMYSFGILRWTQTELDALDRKVRSLLTTFRMHHPRSSVMRLYIPRKLGGRGFLNIKNLHNREIYNLRQYCLQQANTDMHRDVVAVDNGLTPLALAKENWRKPVVLSTADRREVWMGKELHGRFYRALNGPDIDLKASVSWLRFGDLFGETEGFVFAIMDEVVMTNNYRKYIMKDGTVDICRACHRPGESLRHIISGCSRLANGEYLHRHNQVAKIVHQQLALKYNLVTSEVPYYRYVPDPVLENGRVTLYWDRSIITDRTIVANKPDIVVIDRLERLAMIVDITIPHDENLMKAEKDKQIKYLDLAHEVVDMWNVDSAIIVPIVISAHGLIAKSLDQHLKRLSLGSWIKGLMQKAVLLDTARIVRRFLSLEP

SEQ ID NO: 27392 - protein, 1203 aa, Eilema depressum
MLTRAKARQIEQNAQTTPTDSSCSSASQPPDAISPRLATAEASSSDEYFSPPTSPTPVRRPGRGRPPASLGPRGPPASNRALATGGNVRRMAWTSSINENVMRAYYVATELGTNLTAYRGRLLSLFQELEPAVNVSAQRLSDQVRAIQRCNLLDGAVLERLFSDVQNSLAIPTSSQAVPPVETSAPTRVSPPQLVSADEVEESETISVSTQYSELLRSTLEDAMLEYRSMIPSSRPRLPHLPMHKRNIALVCALDSLLPNYLENSEDLGDTHSILYCAAVAACRVAGVKFIVNKPATRPKHAVPAWQYRIECRIAEARALIGKLICFRSGNTRPRVMRFVTQAFSGTNVSPQLYASCVTERIDFLKQKVYAWANRIRRYKKRVDRYNQNRIFQKDERWVYRKWEQPESGVDDVARPDADATNTFWCSIWSTPVVHTEGDWIREVEQACEDIQIMEPIIITPDDVASAVRSLPNWKSPGPDGLHNFWLKWLRNSHACLATQFQSALDSGSLPNFVTTGITHLLHKSGSATDPKNYRPITCLPTVYKLLTSILRVKINSHLEKNSVISIFQNGCRKGARGTKELLIVDMAISQQVRRKRRNLATSWIDYKKAYDSVPHTWLLRVLELYKIDTTLATFLRSCMGQWKTVLRYPGCCQTNDAPIRIERGIFQGDSLSPLWFCLALNPVSTILENSGLGYRLRREGRVISHLLYMDDIKLFAPNNTQLIELLKMTESFSSSIKMEFGLDKCAVMHVERGGIVESEGLILSDSIKLKSLSSTETYKYLGMSQALGIPEAGVKQALRERFFGRLKKVLKSFLSGGNKVRACNGWVMPVLMYSFGILRWTQTELDALDRKVRSLLTTFRMHHPRSSVMRLYIPRKLGGRGFLNIKNLHNREIYNLRQYCLQQANTDMHRDVVAVDNGLTPLALAKENWRKPVVLSTADRREVWMGKELHGRFYRALNGPDIDLKASVSWLRFGDLFGETEGFVFAIMDEVVMTNNYRKYIMKDGTVDICRACHRPGESLRHIISGCSRLANGEYLHRHNQVAKIVHQQLALKYNLVTSEVPYYRYVPDPVLENGRVTLYWDRSIITDRTIVANKPDIVVIDRLERLAMIIDITIPHDENLMKAEKDKQIKYLDLAHEVVDMWNVDSAIIVPIVISAHGLIAKSLDQHLKRLSLGSWIKGLMQKAVLLDTARIVRRFLSLEP

SEQ ID NO: 27393 - protein, 1203 aa, Eilema depressum
MLTRAKARQIEQNAQTTPTDSSCSSASQPPDAISPRLATAEASSSDEYFSPPTSPTPVRRPGRGRPPASLGPRGPPASNRALATGGNVRRMAWTSSINENVMRAYYVATELGTNLTAYRGRLLSLFQELEPAVNVSAQRLSDQVRAIQRCNLLDGAVLERLFSDVQNSLAIPTSSQAVPPVETSAPTRVSPPQLVSADEVEESETISVSTQYSELLRSTLEDAMLEYRSMIPSSRPRLPHLPMHKRNIALVCALDSLLPNYLENSEDLGDTHSILYCAAVAACRVAGVKFIDNKPATRPKHAVPAWQYRIECRIAEARALIGKLICFRSGNTRPRVMRFVTQAFSGTNVSPQLYASCVTERIDFLKQKVYAWANRIRRYKKRVDRYNQNRIFQKDERWVYRKWEQPESGVDDVARPDADATNTFWCSIWSTPVVHTEGDWIGEVEQACEDIQIMEPIIITPDDVASAVRSLPNWKSPGPDGLHNFWLKWLRNSHACLATQFQSALDSGSLPNFVTTGITHLLHKSGSATDPKNYRPITCLPTVYKLLTSILRVKINSHLEKNSVISIFQNGCRKGARGTKELLIVDMAISQQVRRKRRNLATSWIDYKKAYDSVPHTWLLRVLELYKIDTTLATFLRSCMGQWKTVLRYPGCCQTNDAPIRIERGIFQGDSLSPLWFCLALNPLSTILENSGLGYRLRREGQVISHLLYMDDIKLFAPNNTQLIELLKMTESFSSSIKMEFGLDKCAVMHVERGGIVESEGLILSDSIKLKSLSSTETYKYLGMSQALGIPEAGVKQALRERFFGRLKKVLKSFLSGGNKVRACNGWVMPVLMYSFGILRWTQTELDALDRKVRSLLTTFRMHHPRSSVMRLYIPRKLGGRGFLNIKNLHNREIYNLRQYCLQQANTDMHRDVVAVDNGLTPLALAKENWRKPVVLSTADRREVWMGKELHGRFYRALNGPDIDLKASVSWLRFGDLFGETEGFVFAIMDEVVMTNNYRKYIMKDGTVDICRACHRPGESLRHIISGCSRLANGEYLHRHNQVAKIVHQQLALKYNLVTSEVPYYRYVPDPVLENGRVTLYWDRSIITDRTIVANKPDIVVIDRLERLAVIVDITIPHDENLMKAEKDKQIKYLDLAHEVVDMWNVDSAIIVPIVISAHGLIAKSLDQHLKRLSLGSWIKGLMQKAVLLDTARIVRRFLSLEP

SEQ ID NO: 27394 - protein, 1081 aa, Furcula furcula
MLSLFQTLEPAVNVSAQRLSDQVRAIQRGHMLDDAVLDRLRSEVQGSRVVPCIPSSQAVAPAVNTAPAPRLAATSGDDRDDMSTNISTNVSTQLRSTLEDVVREYRTMPQGLRPRLPRLPMHKRNRALVCALDSLLSSYFDSSEDLADAHSLLYCAAMTACRVARVKFPNSDAATRPRPAVPAWRCRIERRIGEARVLIGKLTCFREGNTRPRVMRFVRRAFSGTGIDPREYFSRVTERIDFLKQKVCAWANRIRRYRARVDRYSQNNMFQRDQRWVYRSWERPSQIGGEVQRPDDDAMIRFWRNIWSVPVTHSEGDWIRDIKQVCEPIPEIGAITIRPQDVADAVRPLPNWKAPGPDGLHNFWLKWLRSSHACLASLFQSAVESGSLPEFLTTGITHLLHKTNSTADPKNYRPITCLPTVYKTLTSILRAKIYRHVEGNSIMSASQNGCRSGARGTKELLLIDMAICQQARRNRKDLSTCWIDYKKAYDSVPHTWLMRVLELYKVNTTLRTFLASCMRQWRTVLLYPGSRQTLGDGEPIRIERGIFQGDSLSPLWFCLALNPLSTLLRGSGLGCRLRRGQVISHLLYMDDLKLFAPTEPQLMGLLKVTETFSNSIRMGFGVDKCAVMHVKRGRLVESRSVQLSDSTDLRTLSATETYKYLGMSQALGINETDMKQSLRERFLGRLRKVLKSFLSGGNRVRAYNGWVMPVLMYSFGILKWTQTELDTLDRTVRTLLTTYRMHHPRSSVMRLYIPRKCGGRGFLNAKTLHNREICNLREYFLHCSGEMHTDVVAVDNGLTPLSLAKGNWRKPVVLTTGDREAVWQSKELHGRFYRALHGPDVDFSASVAWLRFGDLFGETEGFVCAIMDEVVMTNNYRKYILRDGTIDICRACHRPGESLRHIISGCSRLANGEYLHRHNQVARIIHQQLALKYRLVTSEVPYYRYVPEPVLEDGHITLYWDRSIITDRTIVANKPDIVLIDRTERYAMIVDVTVPHDENLVKAEKDKECKYLVLAHEVVDMWDIDRAIIVPIVVSAHGLMAKSLDKHFKRLTLDGWIKGQMQKAVLLETARIVRKFLSLEP

SEQ ID NO: 27395 - protein, 1203 aa, Eilema depressum
MLTRAKARQIEQNAQTTPTDSSCSSASQPPDAISPRLATAEASSSDEYFSPPTSPTPVRRPGRGRPPASLGPRGPPASNRALATGGNVRRMAWTSSINENVMRAYYVATELGTNLTAYRGRLLSLFQELEPAVNVSAQRLSDQVRAIQRCNLLDGAVLERLFSDVQNSLAIPTSSQAVPPVETSAPTRVSPPQLVSADEVEESETISVSTQYSELLRSTLEDAMLEYRSMIPSSRPRLPHLPMHKRNIALVCALDSLLPNYLENCEDLGDTHSILYCAAVAACRVAGVKFIVNKPATRPKHAVPAWQYRIECRIAEARALIGKLICFRSGNTRPRVMRFVTQAFSGTNVSPQLYASCVTERIDFLKQKVYAWANRIRRYKKRVDRYNQNRIFQKDERWVYRKWEQPESGVDDVARPDADATNTFWCSIWSTPVVHTEGDWIREVEQACEDIQIMEPIIITPDDVASAVRSLPNWKSPGPDGLHNFWLKWLRNSHACLATQFQSALDSGSLPNFVTTGITHLLHMSGSATDPKNYRPITCLPTVYKLLTSILRVKINSHLEKNSVISIFQNGCRKGARGTKELLIVDMAISQQVRRKRRNLATSWIDYKKAYDSVPHTWLLRVLELYKIDTTLATFLRSCMGQWKTVLRYPGCCQTNDAPIRIERGIFQGDSLSPLWFCLALNPLSTILENSGLGYRLRREGRVISHLLYMDDIKLFAPNNTQLIELLKMTESFSSSIKMEFGLDKCAVMHVERGGIVESEGLILSDSIKLKSLSSTETYKYLGMSQALGIPEAGVKQALRERFFGRLKKVLKSFLSGGNKVRACNGWVMPVLMYSFGILRWTQTELDVLDRKVRSLLTTFRMHHPRSSVMRLYIPRKLGGRGFLNIKNLHNREIYNLRQYCLQQANTDMHRDVVAVDNGLTPLALAKENWRKPVVLSTADRREVWMGKELHGRFYRALNGPDIDLKASVSWLRFGDLFGETEGFVFAIMDEVVMTNNYRKYIMKDGTVDICRACHRPGESLRHIISGCSRLANGEYLHRHNQVAKIVHQQLALKYNLVTSEVPYYRYVPDPVLENGRVTLYWDRSIVTDRTIVANKPDIVVIDRLERLAMIVDITIPHDENLMKAEKDKQIKYLDLAHEVVDMWNVDSAIIVPIVISAHGLIAKSLDQHLKRLSLGSWIKGLMQKAVLLDTARIVRRFLSLEP

SEQ ID NO: 27396 - protein, 980 aa, Eilema depressum
MLEYRSMTPSSRPRLPHLPMHKRNIALVCALDSLLPNYLENSEDLGDTHSILYCAAVAACRVAGVKFIVNKPATRPKHAVPAWQYRIECRIAEARALIGKLICFRSGNTRPRVMRFVTQAFSGTNVSPQLYASCVTERIDFLKQKVYAWANRIRRYKKRVDRYNQNRIFQKDERWVYRKWEQPESGVDDVARPDADATNTFWCSIWSTPVVHTEGDWIREVEQACEDIQIMEPIIITPDDVASAVRSLPNWKSPGPDGLHNFWLKWLRNSHACLATQFQSALDSGSLPNFVTTGITHLLHKSGSATDPKNYRPITCLPTVYKLLTSILRVKINSHLEKNSVISIFQNGCRKGARGTKELLIVDMAISQQVRRKRRNLATSWIDYKKAYDSVPHTWLLRVLELYKIDTTLATFLRSCMGQWKTVLRYPGCCQTNDAPIRIERGIFQGDSLSPLWFCLALNPLSTILENSGLGYRLRREGQVISHLLYMDDIKLFAPNNTQLIELLKMTESFSSSIKMEFGLDKCAVMHVERGGIVESEGLILSDSIKLKSLSSTETYKYLGMSQALGIPEAGVKQALRERFFGRLKKVLKSFLSGGNKVRACNGWVMPVLMYSFGILRWTQTELDALDRKVRSLLTTFRMHHPRSSVMRLYIPRKLGGRGFLNIKNLHNREIYNLRQYCLQQANTDMHRDVVAVDNGLTPLALAKENWRKPVVLSTADRREVWMGKELHGRFYRALNGPDIDLKASVSWLRFGDLFGETEGFVFAIMDEVVMTNNYRKYIMKDGTVDICRACHRPGESLRHIISGCSRLANGEYLHRHNQVAKIVHQQLALKYNLVTSEVLYYRYVPDPVLENGRVTLYWDRSIITDRTIVANKPDIVVIDRLERLAMIVDITIPHDENLMKAEKDKQIKYLDLAHEVVDMWNVDSAIIVPIVISAHGLIAKSLDQHLKRLSLGSWIKGLMQKAVLLDTARIVRRFLSLEP

SEQ ID NO: 27397 - protein, 1203 aa, Eilema depressum
MLTRAKARQIEQNAQTTPTDSSCSSASQPPDAISPRLATAEASSSDEYFSPPTSPTPVRRPGRGRPPASLGPRGPPASNRALATGGNVRRMAWTSSINENVMRAYYVATELGTNLTAYRVRLLSLFQELEPAVNVSAQRLSDQVRAIQRCNLLDGAVLERLFSDVQNSLAIPTSSQSVPPVETSAPTRVSPPQLVSADEVEESETISVSTQYSELLRSTLEDAMLEYRSMIPSSRPRLPHLPMHKRNIALVCALDSLLPNYLENSEDLGDTHSILYCAAVAACRVAGVKFIVNKPATRPKHAVPAWQYRIECRIAEARALIGKLICFRSGNTRPRVMRFVTQAFSGTNVSPQLYASCVTERIDFLKQKVYAWANRIRRYKKRVDRYNQNRIFQKDERWVYRKWEQPESGVDDVARPDPDATNTFWCSIWSTPVVHTEGDWIREVEQACEDIQIMEPIIITPDDVASAVRSLPNWKSPGPDGLHNFWLKWLRNSHACLATQFQSALDSGSLPNFVTTGITHLLHKSGSATDPKNYRPITCLPTVYKLLTSILRVKINSHLEKKSVISIFQNGCRKGARGTKELLIVDMAISQQVRRKRRNLATSWIDYKKAYDSVPHTWLLRVLELYKIDTTLATFLRSCMGQWKTVLRYPGCCQTNDAPIRIERGIFQGDSLSPLWFCLALNPLSTILENSGLGYRLRREGRVISHLLYMDDIKLFAPNNTQLIELLKMTESFSSSIKMEFGLDKCAVMHVERGGIVESEGLILSDSIKLKSLSSTETYKYLGMSQALGIPEAGVKQALRERFFGRLKKVLKSFLSGGNKVRACNGWVMPVLMYSFGILRWTQTELDALDRKVRSLLTTFRMHHPRSSVMRLYIPRKLGGRGFLNIKNLHNREIYNLRQYCLQQANTDMHRDVVAVDNGLTPLALAKENWRKPVVLGTADRREVWMGKELHGRFYRALNGPDIDLKASVSWLRFGDLFGETEGFVFAIMDEVVMTNNYRKYIMKDGTVDICRACHRPGESLRHIISGCSRLANGEYLHRHNQVAKIVHQQLALKYNLVTPEVPYYRYVPDPVLENGRVTLYWDRSIITDRTIVANKPDIVVIDRLERLAMIVDITIPHDENLMKAEKDKQIKYLDLAHEVVDMWNVDSAIIVPIVISAHGLIAKSLDQHLKRLSLGSWIKGLMQKAVLLDTARIVRRFLSLEP

SEQ ID NO: 27398 - protein, 1203 aa, Eilema depressum
MLTRAKARQIEQNAQTTPTDSSCSSASQPPDAISPRLATAEASSSDEYFSPPTSPTPVRRPGRGRPPASLGPRGPPASNRALATGGNVRRMAWTSSINENVMRAYYVATELGTNLTAYRGRLLSLFQELEPAVNVSAQRLSDQVRAIQRCNLLDGAVLERLFSDVQNSLAIPTSSQAVPPVETSAPTRVSPPQLVSADEVEESETISVSTQYSELLRSTLEDAMLEYRSMIPSSRPRLPHLPMHKRNIALVCALDSLLPNYLENSEDLGDTHSILYCAAVAACRVAGVKFIVNKPATRPKHAVPAWQYRIECRIAEARALIGKLICFRSGNTRPRVMRFVTQAFSGTNVSPQLYASCVTERIDFLKQKVYAWANRIRRYKKCVDRYNQNRIFQKDERWVYRKWEQPESGVDDVARPDADATNTFWCSIWSTPVVHTEGDWIREVEQACEDIQIMEPIIITPDDVASAVRSLPNWKSPGPDGLHNFWLKWLRNSHACLATQFQSALDSGSLPNFVTTGITHLLHKSGSATDPKNYRPITCLPTVYKLLTSILRVKINSHLEKNSVISIFQNGCRKGARGTKELLIVDMAISQQVRRKRRNLATSWIDYKKAYDSVPHTWLLRVLELNKIDTTLATFLRSCMGQWKTVLRYPGCWQTNDAPIRIERGIFQGDSLSPLWFCLALNPLSTILENSGLGYRLRREGRVISHLLYMDDIKLFAPNNTQLIELLKMTESFSSSIKMEFGLDKCAVMHVERGGIMESEGLILSDSIKLKSLSSTETYKYLGMSQALGIPEAGVKQALRERFFGRLKKVLKSFLSGGNKVRACNGWVMPVLMYSFGILRWTQTELDALDRKVRSLLTTFRMHHPRSSVMRLYIPRKLGGRGFLNIKNLHNREIYNLRQYCLQQANTDMHRDVVAVDNGLTPLALAKENWRKPVVLSTADRREVWMGKELHGRFYRALNGPDIDLKASVSWLRFGDLFGETEGFVFAIMDEVVMTNNYRKYIMKDGTVDICRACHRPGESLRHIISGCSRLANGEYLHRHNQVAKIVHQQLALKYNLVTSEVPYYRYVPDPVLENGRVTLYWDRSIITDRTIVANKPDIVVIDRLERLAMIVDITIPHDENLMKAEKDKQIKYLDLAHEVVDMWNVDSAIIVPIVISAHGLIAKSLDQHLKRLSLGSWIKGLMQKAVLLDTARIVRRFLSLEP

SEQ ID NO: 27399 - protein, 1203 aa, Eilema depressum
MLTRAKARQIQQNAQTTPTDSSCSSASQPPDAISPRLATAEASSSDEYFSPPTSPTPVRRPGRGRPPASLGPRGPPASNRALATGGNVRRMAWTSSINENVMRAYYVATELGTNLTAYRGRLLSLFQELEPAVNVSAQRLSDQVRAIQRCNLLDGAVLERLFSDVQNSLAIPTSSQAVPPVETSAPTRVSPPQLVSADEVEESETISVSTQYNELLRSTLEDAMLEYRSMIPSSRPRLPHLPMHKRNIALVCALDSLLPNYLENSEDLGDTHSILYCAAVAACRVAGVKFIVNKPATRPKHAVPAWQYRIECRIAEARALIGKLICFRSGNTRPRVMRFVTQAFSGTNVSPQLYASCVTERIDFLKQKVYAWANRIRRYKKRVDRYNQNRIFQKDERWVYRKWEQPESGVDDVARPDADATNTFWCSIWSTPVVHTEGDWIREVEQACEDIQIMEPIIITPDDVASAVRSLPNWKSPGPDGLHNFWLKWLRNSHACLATQFQSALDSGSLPNFVTTGITHLLHKSGSATDPKNYRPITCLPTVYKLLTSILRVKINSHLEKNSVISIFQNGCRKGARGTKELLIVDMAISQQVRRKRRNLATSWIDYKKAYDSVPHTWLLRVLELYKIDTTLATFLRSCMGQWKTVLRYPGCCQTNDAPIRIERGIFQGDSLSPLWFCLALNPLSTILENSGLGYRLRREGRVISHLLYMDDIKLFAPNNTQLIELLKMTESFSSSIKMEFGLDKCAVMHVERGGIVESEGLILSDSIKLKSLSSTETYKYLGMSQALGIPEAGVKQALRERFFGRLKKVLKSFLSGGNKVRACNGWVMPVLMYSFGILRWTQTELDALDRKVRSLLTTFRMHHPRSSVMRLYIPRKLGGRGFLNIKNLHNREIYNLRQYCLQQANTDMHRDVVAVDNGLTPLALAKENWRKPVVLSTADRREVWMGKELHGRFYRALNGPDIDLKASVSWLRFGDLFGETEGFVFAIMDEVVMTNNYRKYIMKDGTVDICRACHRPGESLRHIISGCSRLANGEYLHRHNQVAKIVHQQLALKYNLVTSEVPYYRYVPDPVLENGRVTLYWDRSIITDRTIVANKPDIVVIDRLERLAMIVDITIPHDENLMKAEKDKQIKYLDLAHEVVDMWSVDSAIIVPIVISAHGLIAKSLDQHLKRLSLGSWIKGLMQKAVLLDTARIVRRFLSLEP

SEQ ID NO: 27400 - protein, 1113 aa, Eilema depressum
MAWTSSINENVMRAYYVATELGTNLTAYRGRLLSLFQELEPAVNVSAQRLSDQVRAIQRCNLLDGAALERLFSDVQNSLAIPTSSQAVPPVETSAPTRVSPPQLVSADEVEESETISVSTQYNELLRSTLEDAMLEYRSMIPSSRPRLPHLPMHKRNIALVCALDSLLPNYLENSEDLGDTHSILYCAAVAACRVAGVKFIVNKPATRPKHAVPAWQYRIECRIAEARALIGKLICFRSGNTRPRVMRFVTQAFSGTNVSPQLYASCVTERIDFLKQKVYAWANRIRRYKKRVDRYNQNRIFQKDERWVYRKWEQPESGVDDVARPDADATNTFWCSIWSTPVVHTEGDWIREVEQACEDIQIMEPIIITPDDVASAVRSLPNWKSPGPDGLHNFWLKWLRNSHACLATQFQSALDSGSLPNFVTTGITHLLHKSGSATDPKNYRPIICLPTVYKLLTSILRVKINSHLEKNSVISIFQNGCRKGARGTKELLIVDMAISQQVRRKRRNLATSWIDYKKAYDSVPHTWLLRVLELYKIDTTLATFLRSCMGQWKTVLRYPGCCQTNDAPIRIERGIFQGDSLSPLWFCLALNPLSTILENSGLGYRLRREGRVISHLLYMDDIKLFAPNNTQLIELLKMTESFSSSIKMEFGLDKCAVMHVERGGIVESEGLILSDSIKLKSLSSTETYKYLGMSQALGIPEAGVKQALRERFFGRLKKVLKSFLSGGNKVRACNGWVMPVLMYSFGILRWTQTELDALDRKVRSLLTTFRMHHPRSSVMRLYIPRKLGGRGFLNIKNLHNREIYNLRQYCLQQANTDMHRDVVAVDNGLTPLALAKENWRKPVVLSTADRREVWMGKELHGRFYRALNGPDIDLKASVSWLRFGDLFGETEGFVFAIMDEVVMTNNYRKYIMKDGTVDICRACHRPGESLRHIISGCSRLANGEYLHRHNQVAKIVHQQLALKYNLVTSEVPYYRYVPDPVLENGRVTLYWDRSIITDRTIVANKPDIVVIDRLERLAMIVDITIPHDENLMKAEKDKQIKYLDLAHEVVDMWNVDSAIIVPIVISAHGLIAKSLDQHLKRLSLGSWIKGLMQKAVLLDTARIVRRFLSLEP

SEQ ID NO: 27401 - protein, 980 aa, Eilema depressum
MLEYRSMIPSSRPRLPHLPMHKRNIALVCALDSLLPNYLENSEDLGDTHSILYCAAVAACRVAGVKFIVNKPATRPKHAVPAWQYRIECRIAEARALIGKLICFRSGNTRPRVMRFVTQAFSGTNVSPQLYTSCVTERIDFLKQKVYAWANRIRRYKKRVDRYNQNRIFQKDERWVYRKWEQPESGVDDVARPDADATNTFWCSIWSTPVVHTEGDWIREVEQACEDIQIMEPIIITPDDVASAVRSLPNWKSPGPDGLHNFWLKWLRNSHACLATQFQSALDSGSLPNFVTTGITHLLHKSGSATDPKNYRPITCLPTVYKLLTSILRVKINSHLEKNSVISIFQNGCRKGARGTKELLIVDMAISQQVRRKRRNLATSWIDYKKAYDSVPHTWLLRVLELYKIDTTLATFLRSCMGQWKTVLRYPGCCQTNDAPIRIERGIFQGDSLSPLWFCLALNPLSTILENSGLGYRLRREGRVISHLLYMDDIKLFAPNNTQLIELLKMTESFSSSIKMEFGLDKCAVMHVERGGIVESEGLILSDSIKLKSLSSTETYKYLGMSQALGIPEAGVKQALRERFFGRLKKVLKSFLSGGNKVRACNGWVMPVLMYSFGILRWTQTELDALDRKVRSLLTTFRMHHPRSSVMRLYIPRKLGGRGFLNIKNLHNREIYNLRQYCLQQANTDMHRDVVAVDNGLTPLALAKENWRKPVVLSTADRREVWMGKELHGRFYRALNGPDIDLKASVSWLRFGDLFGETEGFVFAIMDEVVMTNNYRKYIMKDGTVDICRACHRPGESLRHIISGCSRLANGEYLHRHNQVAKIVHQQLALKYNLVTSEVPYYRYVPDPVLENGRVTLYWDRSIITDRTIVANKPDIVVIDRLERLAMIVDITIPHDENLMKAEKDKQIKYLDLAHEVVDMWNVDSAIIVPIVISAHGLIAKSLDQHLKRLSLGSWIEGLMQKAVLLDTARIVRRFLSLEP

SEQ ID NO: 27402 - protein, 1203 aa, Eilema depressum
MLTRAKARQIQQNAQTTPTDSSCSSASQPPDAISPRLATAEASSSDEYFSPPTSPTPVRRPGRGRPPASLGPRGRPASNRALATGGNVRRMAWTSSINENVMRAYYVATELGTNLTAYRGRLLSLFQELEPAVNVSAQRLSDQVRAIQRCNLLDGAVLERLFSDVQNSLAIPTSSQAVPPVETSAPTRVSPPQLVSADEVEESETISVSTQYNELLRSTLEDAMLEYRSMIPSSRPRLPHLPMHKRNIALVCALDSLLPNYLENSEDLGDTHSILYCAAVAACRVAGVKFIVNKPATRPKHAVPAWQYRIECRIAEARALIGKLICFRSGNTRPRVMRFVTQAFSGTNVSPQLYTSCVTERIDFLKQKVYAWANRIRRYKKRVDRYNQNRIFQKDERWVYRKWEQPESGVDDVARPDADATNTFWCSIWSAPVVHTEGDWIREVEQACEDIQIMEPIIITPDDVASAVRSLPNWKSPGPDGLHNFWLKWLRNSHACLATQFQSALDSGSLPNFVTTGITHLLHKSGSATDPKNYRPITCLPTVYKLLTSILRVKINSHLEKNSVISIFQNGCRKGARGTKELLIVDMAISQQVRRKRRNLATSWIDYKKAYDSVPHTWLLRVLELYKIDTTLATFLRSCMGQWKTVLRYPGCCQTNDAPIRIERGIFQGDSLSPLWFCLALNPLSTILENSGLGYRLRREGRVISHLLYMDDIKLFAPNNTQLIELLKMTESFSSSIKMEFGLDKCAVMHVERGGIVESEGLILSDSIKLKSLSSTETYKYLGMSQALGIPEAGVKQALRERFFGRLKKVLKSFLSGGNKVRACNGWVMPVLMYSFGILRWTQTELDALDRKVRSLLTTFRMHHPRSSVMRLYIPRKLGGRGFLNIKNLHNREIYNLRQYCLQQANTDMHCDVVAVDNGLTPLALAKENWRKPVVLGTADRREVWMGKELHGRFYRALNGPDIDLKASVSWLRFGDLFGETEGFVFAIMDEVVMTNNYRKYIMKDGTVDICRACHRPGESLRHIISGCSRLANGEYLHRHNQVAKIVHQQLALKYNLVTSEVPYYRYVPDPVLENGRVTLYWDRSIITDRTIVANKPDIVVIDRLERLAMIVDITIPHDENLMKAEKDKQIKYLDLAHEVVDMWNVDSAIIVPIVISAHGLIAKSLDQHLKRLSLGSWIKGLMQKAVLLDTARIVRRFLSLEP

SEQ ID NO: 27403 - protein, 1201 aa, Arctia plantaginis
MLTRARSRALTTSPDSSLCSVLPSPEATTEVPAVAEASSSTSSDEFFSPPTSPTPVRRQGRGRPPTSLGSRGLLTSNRVPATGGDVRRMKWTKSINENVMRAYYRATEVGTNLTAYRVRLVSLFQELEPAVNVSAQRLSDQVRAIQRCHLLDDAVLERIRSDIRNSLIIPSSSHTVDSVANNTPQLASYTDDIDELVESEVISVSTQYNDRIRSALEDAILEYRYLNCNDRPRLFRLPIHKRNLALVGALDSLLPEYLDNSEDLSDAHSILYCAAIAACRVAGVKIANNVTTTRPKSTVPAWQYRIERRITETRTLIGKLISYRSGNMRPRVMRFVKQAFLGTTISPQQYMSCVTERIDFLKQKIYAWANRIRRYKKRTDRYNQNRMFQRNEKWVYRKWEEPDPCVGDRHLPDENVTNTFWRNIWSVPVTHIEGDWLQDVRRSCESITPMEPVKIDKDDVSCAVRSLPNWKSPGPDGLHNFWLKWFRSSHARLASQFQAALDSGSLPQFLTTGITHLLYKSGSVMDPKNFRPITCLPTMYKLLTSILRLKITLHINNNSIMSVSQNGCRSGTRGTKDLLIIDMTISQQVRCNRKSLATCWIDYKKAYDSVPHTWLLKVLELYKIDTTLCTFLKSCMGQWRTALRYPGCRQTAIHDVLIKIERGIFQGDSLSPLWFCLALNPLSTLLEGSGLGYRLQKDDQVISHLLYMDDLKLLASNKLQLTKLLKVTENFSNSIKMEFGVDKCAVMYVKKGVIVESEGIELLDSTKLRSLSATETYKYLGISQSLGIPESNMKQTLQERFFGRLKKVLKSLLSGGNKVRACNGWVMPVLMYSFGILRWTQTELDALDRKVRTLLIASRMHHPRSSVMRLYIPRKLGGRGLLNIKTLHNREVCNLREYFLHTDVGVHRNVVAVDTGFTPLALAKENWRRPVVLGVNDRREVWKGKELHGRSFYRALNGSDIDLKASTTWLRHGDLFGETEGFVCAIMDEVIMTNNYRKYILKDGTVDICRACHRPGESIRHIISGCSRLANGEYLHRHNQVARIVHQQLALKYHLVNLEVPYYRYVPDPVLENGRATLYWDRSIITDRTIVANKPDIVLIDRLERRAMIVDIAVPHDENLVKVEKEKQIKYLDLSHEIVDMWNVDSVIIVPIVVSAHGLIAKSLDQHLKRLTLDGWIKGLMQKAVLLDTARIVRRFLSLES

SEQ ID NO: 27404 - protein, 1080 aa, Arctia plantaginis
MITRARSKAQLTSPDSSLRSVLPSTETTTEVPAVAEASSSTSSDEFFSPPTSPRPVRRQGRGRPPICLGSRGPLTSNRVPATGGNVRRMKWTNSINENVMRAYYRATEMGTNLTAYRVRLVSLFQELEPAVNVSAQRLSDQVRAIQRCHLLDDAVLERIRSDLRNSLIIPSSSHTVDLVANSTPQLVSHTNDVDELVEGEVISVSTQYKDRIRSALEDAILEYRYVNWNNRPRLSRLPIHKRNLALVGALDSLLPDYLDNSEDLGDTHSILYCAAVAVCRVAGVNIVGNVITTRPKSTVPAWQCRIERRIAETRVLIGKLISFRSGNTRPRVMRFVKQAFLGTTIGPQQYMSCVTERIDFLKQKIYAWANRLRRYKKRIDRYNQNRMFQRNEKWVYRKWEEPDPCVSHGHLPDENVTHTFWRNIWSVPVTHIEGDWLRDVRRSCESITPMEPVIIDKDDVSCAVRSLPNWKSPGLDGLHNFWLKWFRSSHACLASQFQAALDSGSLPQFLTTGITHLLYKSGSVMDPKNFRPITCLPTMYKLLTSILRLKITLHINNNSIMSVSQNGCRSGSRGTKDLLIIDRAISQQVRRNRKSLATCWIDYKKAYDSVPHTWLLRVLELYKIDTTLCTFLKSCMGQWRTALRYPGCRQTTVIDAPIKIERGIFQGDSLSPLWFCLALNPLSTLLEGSGLGYRLQKDDQVISHLLYMDDLKLLAPTKLQLSALLKVTENFSNSIKMEFGVDKCAVMYVKKGEIVESEGIELSDLTKLRSLSATETYKYLGISQSLGIPESDMKQTLQERFFGRLKKVLKSLLSGGNKVRACNGWVMPILMYSFGILKWTQTELDALDRRVRTLLTAFRMHHPRSSVMRLYIPRKLGGRGLLNIKTLHNREICNLREYFLHTDVGMHRNVVAVDIGFTPLALAKENWRKPVVFSTNDRREVWKGKELHGRFYRALNGSNIDFKASTTWLRYGDLFGETEGFVCAIMDEVIMTNNYRKYILKDGTVDICRACHRPGESIRHIISGCSRLANGEYLHRHNQVARIVHQQLALKYHLVNLEVPYYRYVPDPVLENGRATLYWD

SEQ ID NO: 27405 - protein, 1200 aa, Arctia plantaginis
MLTRARSRALTTSPDSSLRSVLPSPEATTEVPAVAEASSSTSSDEFFSPPTSPTPVRRQGRGRPPTSLGSRGLLTSNRVPATGGDVRRMKWTKSINENVMRAYYRATEVGTNLTAYRVRLVSLFQELEPAVNVSAQRLSDQVRAIQRCHLLDDAVLERIRSDIRNSLIIPSSSHTVDSVANSTPQLASYTDDIDELVESEVISVSTQYNDRIRSALEDAILEYRYLNCNDRPRLFRLPIHKRNLALVGALDSLLPEYLDNSEDLSDTHSILYCAAIAACRVAGVKIANNVTTTRPKSTVPAWQYRIERRITETRTLIGKLISYRSGNMRPRVMRFVKQAFLGTTISPQQYMSCVTERIDFLKQKIYAWANRIRRYKKRIDRYNQNRMFQRNEKWVYRKWEEPDPCVGDRHLPDENVTNTFWRNIWSVPVTHIEGDWLQDVRRSCESITPMEPVKIDKDDVSCAVRSLPNWKSPGPDGLHNFWLKWFRSSHARLASQFQAALDSGSLPQFLTTGITHLLYKSGSVMDPKNFRPITCLPTMYKLLTSILRLKITLHINNNSIMSVSQNGCRSGTRGTKDLLIIDMTISQQVRCNRKSLATCWIDYKKAYDSVPHTWLLKVLELYKIDTTLCTFLKSCMRQWRTALRYPGCRQTAIHDVLIKIERGIFQGDSLSPLWFCLALNPLSTLLEGSGLGYRLQKDDQVISHLLYMDDLKLLASNKLQLTKLLKVTENFSNSIKMEFGVDKCAVMYVKKGVIVESEGIELLDSTKLRSLSATETYKYLGISQSLGIPESNMKQTLQERFFGRLKKVLKSLLSGGNKVRACNGWVMPVLMYSFGILKWTQTELDALDRKVRTLLTASRMHHPRSSVMRLYIPRKLGGRGLLNIKTLHNREVCNLREYFLHTDVGVHRNVVAVDTGFTPLALAKENWRRPVVLGVNDRREVWKGKELHGRFYRALNGSDIDLKASTTWLRHGDLFGETEGFVCAIMDEVIMTNNYRKYILKDGTVDICRACHRPGESIRHIISGCSRLANGEYLHRHNQVARIVHQQLALKYHLVNLEVPYYRYVPDPVLENGRATLYWDRSIITDRTIVANKPDIVLIDRLERRAMIVDIAVPHDENLVKVEKEKQIKYLDLSHEIVDMWNVDSVIIVPIVVSAHGLIAKSLDQHLKRLTLDGWIKGLMQKAVLLDTARIVRRFLSLES

SEQ ID NO: 27406 - protein, 1200 aa, Arctia plantaginis
MLTRARSRALTTSPDSSLRSVLPSPEATTEVPAVAEASSSTSSDEFFSPPTSPTPVRRQGRGRPPTSLGSRGLLTSNRVPATGGDVRRMKWTKSINENVMRAYYRATEVGTNLTAYRVRLVSLFQELEPAVNVSAQRLSDQVRAIQRCHLLDDAVLERIRSDIRNSLIIPSSSHTVDSVANSTPQLASYTDDIDELVESEVISVSTQYNDRIRSALEDAILEYRYLNCNDRPRLFRLPIHKRNLALVGALDSLLPEYLDNSEDLSDTHSILYCAAIAACRVAGVKIANNVTTTRPKSTVPAWQYRIERRITETRTLIGKLISYRSGNMRPRVMRFVKQAFLGTTISPQQYMSCVTERIDFLKQKIYAWANRIRRYKKRIDRYNQNRMFQRNEKWVYRKWEEPDPCVGDRHLPDENVTNTFWRNIWSVPVTHIEGDWLQDVRRSCESITPMEPVKIDKDDVSCAVRSLPNWKSPGPDGLHNFWLKWFRSSHARLASQFQAALDSGSLPQFLTTGITHLLYKSGSVMDPKNFRPITCLPTMYKLLTSILRLKITLHINNNSIMSVSQNGCRSGTRGTKDLLIIDMTISQQVRCNRKSLATCWIDYKKAYDSVPHTWLLKVLELYKIDTTLCTFLKSCMGQWRTALRYPGCRQTAIHDVLIKIERGIFQGDSLSPLWFCLALNPLSTLLEGSGLGYRLQKDDQVISHLLYMDDLKLLASNKLQLTKLLKVTENFSNSIKMEFGVDKCAVMYVKKGVIVESEGIELLDSTKLRSLSATETYKYLGISQSLGIPESNMKQTLQERFFGRLKKVLKSLLSGGNKVRACNGWVMPVLMYSFGILKWTQTELDALDRKVRTLLTASRMHHPRSSVMRLYIPRKLGGRGLLNIKTLHNREVCNLREYFLHTDVGVHRNVVAVDTGFTPLALAKENWRRPVVLGVNDRREVWKGKELHGRFYRALNGSDIDLKASTTWLRHGDLFGETEGFVCAIMDEVIMTNNYRKYILKDGTVDICRACHRPGESIRHIISGCSRLANGEYLHRHNQVARIVHQQLALKYHLVNLEVPYYRYVPDPVLENGRATLYWDRSIITDRTIVANKPDIVLIDRLERRAMIVDIAVPHDENLVKVEKEKQIKYLDLSHEIVDMWNVDSVIIVPIVVSAHGLIAKSLDQHLKRLTLDGWIKGLMQKAVLLDTARIVRRFLSLES

SEQ ID NO: 27407 - protein, 1200 aa, Arctia plantaginis
MLTRARSRALTTSPDSSLRSVLPSPEATTEVPAVAEASSSTSSDEFFSPPTSPTPVRRQGRGRPPTSLGSRGLLTSNRVPATGGDVRRMKWTKSINENVMRAYYRATEVGTNLTAYRVRLVSLFQELEPAVNVSAQRLSDQVRAIQRCHLLDDAVLERIRSDIRNSLIIPSSSHTVDSVANSTPQLASYTDDIDELVESEVISVSTQYNDRIRSALEDAILEYRYLNCNDRPRLFRLPIHKRNLALVGALDSLLPEYLDNSEDLSDTHSILYCAAIAVCRVAGVKIANNVTTTRPKSTVPAWQYRIERRITETRTLIGKLISYRSGNMRPRVMRFVKQAFLGTTISPQQYMSCVTERIDFLKQKIYAWANRIRRYKKRIDRYNQNRMFQRNEKWVYRKWEEPDPCVGDRHLPDENVTNTFWRNIWSVPVTHIEGDWLQDVRRSCESITPMEPVKIDKDDVSCAVRSLPNWKSPGPDGLHNFWLKWFRSSHARLASQFQAALDSGSLPQFLTTGITHLLYKSGSVMDPKNFRPITCLPTMYKLLTSILRLKITLHINNNSIMSVSQNGCRSGTRGTKDLLIIDMTISQQVRCNRKSLATCWIDYKKAYDSVPHTWLLKVLELYKIDTTLCTFLKSCMGQWRTALRYPGCRQTAIHDVLIKIERGIFQGDSLSPLWFCLALNPLSTLLEGSGLGYRLQKDDQVISHLLYMDDLKLLASNKLQLTKLLKVTENFSNSIKMEFGVDKCAVMYVKKGVIVESEGIELLDSTKLRSLSATETYKYLGISQSLGIPESNIKQTLQERFFGRLKKVLKSLLSGGNKVRACNGWVMPVLMYSFGILRWTQTELDALDRKVRTLLTASRMHHPRSSVMRLYIPRKLGGRGLLNIKTLHNREVCNLREYFLHTDVGVHRNVVAVDTGFTPLALAKENWRRPVVLGVNDRREVWKGKELHGRFYRALNGSDIDLKASTTWLRHGDLFGETEGFVCAIMDEVIMTNNYRKYILKDGTVDICRACHRPGESIRHIISGCSRLANGEYLHRHNQVARIVHQQLALKYHLVNLEVPYYRYVPDPVLENGRATLYWDRSIITDRTIVANKPDIVLIDRLERRAMIVDIAVPHDENLVKVEKEKQIKYLDLSHEIVDMWNVDSVIIVPIVVSAHGLIAKSLDQHLKRLTLDGWIKGLMQKAVLLDTARIVRRFLSLES

SEQ ID NO: 27408 - protein, 1200 aa, Arctia plantaginis
MLTRARSRALTTSPDSSLRSVLPSPEATTEVPAVAEASSSTSSDEFFSPPTSPTPVRRQGRGRPPTSLGSRGLLTSNRVPATGGDVRRMKWTKSINENVMRAYYRATEVGTNLTAYRVRLVSLFQELEPAVNVSAQRLSDQVRAIQRCHLLDDAVLERIRSDIRNSLIIPSSSHTVDSVANSTPQLASYTDDIDELVESEVISVSTQYNDRIRSALEDAILEYRYLNCNDRPRLFRLPIHKRNLALVGALDSLLPEYLDNSEDLSYTHSILYCAAIAVCRVAGVKIANNVTTTRPKSTVPAWQYRIERRITETRTLIGKLISYRSGNMRPRVMRFVKQAFLGTTISPQQYMSCVTERIDFLKQKIYAWANRIRRYKKRIDRYNQNRMFQRNEKWVYRKWEEPDPCVGDRHLPDENVTNTFWRNIWSVPVTHIEGDWLQDVRRSCESITPMEPVKIDKDDVSCAVRSLPNWKSPGPDGLHNFWLKWFRSSHARLASQFQAALDSGSLPQFLTTGITHLLYKSGSVMDPKNFRPITCLPTMYKLLTSILRLKITLHINNNSIMSVSQNGCRSGTRGTKDLLIIDMTISQQVRCNRKSLATCWIDYKKAYDSVPHTWLLKVLELYKIDTTLCTFLKSCMGQWRTALRYPGCRQTAIHDVLIKIERGIFQGDSLSPLWFCLALNPLSTLLEGSGLGYRLQKDDQVISHLLYMDDLKLLASNKLQLTKLLKVTENFSNSIKMEFGVDKCAVMYVKKGVIVESEGIELLDSTKLRSLSATETYKYLGISQSLGIPESNMKQTLQERFFGRLKKVLKSLLSGGNKVRACNGWVMPVLMYSFGILRWTQTELDALDRKVRTLLTASRMHHPRSSVMRLYIPRKLGGRGLLNIKTLHNREVCNLREYFLHTDVGVHRNVVAVDTGFTPLALAKENWRRPVVLGVNDRREVWKGKELHGRFYRALNGSDIDLKASTTWLRHGDLFGETEGFVCAIMDEVIMTNNYRKYILKDGTVDICRACHRPGESIRHIISGCSRLANGEYLHRHNQVARIVHQQLALKYHLVNLEVPYYRYVPDPVLENGRATLYWDRSIITDRTIVANKPDIVLIDRLERRAMIVDIAVPHDENLVKVEKEKQIKYLDLSHEIVDMWNVDSVIIVPIVVSAHGLIAKSLDQHLKRLTLDGWIKGLMQKAVLLDTARIVRRFLSLES

SEQ ID NO: 27409 - protein, 1200 aa, Arctia plantaginis
MLTRARSRALTTSPDSSLRSVLPSPEATTEVPAVAEASSSTSSDEFFSPPTSPTPVRRQGRGRPPTSLGSRGLLTSNRVPATGGDVRRMKWTKSINENVMRAYYRATEVGTNLTAYRVRLVSLFQELEPAVNVSAQRLSDQVRAIQRCHLLDDAVLERIRSDIRNSLIIPSSSHTVDSVANSTPQLASYTDDIDELVESEVISVSTQYNDRIRSALEDAILEYRYLNCNDRPRLFRLPIHKRNLALVGALDSLLPEYLDNSEDLSDTHSILYCAAIAACRVAGVKIANNVTTTRPKSTVPAWQYRIERRITETRTLIGKLISYRSGNMRPRVMRFVKQAFLGTTISPQQYMSCVTERIDFLKQKIYAWANRIRRYKKRIDRYNQNRMFQRNEKWVYRKWEEPDPCVGDRHLPDENVTNTFWRNIWSVPVTHIEGDWLQDVRRSCESITPMEPVKIDKDDVSCAVRSLPNWKSPGPDGLHNFWLKWFRSSHARLASQFQAALDSGSLPQFLTTGITHLLYKSGSVMDPKNFRPITCLPTMYKLLTSILRLKITLHINNNSIMSVSQNGCRSGTRGTKDLLIIDMTISQQVRCNRKSLATCWIDYKKAYDSVPHTWLLKVLELYKIDTTLCTFLKSCMGQWRTALRYPGCRQTAIHDVLIKIERGIFQGDSLSPLWFCLALNPLSTLLEGSGLGYRLQKDDQVISHLLYMDDLKLLASNKLQLTKLLKVTENFSNSIKMEFGVDKCAVMYVKKGVIVESEGIELLDSTKLRSLSATETYKYLGISQSLGIPESNMKQTLQERFFGRLKKVLKSLLSGGNKVRACNGWVMPVLMYSFGILRWTQTELDALDRKVRTLLTASRMHHPRSSVMRLYIPRKLGGRGLLNIKTLHNREVCNLREYFLHTDVGVHRNVVAVDTGFTPLALAKENWRRPVVLGVNDRREVWKGKELHGRFYRALNGSDIDLKASTTWLRHGDLFGETEGFVCAIMDEVIMTNNYRKYILKDGTVDICRACHRPGESIRHIISGCSRLANGEYLHRHNQVARIVHQQLALKYHLVNLEVPYYRYVPDPVLENGRATLYWDRSIITDRTIVANKPDIVLIDRLERRAMIVDIAVPHDENLVKVEKEKQIKYLDLSHEIVDMWNVDSVIIVPIVVSAHGLIAKSLDQHLKRLTLDGWIKGLMQKAVLLDTARIVRRFLSLES

SEQ ID NO: 27410 - protein, 1200 aa, Arctia plantaginis
MLTRARSRALTTSPDSSLRSVLPSPEATTEVPAVAEASSSTSSDEFFSPPTSPTPVRRQGRGRPPTSLGFRGLLTSNRVPATGGDVRRMKWTKSINENVMRAYYRATEVGTNLTAYRVRLVSLFQELEPAVNVSAQRLSDQVRAIQRCHLLDDAVLERIRSDIRNSLIIPSSSHTVDSVANSTPQLASYTDDIDELVESEVISVSTQYNDRIRSALEDAILEYRYLNCNDRPRLFRLPIHKRNLALVGALDSLLPEYLDNSEDLSDTHSILYCAAIAVCRVAGVKIANNVTTTRPKSTVPAWQYRIERRITETRTLIGKLISYRSGNMRPRVMRFVKQAFLGTTISPQQYMSCVTERIDFLKQKIYAWANRIRRYKKRIDRYNQNRMFQRNEKWVYRKWEEPDPCVGDRHLPDENVTNTFWRNIWSVPVTHIEGDWLQDVRRSCESITPMEPVKIDKDDVSCAVRSLPNWKSPGPDGLHNFWLKWFRSSHARLASQFQAALDSGSLPQFLTTGITHLLYKSGSVMDPKNFRPITCLPTMYKLLTSILRLKITLHINNNSIMSVSQNGCRSGTRGTKDLLIIDMTISQQVRCNRKSLATCWIDYKKAYDSVPHTWLLKVLELYKIDTTLCTFLKSCMGQWRTALRYPGCRQTAIHDVLIKIERGIFQGDSLSPLWFCLALNPLSTLLEGSGLGYRLQKDDQVISHLLYMDDLKLLASNKLQLTKLLKVTENFSNSIKMEFGVDKCAVMYVKKGVIVESEGIELLDSTKLRSLSATETYKYLGISQSLGIPESNMKQTLQERFFGRLKKVLKSLLSGGNKVRACNGWVMPVLMYSFGILRWTQTELDALDRKVRTLLTASRMHHPRSSVMRLYIPRKLGGRGLLNIKTLHNREVCNLREYFLHTDVGVHRNVVAVDTGFTPLALAKENWRRPVVLGVNDRREVWKGKELHGRFYRALNGSDIDLKASTTWLRHGDLFGETEGFVCAIMDEVIMTNNYRKYILKDGTVDICRACHRPGESIRHIISGCSRLANGEYLHRHNQVARIVHQQLALKYHLVNLEVPYYRYVPDPVLENGRATLYWDRSIITDRTIVANKPDIVLIDRLERRAMIVDIAVPHDENLVKVEKEKQIKYLDLSHEIVDMWNVDSVIIVPIVVSAHGLIAKSLDQHLKRLTLDGWIKGLMQKAVLLDTARIVRRFLSLES

SEQ ID NO: 27411 - protein, 873 aa, Arctia plantaginis
MRPRVMRFVKQAFLGTTISPQQYMSCVTERIDFLKQKIYAWANRIRRYKKRIDRYNQNRMFQRNEKWVYRKWEEPDPCVGDRHLPDENVTNTFWRNIWSVPVTHIEGDWLQDVRRSCESITPMEPVKIDKDDVSCAVRSLPNWKSPGPDGLHNFWLKWFRSSHARLASQFQAALDSGSLPQFLTTGITHLLYKSGSVMDPKNFRPITCLPTMYKLLTSILRLKITLHINNNSIMSVSQNGCRSGTRGTKDLLIIDMTISQQVRCNRKSLATCWIDYKKAYDSVPHTWLLKVLELYKIDTTLCTFLKSCMGQWRTALRYPGCRQTAIHDVLIKIERGIFQGDSLSPLWFCLALNPLSTLLEGSGLGYRLQKDDQVISHLLYMDDLKLLASNKLQLTKLLKVTENFSNSIKMEFGVDKCAVMYVKKGVIVESEGIELLDSTKLRSLSATETYKYLGISQSLGIPESNMKQTLQERFFGRLKKVLKSLLSGGNKVRACNGWVMPVLMYSFGILRWTQTELDALDRKVRTLLTASRMHHPRSSVMRLYIPRKLGGRGLLNIKTLHNREVCNLREYFLHTDVGVHRNVVAVDTGFTPLALAKENWRRPVVLGVNDRREVWKGKELHGRFYRALNGSDIDLKASTTWLRHGDLFGETEGFVCAIMDEVIMTNNYRKYILKDGTVDICRACHRPGESIRHIISGCSRLANGEYLHRHNQVARIVHQQLALKYHLVNLEVPYYRYVPDPVLENGRATLYWDRSIITDRTIVANKPDIVLIDRLERRAMIVDIAVPHDENLVKVEKEKQIKYLDLSHEIVDMWNVDSVIIVPIVVSAHGLIAKSLDQHLKRLTLDGWIKGLMQKAVLLDTARIVRRFLSLES

SEQ ID NO: 27412 - protein, 1200 aa, Arctia plantaginis
MLTRARSRALTTSPDSSLRSVLPSPEATTEVPAVAEASSSTSSDEFFSPPTSPTPVRRQGRGRPPTSLGSRGLLTSNRVPATGGDVRRMKWTKSINENVMRAYYRATEVGTNLTAYRVRLVSLFQELEPAFNVSAQRLSDQVRAIQRCHLLDDAVLERIRSDIRNSLIIPSSSHTVDLVANSTPQLASYTDDIDELVESEVISVSTQYNDRIRSALEDAILEYRYLNCNDRPRLFRLPIHKRNLALVGALDSLLPEYLDNSEDLSDTHSILYCAAIAVCRVAGVKIANNVTTTRPKSTVPAWQYRIERRITETRTLIGKLISYRSGNMRPRVMRFVKQAFLGTTISPQQYMSCVTERIDFLKQKIYAWANRIRRYKKRIDRYNQNRMFQRNEKWVYRKWEEPDPCVGDRHLPDENVTNTFWRNIWSVPVTHIEGDWLQDVRRSCESITPMEPVKIDKDDVSCAVRSLPNWKSPGPDGLHNFWLKWFRSSHARLASQFQAALDSGSLPQFLTTGITHLLYKSGSVMDPKNFRPITCLPTMYKLLTSILRLKITLHINNNSIMSVSQNGCRSGTRGTKDLLIIDMTISQQVRCNRKSLATCWIDYKKAYDSVPHTWLLKVLELYKIDTTLCTFLKSCMGQWRTALRYPGCRQTAIHDVLIKIERGIFQGDSLSPLWFCLALNPLSTLLEGSGLGYRLQKDDQVISHLLYMDDLKLLASNKLQLTKLLKVTENFSNSIKMEFGVDKCAVMYVKKGVIVESEGIELLDSTKLRSLSATETYKYLGISQSLGIPESNMKQTLQERFFGRLKKVLKSLLSGGNKVRACNGWVMPVLMYSFGILRWTQTELDALDRKVRTLLTASRMHHPRSSVMRLYIPRKLGGRGLLNIKTLHNREVCNLREYFLHTDVGVHRNVVAVDTGFTPLALAKENWRRPVVLGVNDRREVWKGKELHGRFYRALNGSDIDLKASTTWLRHGDLFGETEGFVCAIMDEVIMTNNYRKYILKDGTVDICRACHRPGESIRHIISGCSRLANGEYLHRHNQVARIVHQQLALKYHLVNLEVPYYRYVPDPVLENGRATLYWDRSIITDRTIVANKPDIVLIDRLERRAMIVDIAVPHDENLVKVEKEKQIKYLDLSHEIVDMWNVDSVIIVPIVVSAHGLIAKSLDQHLKRLTLDGWIKGLMQKAVLLDTARIVRRFLSLES

SEQ ID NO: 27413 - protein, 1200 aa, Arctia plantaginis
MLTRARSRALTTSPDSSLRSVLPSPEATTEVPAVAEASSSTSSDEFFSPPTSPTPVRRQGRGRPPTSLGSRGLLTSNRVPATGGDVRRMKWTKSINENVMRAYYRATEVGTNLTAYRVRLVSLFQELEPAVNVSAQRLSDQVRAIQRCHLLDDAVLERIRSDIRNSLIIPSSSHTVDSVANNTPQLASYTDDIDELVESEVISVSTQYNDRIRSALEDAILEYRYLNCNDRPRLFRLPIHKRNLALVGALDSLLPEYLDNSEDLSDTHSILYCAAIAACRVAGVKIANNVTTTRPKSTVPAWQYRIERRITETRTLIGKLISYRSGNMRPRVMRFVKQAFLGTTISPQQYMSCVTERIDFLKQKIYAWANRIRRYKKRTDRYNQNRMFQRNEKWVYRKWEEPDPCVGDRHLPDENVTNTFWRNIWSVPVTHIEGDWLQDVRRSCESITPMEPVKIDKDDVSCAVRSLPNWKSPGPDGLHNFWLKWFRSSHARLASQFQAALDSGSLPQFLTTGITHLLYKSGSVMDPKNFRPITCLPTMYKLLTSILRLKITLHINNNSIMSVSQNGCRSGTRGTKDLLIIDMTISQQVRCNRKSLATCWIDYKKAYDSVPHTWLLKVLELYKIDTTLCTFLKSCMGQWRTALRYPGCRQTAIHDVLIKIERGIFQGDSLSPLWFCLALNPLSTLLEGSGLGYRLQKDDQVISHLLYMDDLKLLASNKLQLTKLLKVTENFSNSIKMEFGVDKCAVMYVKKGVIVESEGIELLDSTKLRSLSATETYKYLGISQSLGIPESNMKQTLQERFFGRLKKVLKSLLSGGNKVRACNGWVMPVLMYSFGILRWTQTELDALDRKVRTLLTASRMHHPRSSVMRLYIPRKLGGRGLLNIKTLHNREVCNLREYFLHTDVGVHRNVVAVDTGFTPLALAKENWRRPVVLGVNDRREVWKGKELHGRFYRALNGSDIDLKASTTWLRHGDLFGETEGFVCAIMDEVIMTNNYRKYILKDGTVDICRACHRPGESIRHIISGCSRLANGEYLHRHNQVARIVHQQLALKYHLVNLEVPYYRYVPDPVLENGRATLYWDRSIITDRTIVANKPDIVLIDRLERRAMIVDIAVPHDENLVKVEKEKQIKYLDLSHEIVDMWNVDSVIIVPIVVSAHGLIAKSLDQHLKRLTLDGWIKGLMQKAVLLDTARIVRRFLSLES

SEQ ID NO: 27414 - protein, 873 aa, Arctia plantaginis
MRPRVMRFVKQAFLGTTISPQQYMSCVTERIDFLKQKIYAWANRIRRYKKRIDRYNQNRMFQRNEKWVYRKWEEPDPCVGDRHLPDENVTNTFWRSIWSVPVTHIEGDWLQDVSRSCESITPMEPVKIDKDDVSCAVRSLPNWKSPGPDGLHNFWLKWFRSSHARLASQFQAALDSGSLPQFLTTGITHLLYKSGSVMDPKNFRPITCLPTMYKLLTSILRLKITLHINNNSIMSVSQNGCRSGTRGTKDLLIIDMTISQQVRCNRKSLATCWIDYKKAYDSVPHTWLLKVLELYKIDTTLCTFLKSCMGQWRTALRYPGCRQTAIHDVLIKIERGIFQGDSLSPLWFCLALNPLSTLLEGSGLGYRLQKDDQVISHLLYMDDLKLLASNKLQLTKLLKVTENFSNSIKMEFGVDKCAVMYVKKGVIVESEGIELLDSTKLRSLSATETYKYLGISQSLGIPESNMKQTLQERFFGRLKKVLKSLLSGGNKVRACNGWVMPVLMYSFGILRWTQTELDALDRKVRTLLTASRMHHPRSSVMRLYIPRKLGGRGLLNIKTLHNREVCNLREYFLHTDVGVHRNVVAVDTGFTPLALAKENWRRPVVLGVNDRREVWKGKELHGRFYRALNGSDIDLKASTTWLRHGDLFGETEGFVCAIMDEVIMTNNYRKYILKDGTVDICRACHRPGESIRHIISGCSRLANGEYLHRHNQVARIVHQQLALKYHLVNLEVPYYRYVPDPVLENGRATLYWDRSIITDRTIVANKPDIVLIDRLERRAMIVDIAVPHDENLVKVEKEKQIKYLDLSHEIVDMWNVDSVIIVPIVVSAHGLIAKSLDQHLKRLTLDGWIKGLMQKAVLLDTARIVRRFLSLES

SEQ ID NO: 27415 - protein, 1200 aa, Arctia plantaginis
MLTRARSRALTTSPDSSLRSVLPSPEATTEVPAVAEASSSTSGDEFFSPPTSPTPVRRQGRGRPPTSLGSRGLLTSNRVPATGGDVRRMKWTKSINENVMRAYYRATEVGTNLTAYRVRLVSLFQKLEPAVNVSAQRLSDQVRAIQRCHLLDDAVLERIRSDIRNSLIIPSSSHTVDSVANSTPQLASYTDDIDELVESEVISVSTQYNDRIRSALEDAILEYRYLNCNDRPRLFRLPIHKRNLALVGALDSLLPEYLDNSEDLSDTHSILYCAAIAVCRVAGVKIANNLTTTRPKSTVPAWQYRIERRITETRTLIGKLISYRSGNMRPRVMRFVKQAFLGTTISPQQYMSCVTERIDFLKQKIYAWANRIRRYKKRIDRYNQNRMFQRNEKWVYRKWEEPDPCVGDRHLPDENVTNTFWRNIWSVPVTHIEGDWLQDVRRSCESITPMEPVKIDKDDVSCAVRSLPNWKSPGPDGLHNFWLKWFRSSHARLASQFQAALDSGSLPQFLTTGITHLLYKSGSVMDPKNFRPITCLPTMYKLLTSILRLKITLHINNNSIMSVSQNGCRSGTRGTKDLLIIDMTISQQVRCNRKSLATCWIDYKKAYDSVPHTWLLKVLELYKIDTTLCTFLKSCMGQWRTALRYPGCRQTAIHDVLIKIERGIFQGDSLSPLWFCLALNPLSTLLEGSGLGYRLQKDDQVISHLLYMDDLKLLASNKLQLTKLLKVTENFSNSIKMEFGVDKCAVMYVKKGVIVESEGIELLDSTKLRSLSATETYKYLGISQSLGIPESNMKQTLQERFFGRLKKVLKSLLSGGNKVRACNGWVMPVLMYSFGILRWTQTELDALDRKVRTLLTASRMHHPRSSVMRLYIPRKLGGRGLLNIKTLHNREVCNLREYFLHTDVGVHRNVVAVDTGFTPLALAKENWRRPVVLGVNDRREVWKGKELHGRFYRALNGSDIDLKASTTWLRHGDLFGETEGFVCAIMDEVIMTNNYRKYILKDGTVDICRACHRPGESIRHIISGCSRLANGEYLHRHNQVARIVHQQLALKYHLVNLEVPYYRYVPDPVLENGRATLYWDRSIITDRTIVANKPDIVLIDRLERRAMIVDIAVPHDENLVKVEKEKQIKYLDLSHEIVDMWNVDSVIIVPIVVSAHGLIAKSLDQHLKRLTLDGWIKGLMQKAVLLDTARIVRRFLSLES

SEQ ID NO: 27416 - protein, 1200 aa, Arctia plantaginis
MLTRARSRALTTSPDSSLRSVLPSPEATTEVPAVVEASSSTSSDEFFSPPTSPTPVRRQGRGRPPTSLGSRGLLTSNRVPATGGDVRRMKWTKSINENVMRAYYRATEVGTNLTAYRVRLVSLFQELEPAVNVSAQRLSDQVRAIQRCHLLDDAVLERIRSDIRNSLIIPSSSHTVDSVANSTPQLASYTDDIDELVESEVISVSTQYNDRIRSALEDAILEYRYLNCNDRPRLFRLPIHKRNLALVGALDSLLPEYLDNSEDLSDTHSILYCAAIAACRVAGVKIANNVTTTRPKSTVPAWQYRIERRITETRTLIGKLISYRSGNMRPRVMRFVKQAFLGTTISPQQYMSCVTERIDFLKQKIYAWANRIRRYKKRIDRYNQNRMFQRNEKWVYRKWEEPDPCVGDRHLPDENVTNTFWRNIWSVPVTHIEGDWLQDVRRSCESITPMEPVKIDKDDVSCAVRSLPNWKSPGPDGLHNFWLKWFRSSHARLASQFQAALDSGSLPQFLTTGITHLLYKSGSVMDPKNFRPITCLPTMYKLLTSILRLKITLHINNNSIMSVSQNGCRSGTRGTKDLLIIDMTISQQVRCNRKSLATCWIDYKKAYDSVPHTWLLKVLELYKIDATLCTFLKSCMGQWRTALRYPGCRQTAIHDVLIKIERGIFQGDSLSPLWFCLALNPLSTLLEGSGLGYRLQKDDQVISHLLYMDDLKLLASNKLQLTKLLKVTENFSNSIKMEFGVDKCAVMYVKKGVIVESEGIELLDSTKLRSLSATETYKYLGISQSLGIPESNMKQTLQERFFGRLKKVLKSLLSGGNKVRACNGWVMPVLMYSFGILRWTQTELDALDRKVRTLLTASRMHHPRSSVMRLYIPRKLGGRGLLNIKTLHNREVCNLREYFLHTDVGVHRNVVAVDTGFTPLALAKENWRRPVVLGVNDRREVWKGKELHGRFYRALNGSDIDLKASTTWLRHGDLFGETEGFVCAIMDEVIMTNNYRKYILKDGTVDICRACHRPGESIRHIISGCSRLANGEYLHRHNQVARIVHQQLALKYHLVNLEVPYYRYVPDPVLENGRATLYWDRSIITDRTIVANKPDIVLIDRLERRAMIVDIAVPHDENLVKVEKEKQIKYLDLSHEIVDMWNVDSVIIVPIVVSAHGLIAKSLDQHLKRLTLDGWIKGLMQKAVLLDTARIVRRFLSLES

SEQ ID NO: 27417 - protein, 1200 aa, Arctia plantaginis
MLTRARSRALTTSPDSSLRSVLPSPEATTEVPAVAEASSSTSSDEFFSPPTSPTPVRRQGRGRPPTSLGSRGLLTSNRVPATGGDVRRMKWTKSINENVMRAYYRATEVGTNLTAYRVRLVSLFQELEPAVNVSAQRLSDQVRAIQRCHLLDDAVLERIRSDIRNSLIIPSSSHTVDSVANNTPQLASYTDDIDELVESEVISVSTQYNDRIRSALEDAILEYRYLNCNDRPRLFRLPIHKRNLALVGALDSLLPEYLDNSEDLSDTHSILYCAAIAACRVAGVKIANNVTTTRPKSTVPAWQYRIERRITETRTLIGKLISYRSGNMRPRVMRFVKQAFLGTTISPQQYMSCVTERIDFLKQKIYAWANRIRRYKKRTDRYNQNRMFQGNEKWVYRKWEEPDPCVGDRHLPDENVTNTFWRNIWSVPVTHIEGDWLQDVRRSCESITPMEPVKIDKDDVSCAVRSLPNWKSPGPDGLHNFWLKWFRSSHARLASQFQAALDSGSLPQFLTTGITHLLYKSGSVMDPKNFRPITCLPTMYKLLTSILRLKITLHINNNSIMSVSQNGCRSGTRGTKDLLIIDMTISQQVRCNRKSLATCWIDYKKAYDSVPHTWLLKVLELYKIDTTLCTFLKSCMGQWRTALRYPGCRQTAIHDVLIKIERGIFQGDSLSPLWFCLALNPLSTLLEGSGLGYRLQKDDQVISHLLYMDDLKLLASNKLQLTKLLKVTENFSNSIKMEFGVDKCAVMYVKKGVIVESEGIELLDSTKLRSLSATETYKYLGISQSLGIPESNMKQTLQERFFGRLKKVLKSLLSGGNKVRACNGWVMPVLMYSFGILRWTQTELDALDRKVRTLLTASRMHHPRSSVMRLYIPRKLGGRGLLNIKTLHNREVCNLREYFLHTDVGVHRNVVAVDTGFTPLALAKENWRRPVVLGVNDRREVWKGKELHGRFYRALNGSDIDLKASTTWLRHGDLFGETEGFVCAIMDEVIMTNNYRKYILKDGTVDICRACHRPGESIRHIISGCSRLANGEYLHRHNQVARIVHQQLALKYHLVNLEVPYYRYVPDPVLENGRATLYWDRSIITDRTIVANKPDIVLIDRLERRAMIVDVAVPHDENLVKVEKEKQIKYLDLSHEIVDMWNVDSVIIVPIVVSAHGLIAKSLDQHLKRLTLDGWIKGLMQKAVLLDTARIVRRFLSLES

SEQ ID NO: 27418 - protein, 1200 aa, Arctia plantaginis
MLTRARSRALTTSPDSSLRSVLPSPEATTEVPAVAEASSSTSSDEFFSPPTSPTPVRRQGRGRPPTSLGSRGLLTSNRVPATGGDVRRMKWTKSINENVMRAYYRATEVGTNLTAYRVRLVSLFQELEPAVNVSAQRLSDQVRAIQRCHLLDDAVLERIRSDIRNSLIIPSSSHTVDSVANSTPQLASYTDDIDELVESEVISVSTQYNDRIRSALEDAILEYRYLNCNDRPRLFRLPIHKRNLALVGALDSLLPEYLDNSEDLSDTHSILYCAAIAACRVAGVKIANNVTTTRPKSTVPAWQYRIERRITETRTLIGKLISYRSGNMRPRVMRFVKQAFLGTTISPQQYMSCVTERIDFLKQKIYAWANRIRRYKKRIDRYNQNRMFQRNEKWVYRKWEEPDPCVGDRHLPDENVTNTFWRNIWSVPVTHIEGDWLQDVRRSCESITPMEPVKIDKDDVSCAVRSLPNWKSPGPDGLHNFWLKWFRSSHARLASQFQAALDSGSLPQFLTTGITHLLYKSGSVMDPKNFRPITCLPTMYKLLTSILRLKITLHINNNSIMSVSQNGCRSGTRGTKDLLIIDMTISQQVRCNRKSLATCWIDYKKAYDSVPHTWLLKVLELYKIDTTLCTFLKSCMGQWRTALRYPGCRQTAIHDVLIKIERGIFQGDSLSPLWFCLALNPLSTLLEGSGLGYRLQKDDQVISHLLYMDDLKLLASNKLQLTKLLKVTENFSNSIKMEFGVDKCAVMYVKKGVIVESEGIELLDSTKLRSLSATETYKYLGISQSLGIPESNMKQTLQERFFGRLKKVLKSLLSGGNKVRACNGWVMPVLMYSFGILRWTQTELDALDRKVRTLLTASRMHHPRSSVMRLYIPRKLGGRGLLNIKTLHNREVCNLREYFLHTDVGVHRNVVAVDTGFTPLALAKENWRRPVVLGVNDRREVWKGKELHGRFYRALNGSDIDLKASTTWLRHGDLFGETEGFVCAIMDEVIMTNNYRKYILKDGTVDICRACHRPGESIRHIISGCSRLANGEYLHRHNQVARIVHQQLALKYHLVNLEVPYYRYVPDPVLENGRATLYWDRSIITDRTIVANKPDIVLIDRLERRAMIVDIAVPHDENLVKVEKEKQIKYLDLSHEIVDMWNVDSVIIVPIVVSAHGLIAKSLDQHLRRLTLDGWIKGLMQKAVLLDTARIVRRFLSLES

SEQ ID NO: 27419 - protein, 1200 aa, Arctia plantaginis
MLTRARSRALTTSPDSSLRSVLPSPEATTEVPAVAEASSSTSSDEFFSPPTSPTPVRRQGRGRPPTSLGSRGLLTSNRVPATGGDVRRMKWTKSINENVMRAYYRATEVGTNLTAYRVRLVSLFQELEPAVNVSAQRLSDQVRAIQRCHLLDDAVLERIRSDIRNSVIIPSSSHTVDSVANSTPQLASYTDDIDELVESEVISVSTQYNDRIRSALEDAILEYRYLNCNDRPRLFRLPIHKRNLALVGALDSLLPEYLDNSEDLSDTHSILYCAAIAACRVAGVKIANNVTTTRPKSTVPAWQYRIERRITETRALIGKLISYRSGNMRPRVMRFVKQAFLGTTISPQQYMSCVTERIDFLKQKIYAWANRIRRYKKRIDRYNQNRMFQRNEKWVYRKWEEPDPCVGYRHLPDENVTNTFWRNIWSVPVTHIEGDWLQDVRRSCESITPMEPVKIDKDDVSCAVRSLPNWKSPGPDGLHNFWLKWFRSSHARLASQFQAALDSGSLPQFLTTGITHLLYKSGSVMDPKNFRPITCLPTMYKLLTSILRLKITLHINNNSIMSVSQNGCRSGTRGTKDLLIIDMTISQQVRCNRKSLATCWIDYKKAYDSVPHTWLLKVLELYKIDTTLCTFLKSCMGQWRTALRYPGCRQTAIHDVLIKIERGIFQGDSLSPLWFCLALNPLSTLLEGSGLGYRLQKDDQVISHLLYMDDLKLLASNKLQLTKLLKVTENFSNSIKMEFGVDKCAVMYVKKGVIVESEGIELLDSTKLRSLSATETYKYLGISQSLGIPESNMKQTLQERFFGRLKKVLKSLLSGGNKVRACNGWVMPVLMYSFGILKWTQTELDALDRKVRTLLTASRMHHPRSSVMRLYIPRKLGGRGLLNIKTLHNREVCNLREYFLHTDVGVHRNVVAVDTGFTPLALAKENWRRPVVLGVNDRREVWKGKELHGRFYRALNGSDIDLKASTTWLRHGDLFGETEGFVCAIMDEVIMTNNYRKYILKDGTVDICRACHRPGESIRHIISGCSRLANGEYLHRHNQVARIVHQQLALKYHLVNLEVPYYRYVPDPVLENGRATLYWDRSIITDRTIVANKPDIVLIDRLERRAMIVDIAVPHDENLVKVEKEKQIKYLDLSHEIVDMWNVDSVIIVPIVVSAHGLIAKSLDQHLKRLTLDGWIKGLMQKAVLLDTARIVRRFLSLES

SEQ ID NO: 27420 - protein, 1200 aa, Arctia plantaginis
MLTRARSRALTTSPDSSLRSVLPSPEATTEVPAVAEASSSTSSDEFFSPPTSPTPVRRQGRGRPPTSLGSRGLLTSNRVPATGGDVRRMKWTKSINENVMRAYYRATEVGTNLTAYRVRLVSLFQELEPAVNVSAQRLSDQVRAIQRCHLLDDAVLERIRSDIRNSLIIPSSSHTVDSVANSTPQLASYTDDIDELVESEVISVSTQYNDRIRSALEDAILEYRYLNCNDRPRLFRLPIHKRNLALVGALDSLLPEYLDNSEDLSDTHSILYCAAIAACRVAGVKIANNVTTTRPKSTVPAWQYRIERRITETRTLIGKLISYRSGNMRPRVMRFVKQAFLGTTISPQQYMSCVTERIDFLKQKIYAWANRIRRYKKRIDRYNQNRMFQRNEKWVYRKWEEPDPCVGDRHLPDENVTNTFWRNIWSVPVTHIEGDWLQDVRRSCESITPMEPVKIDKDDVSCAVRSLPNWKSPGPDGLHNFWLKWFRSSHARLASQFQAALDSGSLPQFLTTGITHLLYKSGSVMDPKNFRPITCLPTMYKLLTSILRLKITLHINNNSIMSVSQNGCRSGTRGTKDLLIIDMTISQQVRCNRKSLATCWIDYKKAYDSVPHTWLLKVLELYKIDTTLCTFLKSCMGQWRTALRYPGCRQTAIHDVLIKIERGIFQGDSLSPLWFCLALNPLSTLLEGSGLGYRLQKDDQVISHLLYMDDLKLLASNKLQLTKLLKVTENFSNSIKMEFGVDKCAVMYVKKGVIVESEGIELLDSTKLRSLSATETYKYLGISQSLGIPESNMKQTLQERFFGRLKKVLKSLLSGGNKVRACNGWVMPVLMYSFGILRWTQTELDALDRKVRTLLTASRMHHPRSSVMRLYIPRKLGGRGLLNIKTLHNREVCNLREYFLHTDVGVHRNVVAVDTGFTPLALAKENWRRPVVLGVNDRREVWKGKELHGRFYRALNGSDIDLKASTTWLRHGDLFGETEGFVCAIMDEVIMTNNYRKYILKDGTVDICRACHRPGESIRHIISGCSRLANGEYLHRHNQVARIVHQQLALKYHLVNLEVPYYRYVPDPVLENGRATLYWDRSIITDRTIVANKPDIVLIDRLERRAMIVDIAVPHDENLVKVEKEKQIKYLDLSHEIVDMWNVDSVIIVPIVVSTHGLIAKSLDQHLKRLTLDGWIKGLMQKAVLLDTARIVRRFLSLES

SEQ ID NO: 27421 - protein, 1200 aa, Arctia plantaginis
MLTRARSRALTTSPDSSLRSVLPSPEATTEVPAVAEASSSTSSDEFFSPPTSPTPVRRQGRGRPPTSLGSRGLLTSNRVPATGGDVRRMKWTKSINENVMRAYYRATEVGTNLTAYRVRLVSLFQELEPAVNVSAQRLSDQVRAIQRCHLLDDAVLERIRSDIRNSLIIPSSSHTVDSVANSTPQLASYTDGIDELVESEVISVSTQYNDRIRSALEDAILEYRYLNCNDRPRLFRLPIHKRNLALVGALDSLLPEYLDNSEDLSDTHSILYCAAIAACRVAGVKIANNVTTTRPKSTVPAWQYRIERRITETRTLIGKLISYRSGNMRPRVMRFVKQAFLGTTISPQQYMSCVTERIDFLKQKIYAWANRIRRYKKRIDRYNQNRMFQRNEKWVYRKWEEPDPCVGDRHLPDENVTNTFWRNIWSVPVTHIEGDWLQDVRRSCESITPMEPVKIDKDDVSCAVRSLPNWKSPGPDGLHNFWLKWFRSSHARLASQFQAALDSGSLPQFLTTGITHLLYKSGSVMDPKNFRPITCLPTMYKLLTSILRLKITLHINNNSIMSVSQNGCRSGTRGTKDLLIIDMTISQQVRCNRKSLATCWIDYKKAYDSVPHTWLLKVLELYKIDTTLCTFLKSCMGQWRTALRYPGCRQTAIHDVLIKIERGIFQGDSLSPLWFCLALNPLSTLLEGSGLGYRLQKDDQVISHLLYMDDLKLLASNKLQLTKLLKVTENFSNSIKMEFGVDKCAVMYVKKGVIVESEGIELLDSTKLRSLSATETYKYLGISQSLGIPESNMKQTLQERFFGRLKKVLKSLLSGGNKVRACNGWVMPVLMYSFGILRWTQTELDALDRKVRTLLTASRMHHPRSSVMRLYIPRKLGGRGLLNIKTLHNREVCNLREYFLHTDVGVHRNVVAVDTGFTPLALAKENWRRPVVLGVNDRREVWKGKELHGRFYRALNGSDIDLKASTTWLRHGDLFGETEGFVCAIMDEVIMTNNYRKYILKDGTVDICRACHRPGESIRHIISGCSRLANGEYLHRHNQVARIVHQQLALKYHLVNLEVPYYRYVPDPVLENGRATLYWDRSIITDRTIVANKPDIVLIDRLERRAMIVDIAVPHDENLVKVEKEKQIKYLDLSHEIVDMWNVDSVIIVPIVVSAHGLIAKSLDQHLKRLTLDGWIKGLMQKAVLLDTARIVRRFLSLES

SEQ ID NO: 27422 - protein, 1101 aa, Arctia plantaginis
MRAYYRATEVGTNLTAYRVRLVSLFQELEPAVNVSAQRLSDQVRAIQRCHLLDDAVLERIRSDIRNSLIIPSSSHTVDSVANSTPQLASYTDDIDELVESEVISVSTQYNDRIRSALEDAILEYRYLNCNDRPRLFRLPIHKRNLALVGALDSLLPEYLDNSEDLSDTHSILYCAAIAACRVAGVKIANNVTTTRPKSTVPAWQYRIERRITETRTLIGKLISYRSGNMRPRVMRFVKQAFLGTTISPQQYMSCVTERIDFLKQKIYAWANRIRRYKKRIDRYNQNRMFQRNEKWVYRKWEEPDPCVGDRHLPDENVTNTFWRNIWSVPVTHIEGDWLQDVRRSCESITPMEPVKIDKDDVSCAVRSLPNWKSPGPDGLHNFWLKWFRSSHARLASQFQAALDSGSLPQFLTTGITHLLYKSGSVMDPKNFRPITCLPTMYKLLTSILRLKITLHINNNSIMSVSQNGCRSGTRGTKDLLIIDMTISQQVRCNRKSLATCWIDYKKAYDSVPHTWLLKVLELYKIDTTLCTFLKSCMGQWRTALRYPGCRQTAIHDVLIKIERGIFQGDSLSPLWFCLALNPLSTLLEGSGLGYRLQKDDQVISHLLYMDDLKLLASNKLQLTKLLKVTENFSNSIKMEFGVDKCAVMYVKKGVIVESEGIELLDSTKLRSLSATETYKYLGISQSLGIPESNMKQTLQERFFGRLKKVLKSLLSGGNKVRACNGWVMPVLMYSFGILRWTQTELDALDRKVRTLLTASRMHHPRSSVMRLYIPRKLGGRGLLNIKTLHNREVCNLREYFLHTDVGVHRNVVAVDTGFTPLALAKENWRRPVVLGVNDRREVWKGKELHGRFYRALNGSDIDLKASTTWLRHGDLFGETEGFVCAIMDEVIMTNNYRKYILKDGTVDICRACHRPGESIRHIISGCSRLANGEYLHRHNQVARIVHQQLALKYHLVNLEVPYYRYVPDPVLENGRATLYWDRSIITDRTIVANKPDIVLIDRLERRAMIVDIAVPHDENLVKVEKEKQIKYLDLSHEIVDMWNVDSVIIVPIVVSAHGLIAKSLDQHLKRLTLDGWIKGLMQKAVLLDTARIVRRFLSLES

SEQ ID NO: 27423 - protein, 1200 aa, Arctia plantaginis
MLTRARSRALTTSPDSSLRSVLPSPEATTEVPAVAEASSSTSSDEFFSPPTSPTPVRRQGRGRPPTSLGSRGLLTSNRVPATGGDVRRMKWTKSINENVMRAYYRATEVGTNLTAYRVRLVSLFQELEPAVNVSAQRLSDQVRAIQRCHLLDDAVLERIRSDIRNSLIIPSSSHTVDSVANSTPQLVSYTDDIDELVESEVISVSTQYNDRIRSALEDAILEYRYLNCNDRPRLFRLPIHKRNLALVGALDSLLPEYLDNSEDLSDTHSILYCAAIAACRVAGVKIANNVTTTRPKSTVPAWQYRIERRITETRTLIGKLISYRSGNMRPRVMRFVKQAFLGTTISPQQYMSCVTERIDFLKQKIYAWANRIRRYKKRTDRYNQNRMFQRNEKWVYRKWEEPDPCVGDRHLPDENVTNTFWRNIWSVPVTHIEGDWLQDVRRSCESITPMEPVKIDKDDVSCAVRSLPNWKSPGPDGLHNFWLKWFRSSHARLASQFQAALDSGSLPQFLTTGITHLLYKSGSVMDPKNFRPITCLPTMYKLLTSILRLKITLHINNNSIMSVSQNGCRSGTRGTKDLLIIDMTISQQVRCNRKSLATCWIDYKKAYDSVPHTWLLKVLELYKIDTTLCTFLKSCMGQWRTALRYPGCRQTAIHDVLIKIERGIFQGDSLSPLWFCLALNPLSTLLEGSGLGYRLQKDDQVISHLLYMDDLKLLASNKLQLTKLLKVTENFSNSIKMEFGVDKCAVMYVKKGVIVESEGIELLDSTKLRSLSATETYKYLGISQSLGIPESNMKQTLQERFFGRLKKVLKSLLSGGNKVRACNGWVMPVLMYSFGILRWTQTELDALDRKVRTLLTASRMHHPRSSVMRLYIPRKLGGRGLLNIKTLHNREVCNLREYFLHTDVGVHRNVVAVDTGFTPLALAKENWRRPVVLGVNDRREVWKGKELHGRFYRALNGSDIDLKASTTWLRHGDLFGETEGFVCAIMDEVIMTNNYRKYILKDGTVDICRACHRPGESIRHIISGCSRLANGEYLHRHNQVARIVHQQLALKYHLVNLEVPYYRYVPDPVLENGRATLYWDRSIITDRTIVANKPDIVLIDRLERRAMIVDIAVPHDENLVKVEKEKQIKYLDLSHEIVDMWNVDSVIIVPIVVSAHGLIAKSLDQHLKRLTLDGWIKGLMQKAVLLDTARIVRRFLSLES

SEQ ID NO: 27424 - protein, 1200 aa, Arctia plantaginis
MLTRARSRALTTSPDSSLRSVLPSPEATTEVPAVAEASSSTSSDEFFSPPTSPTPVRRQGRGRPPTSLGSRGLLTSNRVPATGGDVRRMKWTKSINENVMRAYYRATEVGTNLTAYRVRLVSLFQELEPAVNVSAQRLSDQVRAIQRCHLLDDAVLERIRSDIRNSLIIPSSSHTVDSVANSTPQLASYTDDIDELVESEVISVSTQYNDRIRSALEDAILEYRYLNCNDRPRLFRLPIHKRNLALVGALDSLLPEYLDNSEDLSDTHSILYCAAIAACRVAGVKIANNVTTTRPKSTVPAWQYRIERRITETRTLIGKLISYRSGNMRPRVMRFVKQAFLGTTISPQQYMSCVTERIDFLKQKIYAWANRIRRYKKRIDRYNQNRMFQRNEKWVYRKWEEPDPCVGDRHLPDENVTNTFWRNIWSVPVTHIEGDWLQDVRRSCESITPMEPVKIDKDDVSCAVRSLPNWKSPGPDGLHNFWLKWFRSSHARLASQFQAALDSGSLPQFLTTGITHLLYKSGSVMDPKNFRPITCLPTMYKLLTSILRLKITLHINNNSIMSVSQNGCRSGTRGTKDLLIIDMTISQQVRCNRKSLATCWIDYKKAYDSVPHTWLLKVLELYKIDTTLCTFLKSCMGQWRTALRYPGCRQTAIHDVLIKIERGIFQGDSLSPLWFCLAVNPLSTLLEGSGLGYRLQKDDQVISHLLYMDDLKLLASNKLQLTKLLKVTENFSNSIKMEFGVDKCAVMYVKKGVIVESEGIELLDSTKLRSLSATETYKYLGISQSLGIPESNMKQTLQERFFGRLKKVLKSLLSGGNKVRACNGWVMPVLMYSFGILRWTQTELDALDRKVRTLLTASRMHHPRSSVMRLYIPRKLGGRGLLNIKTLHNREVCNLREYFLHTDVGVHRNVVAVDTGFTPLALAKENWRRPVVLGVNDRREVWKGKELHGRFYRALNGSDIDLKASTTWLRHGDLFGETEGFVCAIMDEVIMTNNYRKYILKDGTVDICRACHRPGESIRHIISGCSRLANGEYLHRHNQVARIVHQQLALKYHLVNLEVPYYRYVPDPVLENGRATLYWDRSVITDRTIVANKPDIVLIDRLERRAMIVDIAVPHDENLVKVEKEKQIKYLDLSHEIVDMWNVDSVIIVPIVVSAHGLIAKSLDQHLKRLTLDGWIKGLMQKAVLLDTARIVRRFLSLES

SEQ ID NO: 27425 - protein, 1200 aa, Arctia plantaginis
MLTRARSRALTTSPDSSLRSVLPSPEATTEVPAVAEASSSTSSDEFFSPPTSPTPVRRQGRGRPPTSLGSRGLLTSNRVPATGGDVRRMKWTKSINENVMRAYYRATEVGTNLTAYRVRLVSLFQELEPAVNVSAQRLSDQVRAIQRCHLLDDAVLERIRSDIRNSLIIPSSSHTVDSVANSTPQLASYTDDIDELVESEVISVSTQYNDRIRSALEDAILEYRYLNCNDRPRLFRLPIHKRNLALVGALDSLLPEYLDNSEDLSDTHSILYCAAIAACRVAGVKIANNVTTTRPKSTVPAWQYRIERRITETRTLIGKLISYRSGNMRPRVMRFVKQAFLGTTISPQQYMSCVTERIDFLKQKIYAWANRIRRYKKRTDRYNQNRMFQRNEKWVYRKWEEPDPCVGDRHLPDENVTNTFWRNIWSVPVTHIEGDWLQDVRRSCESITPMEPVKIDKDDVSCAVRSLPNWKSPGPDGLHNFWLKWFRSSHARLASQFQAALDSGSLPQFLTTGITHLLYKSGSVMDPKNFRPITCLPTMYKLLTSILRLKITLHINNNSIMSVSQNGCRSGTRGTKDLLIIDMTISQQVRCNRKSLATCWIDYKKAYDSVPHTWLLKVLELYKIDTTLCTFLKSCMGQWRTALRYPGCRQTAIHDVLIKIERGIFQGDSLSPLWFCLALNPLSTLLEGSGLGYRLQKDDQVISHLLYMDDLKLLASNKLQLTKLLKVTENFSNSIKMEFGVDKCAVMYVKKGVIVESEGIELLDSTKLRSLSATETYKYLGISQSLGIPESNMKQTLQERFFGRLKKVLKSLLSGGNKVRACNGWVMPVLMYSFGILRWTQTELDALDRKVRTLLTASRMHHPRSSVMRLYIPRKLGGRGLLNIKTLHNREVCNLREYFLHTDVGVHRNVVAVDTGFTPLALAKENWRRPVVLGVNDRREVWKGKELHGRFYRALNWSDIDLKASTTWLRHGDLFGETEGFVCAIMDEVIMTNNYRKYILKDGTVDICRACHRPGESIRHIISGCSRLANGEYLHRHNQVARIVHQQLALKYHLVNLEVPYYRYVPDPVLENGRATLYWDRSIITDRTIVANKPDIVVIDRLERRAMIVDIAVPHDENLVKVEKEKQIKYLDLSHEIVDMWNVDSVIIVPIVVSAHGLIAKSLDQHLKRLTLDGWIKGLIQKAVLLDTARIVRRFLSLQS

SEQ ID NO: 27426 - protein, 1200 aa, Arctia plantaginis
MLTRARSRALTTSPDSSLRSVLPSPEATTEVPAVAEASSSTSSDEFFSPPTSPTPVRRQGRGRPPTSLGSRGLLTSNRVPATGGDVRRMKWTKSINENVMRAYYRATEVGTNLTAYRVRLVSLFQELEPAVNVSAQRLSDQVRAIQRCHLLDDAVLERIRSDIRNSLIIPSSSHTVDSVANSTPQLASYTDDIDELVESEVISVSTQYNDTIRSALEDAILEYRYLNCNDRPRLFRLPIHKRNLALVGALDSLLPEYLDNSEDLSDTHSILYCAAIAVCRVAGVKIANNVTTTRPKSTVPAWQYRIERRITETRTLIGKLISYRSGNMRPRVMRFVKQAFLGTTISPQQYMSCVTERIDFLKQKIYAWANRIRRYKKRIDRYNQNRMFQRNEKWVYRKWEEPDPCVGDRHLPDENVTNTFWRNIWSVPVTHIEGDWLQDVRRSCESITPMEPVKIDKDDVSCAVRSLPNWKSPGPDGLHNFWLKWFRSSHARLASQFQAALDSGSLPQFLTTGITHLLYKSGSVMDPKNFRPITCLSTMYKLLTSILRLKITLHINNNSIMSVSQNGCRSGTRGTKDLLIIDMTISQQVRCNRKSLATCWIDYKKAYDSVPHTWLLKVLELYKIDTTLCTFLKSCMGQWRTALRYPGCRQTAIRDVLIKIERGIFQGDSLSPLWFCLALNLLSTLLEGSGLGYRLQKNDQVISHLLYMDDLKLLASNKLQLTKLLKVTENFSNSIKMEFGVDKCAVMYVKKGVIVESEGIELLDSTKLRSLSATETYKYLGISQSLGIPESNMKQTLQERFFGRLKKVLKSLLSGGNKVRACNGWVMPVLMYSFDILRWTQTELDALDRKVRTLLTASRMHHPRSSVMRLYIPRKLGGRGLLNIKTLHNREVCNLREYFLHTDVGVHRNVVAVDTGFTPLALAKENWRRPVVLGVNDRREVWKGKELHGRFYRALNGSDVDLKASSTWLRHGDLFGETEGFVCAIMDEVIMTNNYRKYILKDGTVDICRACHRPGESIRHIISGCSRLANGEYLHRHNQVARIVHQQLALKYHLVNLEVPYYRYVPDPVLENGRATLYWDRSIITDRTIVANKPDIVLIDRLERRAMIVDIAVPHDENLVKVEKEKQIKYLDLSHEIVDMWNVDSVIIVPIVVSAHGLIAKSLDQHLKRLTLDGWIKGLMQKAVLLDTARIVRRFLSLES

SEQ ID NO: 27427 - protein, 1200 aa, Arctia plantaginis
MLTRARSRALTTSPDSSLRSVLPSPEATTEVPAVAEASSSTSSDEFFSPPTSPTPVRRQGRGRPPTSLGSRGLLTSNRVPATGGDVRRMKWTKSINENVMRAYYRATEVGTNLTAYRVRLVSLFQELEPAVNVSAQRLSDQVRAIQRCHLLDDAVLERIRSDIRNSLIIPSSSHTVDSVANSTPQLASYTDDIDELVESEVISVSTQYNDRIRSALEDAILEYRYLNCNDRPRLFRLPIHKRNLVLVGALDSLLPEYLDNSEDLSDTHSILYCAAIAVCRVAGVKIANNVTTTRPKSTVPAWQYRIERRITETRTLIGKLISYRSGNMRPRVMRFVKQAFLGTTISPQQYMSCVTERIDFLKQKIYAWANRIRRYKKRIDRYNQNRMFQRNEKWVYRKWEEPDPCVGDRHLPDENVTNTFWRNIWSVPVTHIEGDWLQDVRRSCESITPMEPVKIDKDDVSCAVRSLPNWKSPGPDGLHNFWLKWFRSSHARLASQFQAALDSGSLPQFLTTGITHLLYKSGSVMDPKNFRPITCLPTMYKLLTSILRLKITLHINNNSIMSVSQNGCRSGTRGTKDLLIIDMTISQQVRCNRKSLATCWIDYKKAYDSVPHTWLLKVLELYKIDTTLCTFLKSCMGQWRTALRYPGCRQTAIHDVLIKIERGIFQGDSLSPLWFCLALNPLSTLLEGSGLGYRLQKDDQVISHLLYMDDLKLLASNKLQLTKLLKVTENFSNSIKMEFGVDKCAVMYVKKGVIVESEGIELLDSTKLRSLSATETYKYLGISQSLGIPESNMKQTLQERFFGRLKKVLKSLLSGGNKVRACNGWVMPVLMYSFGILRWTQTELDALDRKVRTLLTASRMHHPRSSVMRLYIPRKLRGRGLLNIKTLHNREVCNLREYFLHTDVGVHRNVVAVDTGFTPLALAKENWRRPVVLGVNDRREVWKGKELHGRFYRALNGSDIDLKASTTWLRHGDLFGETEGFVCAIMDEVIMTNNYRKYILKDGTVDVCRACHRPGESIRHIISGCSRLANGEYLHRHNQVARIVHQQLALKYHLVNLEVPYYRYVPDPVLENGRATLYWDRSIITDRTIVANKPDIVLIDRLERRAMIVDIAVPHDENLVKVEKEKQIKYLDLSHEIVDMWNVDSVIIVPIVVSAHGLIAKSLDQHLKRLTLDGWIKGLMQKAVLLDTARIVRRFLSLES

SEQ ID NO: 27428 - protein, 1199 aa, Arctia plantaginis
MLTRARSRALTTSPDSSLRSVLPSPEATTEVPAVAEASSSTSSDEFFSPPTSPTPVRRQGRGRPPTSLGSRGLLTSNRVPATGGDVRRMKWTKSINENVMRAYYRATEVGTNLTAYRVRLVSLFQELEPAVNVSAQRLSDQVRAIQRCHLLDDAVLERIRSDIRNSLIIPSSSHTVDLVANSTPQLASYTDDIDELVESEVISVSQYNDRIRSALEDAILEYRYLNCNDRPRLFRLPIHKRNLALVGALDSLLPEYLDNSEDLSDTHSILYCAAIAVCRVAGVKIANNVTTTRPKSTVPAWQYRIERRITETRTLIGKLISYRSGNMRPRVMRFVKQAFLGTTISPQQYMSCVTERIDFLKQKIYAWANRIRRYKKRIDRYNQNRMFQRNEKWVYRKWEEPDPCVGDRHLPDENVTNTFWRNIWSVPVTHIEGDWLQDVRRSCESITPMEPVKIDKDDVSCAVRSLPNWKSPGPDGLHNFWLKWFRSSHARLASQFQAALDSGSLPQFLTTGITHLLYKSGSVMDPKNFRPITCLPTMYKLLTSILRLKITLHINNNSIMSVSQNGCRSGTRGTKDLLIIDMTISQQVRCNRKSLATCWIDYKKAYDSVPHTWLLKVLELYKIDTTLCTFLKSCMGQWRTALRYPGCRQTAIHDVLIKIERGIFQGDSLSPLWFCLALNPLSTLLEGSGLGYRLQKDDQVISHLLYMDDLKLLASNKLQLTKLLKVTENFSNSIKMEFGVDKCAVMYVKKGVIVESEGIELLDSTKLRSLSATETYKYLGISQSLGIPESNMKQTLQERFFGRLKKVLKSLLSGGNKVRACNGWVMPVLMYSFGILRWTQTELDALDRKVRTLLTASRMHHPRSSVMRLYIPRKLGGRGLLNIKTLHNREVCNLREYFLHTDVGVHRNVVAVDTGFTPLALAKENWRRPVVLGVNDRREVWKGKELHGRFYRALNGSDIDLKASTTWLRHGDLFGETEGFVCAIMDEVIMTNNYRKYILKDGTVDICRACHRPGESIRHIISGCSRLANGEYLHRHNQVARIVHQQLALKYHLVNLEVPYYRYVPDPVLENGRATLYWDRSIITDRTIVANKPDIVLIDRLERRAMIVDIAVPHDENLVKVEKEKQIKYLDLSHEIVDMWNVDSVIIVPIVVSAHGLIVKSLDQHLKRLTLDGWIKGLMQKAVLLDTARIVRRFLSLES

SEQ ID NO: 27429 - protein, 1109 aa, Arctia plantaginis
MKWTNSINENVMRAYYRATEMGTNLTAYRVRLVSLFQELEPAVNVSAQRLSDQVRAIQRCHLLDDAVLERIRSDIRNSLIIPSSSHTVDLVANSTPQLVSHTNDVDELVEGEVISVSTQYNDRIRSALEDAILEYRYVNWNNRPRLSRLPIHKRNLALVGALDSFLPDYLDNSEDLGDTHSILYCAAVAVCRVVGVNIVENVTTTRPKSTVPAWQCRIERRIAETRVLIGKLISFRSGNTRPRVMRFVKQAFLGTTIGPQQYMACVTERIDFLKQKIYAWANRIRRYKKRKDRYNQNRMFQRNEKWVYRKWEEPDPCMSHGHLPDENVTHTFWRNIWSVPVTHIEGDWLRDVRRSCESITPMEPVIIDKDDVSCAVRSLPNWKSPGLDGLHNFWLKWFRSSHACLASQFQAALNSGSLPQFLTTGITHLLYKSGSVMDPRNFRPITCLPTMYKLLTSILRLKITLHINNNSIMSVSQNGCRSGSRGTKDLLIIDRAISQQVRRNRKSLATCWIDYKKAYDSVPHTWLLRVLELYKIDTTLCTFLKSCMGQWRTALRYPGCRQTTVIDAPIKIERGIFQGDSLSPLWFCLALNPLSTLLEGSGLGYRLQKDDQVISHLLYMDDLKLLAPTKLQLSALLKVTENFSNSIKMEFGVDKCAVMYVKKGEIVESEGIELSDSTKLRSLSATETYKYLGISQSLGIPESDMKQMLQERFFGRLKKVLKSLLSGGNKVRACNGWVMPILMYSFGILKWTQTELDALDRRVRTLLTAFRMHHPRSSVMRLYIPRKLGGRGLLNIKTLHNREICNLREYFLHTDVGMHRNVVAVDIGFTPLALAKENWRKHVVFSTNDRREVWKGKELHGRFYRALNIDFKASTTWLRYGDLFGETEGFVCAIMDEVIMTNNYRKYILKDGTVDICRACHRPGESIRHIISGCSRLANGEYLHRHNQVARIVHQQLALKYHLVNLEVPYYRYVPDPVLENGRATLYWDRSIITDRTIVANKPDIVVIDRLERRAIIVDVAVPHDENLVKVEKEKQIKYLDLSHEIVDMWNVDSVIIVPIVVSAHGLIAKSLDQHLKRLTLDGWIKGLIQKAVLLDTARIVRRFLSLQS

SEQ ID NO: 27430 - protein, 1200 aa, Arctia plantaginis
MLTRARSRALTTSPDSSLRSVLPSPEATTEVPAVAEASSSTSSDEFFSPPTSPTPVRRQGRGRPPTSLGSRGLLTSNRVPATGGDVRRMKWTKSINENVMRAYYRATEVGTNLTAYRVRLVSLFQELEPAVNVSAQRLSDQVRAIQRCHLLDDAVLERIRSDIRNSLIIPSSSHTVDSVANSTPQLASYTDDIDELVESEVISVSTQYNDRIRSALEDAILEYRYLNCNDRPRLFRLPIHKRNLALVGALDSLLPEYLDNSEDLSDTHSILYCAAIAVCRVAGVKIANNVTTTRPKSTVPAWQYRIERRITETRTLIGKLISYRSGNMRPRVMRFVKQAFLGTTISPQQYMSCVTERIDFLKQKIYAWANRIRRYKKRIDRYNQNRMFQRNEKWVYRKWEEPDPCGGDRHLPDENVTNTFWRNIWSVPVTHIEGDWLQDVRRSCESITPMEPVKIDKDDVSCAVRSLPNWKSPGPDGLHNFWLKWFRSSHARLASQFQAALDSGSLPQFLTTGITHLLYKSGSVMDPKNFRPITCLPTMYKLLTSILRLKITLHINNNSIMSVSQNGCRSGTRGTKDLLIVDMTISQQVRCNRKSLATCWIDYKKAYDSVPHTWLLKVLELYKIDTTLCTFLKSCMGQWRTALRYPGCRQTAIHDVLIKIERGIFQGDSLSPLWFCLALNPLSTLLEGSGLGYRLQKDDQVISHLLYMDDLKLLASNKLQLTKLLKVTENFSNSIKMEFGVDKCAVMYVKKGVIVESEEIELLDSTKLRSLSATETYKYLGISQSLGIPESNMKQTLQERFFGRLKKVLKSLLSGGNKVRACNGWVMPVLMYSFGILRWTQTELDALDRKVRTLLTASRMHHPRSSVMRLYIPRKLGGRGLLNIKTLHNREVCNLREYFLHTDVGVHRNVVAVDTGFTPLALAKENWRRPVVLGVNDRREVWKGKELHGRFYRALNGSDIDLKASTTWLRHGDLFGETEGFVCAIMDEVIMTNNYRKYILKDGTVDICRACHRPGESIRHIISGCSRLANGEYLHRHNQVARIVHQQLALKYHLVNLEVPYYRYVPDPVLENGRATLYWDRSIITDRTIVANKPDIVLIDRLERRAMIVDIAVPHDENLVKVEKEKQIKYLDLSHEIVDMWNVDSVIIVPIVVSAHGLIAKSLDQHLKRLTLDGWIKGLMQKAVLLDTARIVRRFLSLES

SEQ ID NO: 27431 - protein, 873 aa, Arctia plantaginis
MRPRVMRFVKQAFLGTTISPQQYMSCVTERIDFLKQKIYAWANRIRRYKKRIDRYNQNRMFQRNEKWVYRKWEEPDPCVGDRHLPDENVTNTFWRNIWSVPVTHIEGDWLQDVRRSCESITPMEPVKIDKDDVSCAVRSLPNWKSPGPDGLHNFWLKWFRSSHARLASQFQAALDSGSLPQFLTTGITHLLYKSGSVMDPKNFRPITCLPTMYKLLTSILRLKITLHINNNSIMSVSQNGCRSGTRGTKDLLIIDMTISQQVRCNRKSLATCWIDYKKAYDSVPHTWLLKVLELYKIDTTLCTFLKSCMGQWRTALRYPGCRQTAIHDVLIKIERGIFQGDSLSPLWFCLALNPLSTLLEGSGLGYRLQKDDQVISHLLYMDDLKLLASNKLQLTKLLKVTENFSNSIKMEFGVDKCAVMYVKKGVIVESEGIELLDSTKLRSLSATETYKYLGISQSLGIPESNMKQTLQERFFGRLKKVLKSLLSGGNKVRACNGWVMPVLMYSFGILRWTQTELDALDRKVRTLLTASRMHHPRSSVMRLYIPRKLGGRGLLNIKTLHNREVCNLREYFLHTDVGVHRNVVAVDTGFTPLALAKENWRRPVVLGVNDRREVWKGKELHGRFYRALNGSDIDLKASTTWLRYGDLFGETEGFVCAIMDEVIMTNNYRKYILKDGTVDICRACHRPGESIRHIISGCSRLANGEYLHRHNQVARIVHQQLALKYHLVNLEVPYYRYVPDPVLENGRATLYWDRSIITDRTIVANKPDIVLIDRLERRAMIVDIAVPHDENLVKVEKEKQIKYLDLSHEIVDMWNVDSVIIVPIVVSAHGLIAKSLDQHLKRLTLDGWIKGLMQKAVLLDTARIVRRFLSLES

SEQ ID NO: 27432 - protein, 1112 aa, Arctia plantaginis
MKWTKSINENVMRAYYRATEVGTNLTAYRVRLVSLFQELEPAVNVSAQRLSDQVRAIQRCHLLDDAVLERIRSDIRNSLIIPSSSHTVDSVANSTPQLASYTDDIDELVESEVISVSTQYNDRIRSALEDAILEYRYLNCNDRPRLFRLPIHKRNLALVGALDSLLPEYLDNSEDLSDTHSILYCAAIAVCRVAGVKIANNVTTTRPKSTVPAWQYRIERRITETRTLIGKLISYRSGNMRPRVMRFVKQAFLGTTISPQQYMPCVTERIDFLKQKIYAWANRIRRYKKRIDRYNQNRMFQRNEKWVYRKWEEPDPCVGDRHLPDENVTNTFWRNIWSVPVTHIEGDWLQDVRRSCESITPMEPVKIDKDDVSCAVRSLPNWKSPGPDGLHNFWLKWFRSSHARLASQFQAALDSGSLPQFLTTGITHLLYKSGTVMDPKNFRPITCLPTMYKLLTSILRLKITLHINNNSIMSVSQNGCRSGTRGTKDLLIIDMTISQQVRCNRKSLATCWIDYKKAYDSVPHTWLLKVLELYKIDTTLCTFLKSCMGQWRTALRYPGCRQTAIHDVLIKIERGIFQGDSLSPLWFCLALNPLSTLLEGSGLGYRLQKDDQVISHLLYMDDLKLLASNKLQLTKLLKVTENFSNSIKMEFGVDKCAVMYVKKGVIVESEGIELLDSTKLRSLSATETYKYLGISQSLGIPESNMKQTLQERFFGRLKKVLKSLLSGGNKVRACNGWVMPVLMYSFGILRWTQTELDALDRKVRTLLTASRMHHPRSSVMRLYIPRKLGGRGLLNIKTLHNREVCNLREYFLHTDVGVHRNVVAVDTGFTPLALAKENWRRPLVLGVNDRREVWKGKELHGRFYRALNGSDIDLKASTTWLRHGDLFGETEGFVCAIMDEVIMTNNYRKYILKDGTVDICRACHRPGESIRHIISGCSRLANGEYLHRHNQVARIVHQQLALKYHLVNLEVPYYRYVPDPVLENGRATLYWDRSIITDRTIVANKPDIVLIDRLERRAMIVDIAVPHDENLVKVEKEKQIKYLDLSHEIVDMWNVDSVIIVPIVVSAHGLIAKSLDQHLKRLTLDGWIKGLMQKAVLLDTARIVRRFLSLES

SEQ ID NO: 27433 - protein, 1108 aa, Arctia plantaginis
MYVNVFLFKINVMRAYYRATEVGTNLTAYRVRLVSLFQELEPAVNVSAQRLSDQVRAIQRCHLLDDAVLERIRSDIRNSLIIPSSSHTVDSVANSTPAVDIDELVESEVISVSTQYNDRIRSALEDAILEYRYLNCNDRPRLFRLPIHKRNLALVGALDSLLPEYLDNSEDLSDTHSILYCAAIAVCRVAGVKIANNVTTTRPKSTVPAWQYRIERRIAETRTLIGKLISYRSGNMRPRVMRFVKQAFLGTTISPQQYMSCVTERIDFLKQKIYAWANRIRRYKKRIDRYNQSRMFQRNEKWVYRKWEEPDPCVGDRHLPDENVTNTFWRNIWSVPVTHIEGDWLQDVRRSCESITPMEPVKIDKDDVSCAVRSLPNWKSPGPDGLHNLWLKWFRSSHARLASQFQAALDSGSLPQFLTTGITHLLYKSGSVMDPKNFRPITCLPTMYKLLTSILRLKITLHINNNSIMSVSQNGCRSGTRGTKDLLIIDMTISQQVRCNRKSLATCWIDYKKAYDSVPHTWLLKVLELYKIDTTLCTFLKSCMGQWRTALRYPGCRQTAIHDVLIKIERGIFQGDSLSPLWFCLALNPLSTLLEGSGLGYRLQKDDQVISHLLYMDDLKLLASNKLQLTKLLKVTENFSNSIKMEFGVDKCAVMYVKKGVIVESEGIELLDSTKLRSLSATETYKYLGISQSLGIPESNMKQTLQERFFGRLKKVLKSLLSGGNKVRACNGWVMPVLMYSFGILRWTQTELDALDRKVRTLLTASRMHHPRSSVMRLYIPRKLGGRGLLNIKTLHNREVCNLREYFLHTDVGVHRNVVAVDTGFTPLALAKENWRRPVVLGVNDRREVWKGKELHGRFYRALNGSDIDLKASTTWLRHGDLFGETEGFVCAIMDEVIMTNNYRKYILKDGTVDICRACHRPGESIRHIISGCSRLANGEYLHRHNQVARIVHQQLALKYHLVNLEVPYYRYVPDPVLENGRAMLYWDRSIITDRTIVANKPDIVLIDRLERRARIVDIAVPHDENLVKVEKEKQIKYLDLSHEIVDMWNVDSVIIVPIVVSAHGLIAKSLDQHLKRLTLDGWIKGLMQKAVLLDTARIVRRFLSLES

SEQ ID NO: 27434 - protein, 1062 aa, Eilema sororculum
MTRAKAKQIINYAQPTPSDSSCSSASQPPESTSPRPATVEASSSDEYFSPPTSPTPVRRPGRGRPPSSLGSRGPPASNRAPATGGNVRRMRWTSSINENVMRAYFAATGGGANLTAYRDRMLILFQDLEPTVNVSAQRLSDQVRAIQRCHLLDSSVLERLRSDLQNNDITPSPPQAVMQVVPQETQPVQTDCELDNVATSVSTQYIEQIRNALECAVRDYRSMNYQIRPRLPRLPVHKRNIALVCALDSLLPNYLDNCEHLGDTHSILYCAAYAACRVAGVKFPECNTAIRPKSGKPRWQCRIERRIAETRALIGKLICFRSGNTRPRVMRFVNRVFSGTGVSPFDYTSRVTERIDFLKQKVYAWANRIKRYKKRCDRYTLNRTFQRDERWVYRNWERADSVGDEHFPDVAATNTFWRNIWSVPVAHTEGDWVRKVKRSCEAIETMEPVIISEDDIACVVRSLPNWKAAGPDGLHNFWLKWLRSSHARLAFQFQSALESGSLPSFMTTGITHLLFKSGCAMNPKNYRPITCLPRVYKLLTSVLRVKIASHITRNSILSYSQNGCRSGARGTKDLLIIDTAVNQQVRRNRRDMVTCWIDYKKAYDSVPHTWLLRVLELYKVDTTLCTFLEACMGQWSTALRYPGCRHIPDDGELIKIERGIFQGDSLSPLWFCLALNPLSTILEDSGLGYCLRRGSQVISHLLYMDDLKLFAPNNRQLMELLKVTETFSTSIRMEFGVDKCAVMHVKKGEIVESEGIEFSDSTKLRSLSVNDTYKYLGISQALGVNESDMKQSLRERFFCRLKKVLKSLLSGGNKVRAYNDWVIPVLTYSFGILRWTQTELEALDRRVRTLLTAYRMHHPRSSVMRLYIPRKFGGRGFLNIKTLHNREICNLREYFLKVNVDVHRDVVAVDRGLTPLALAKENWRKPAILSINDRKEVWKSKELHGRFHRALYGPDVDLKASVSWLRFGDLFGETEGFVCAITDEVVMTNNYRRYILKDGTVDICRACHRPGESLRHIISGCSRLANGEYLHRHNQVARIVHQQLALKYKLVDSEVPYYRYVP

SEQ ID NO: 27435 - protein, 1198 aa, Eilema depressum
MLTRSQARKNASAPVTSPDSSLSSAAQPSPTEPAASSSSSSDEFFSPPTSPTPVRRPGRGRPPASLEPRRPPASNRAPAAGGNVRRMRWTTSINENVMRAYFAATGGGTNLTAYRDRMLLVFQGLEPTLNVSAQRLSDQVRAIQRCHLLDSSVLERIRSDLQNSDIIPPPPQAPLLTPRVQGFTQVTEPDSGDGELDNVAFSVSTQYNDLIRNTLECAIRDYRSMHYQIRPRLPRLPVHKRNIALVCALDSLLPIYLDNSENLGDTHSILYCAAIAACRVAGIRFPETNTTTRPNSGKPRWQCRIECRIAEARALIGKLICFRSGNTRPRVMRFVNRAFSGTGISPRDYAARVIERIDFLKQKVYAWANRIKRYKKRCDRYTLNRTFQRDERWVYRSWERPDLVDDVHLPDIDATNTFWRNIWSVPVAHTEGDWMREVKRSCEAIETMEPVIITEDDIACVVRSLPNWKAAGPDGLHNFWLKWLRSSHVRLASQFQSALESGSLPNFMTTGVTHLLFKSGSAVDPRNYRPITCLPTVYKLLTSVLRVKITNHITGNSILSYSQNGCRSGARGTKEHLIIDAAINQQVRRNRKDMATCWIDYKKAYDSVPHTWLLRVLELYKVDTTLCTFLKACMGQWRTALRYPGCRHIRDDGELIKIERGIFQGDSLSPLWFCLALNPLSTLLEDSGLGYCLRRGGQVISHLLYMDDLKLYAPNSLRLMELLKVTENFSNSIRMEFGVDKCAVMQVKRGGIVESEGIELSDSTKLRSLSANDTYKYLGMSQALGINEAGMKQSLRERFFCRLKKVLNSLLSGGNKVRAYNDWVIPVLTYSFGILRWTQTELDALDRRVRTLLTAYRMHHPRSSVMRLYIPRKCGGRGFLNVKNLHNREIYNLREYFLKVDVDVHRDVVAVDNGLTPLALAKENWRKPAILSIDDRKEVWRSKELHGRFYRALYGPDIDLKASVSWLRFGDLFGETEGFVCAITDEVVMTNNYRRYILKDGTVDICRACHRPGESLRHIISGCSRLANGEYLHRHNLVARIIHQQLALKYKLVDSEVPYYRYVPDPVLDDGRVTLYWDRSIITDRTILANKPDIVVIDRSERRAIIVDITIPHDENLVKAEKDKQIKYLDLAREVVDMWAVDSAIVVPIVVSAHGLIAKSLDQHLKRLALDSWIKGLMQKAVLLDTARIVRRFLSLEP

SEQ ID NO: 27436 - protein, 1200 aa, Arctia plantaginis
MLTRARSRALTTSPDSSLRSVLPSPEATTEVPAVAEASSSTSSDEFFSPPTSPTPVRRQGRGRPPTSLGSRGLLTSNRVPATGGDVRRMKWTKSINENVMRAYYRATEVGTNLTAYRVRLVSLFQELEPAVNVSAQRLSDQVRAIQRCHLLDDAVLERIRSDIRNSLIIPSSSHTVDSVANSTPQLASYTDDIDELVESEVISVSTQYNDRIRSALEDAILEYRYLNCNDRPRLFRLPIHKRNLALVGALDSLLPEYLDNSEDLSDTHSILYCAAIAACRVAGVKIANNVTTTRPKSTVPAWQYRIERRITETRTLIGKLISYRSGNMRPRVMRFVKQAFLGTTISPQQYMSCVTERIDFLKQKIYAWANRIRRYKKRIDRYNPNRMFQRNEKWVYRKWEEPDPCVGDRHLPDENVTNTFWRNIWSVPVTHIEGDWLQDVRRSCESITPMELVKIDKDDVSCAVRSLPNWKSPGPDGLHNFWLKWFRSSHARLASQFQAALDSGSLPQFLTTGITHLLYKSGSVMDPKNFRPITCLPTMYKLLTSILRLKITLHIINNSIMSVSQNGCRSGTRGTKDLLIIDMTISQQVRCNRKSLATCWIDYKKAYDSVPHTWLLKVLELYKIDTTLCTFLKSCMGQWRTALRYPGCRQTAIHDVLIKIERGIFQGDSLSPLWFCLALNPLSTLLEGSGLGYRLQKDDQVISHLLYMDDLKLLASNKLQLTKLLKVTENFSNSIKMEFGVDKCAVMYVKKGVIVESEGIELLDSTKLRSLSATETYKYLGISQSLGIPESNMKQTLQERFFGRLKKVLKSLLSGGNKVRACNGWVMPVLMYSFGILRWTQTELDALDRKVRTLLTASRMHHPRSSVMRLYIPRKLGGRGLLNIKTLHNREVCNLREYFLHTDVGVHRNVVAVDTGFTPLALAKENWRRPVVLGVNDRREVWKGKELHGRFYRALNGSDIDLKASTTWLRHGDLYGETEGFVCAIMDEVIMTNNYRKYILKDGTVDICRACHRPGESIRHIISGCSRLANGEYLHRHNQVARIVHQQLALKYHLVNLEVPYYRYVPDPVLENGRATLYWDRSIITDRTIVANKPDIVLIDRLERRAMIVDIAVPHDENLVKVEKEKQIKYLDLSHEIVDMWNVDSVIIVPIVVSAHGLIAKSLDQHLKRLTLDGWIKGLMQKAVLLDTARIVRRFLSLES

SEQ ID NO: 27437 - protein, 1200 aa, Arctia plantaginis
MLTRARSRALTTSPDSSLRSVLPSPEATTEVPAVAEASSSTSSDEFFSPPTSPTPVRRQGRGRPPTSLGSRGLLTSNRVPATGGDVRRMKWTKSINENVMRAYYRATEVGTNLTAYRVRLVSLFQELEPAVNVSAQRLSDQVRAIQRCHLLDDAVLERIRSDIRNSLIIPSSSHTVDSVANNTPQLASYTDDIDELVESEVISVSTQYNDRIRSALEDAILEYRYLNCNDRPRLFRLPIHKRNLALVGALDSLLPEYLDNSEDLSDTHSILYCAAIAACRVAGVKIANNVTTTRPKSTVPAWQYRIERCITETRTLIGKLISYRSGNMRPRVMRFVKQAFLGTTISPQQYMSCVTERIDFLKQKIYAWANRIRRYKKRTDRYNQNRMFQRNEKWVYRKWEEPDPCVGDRHLPDENVTNTFWRNIWSVPVTHIEGDWLQDVRRSCESITPMEPVKIDKDDVSCAVRSLPNWKSPGPDGLHNFWLKWFRSSHARLASQFQAALDSGSLPQFLTTGITHLLYKSGSVMDPKNFRPITCLPTMYKLLTSILRLKITLHINNNSIMSVSQNGCRSGTRGTKDLLIIDMTISQQVRCNRKSLATCWIDYKKAYDSVPHTWLLKVLELYKIDTTLCTFLKSCMGQWRTALRYPGFRQTAIHDVLIKIERGIFQGDSLSPLWFCLALNPLSTLLEGSGLGYRLQKDDQVISHLLYMDDLKLLASNKLQLTKLLKVTENFSNSIKMEFGVDKCAVMYVKKGVIVESEGIELLDSTKLRSLSATETYKYLGISQSLGIPESNMKQTLQERFFGRLKKVLKSLLSGGNKVRACNGWVMPVLMYSFGILRWTQTELDALDRKVRTLLTASRMHHPRSSVMRLYIPRKLGGRGLLNIKTLHNREVCNLREYFLHTDVGVHRNVVAVDTGFTPLALAKENWRRPVVLGVNDRREVWKGKELHGRFYRALNGSDIDLKASTTWLRHGDLFGETEGFVCAIMDEVIMTNNYRKYILKDGTVDICRACHRPGESIRHIISGCSRLANGEYLHRHNQVARIVHQQLALKYHLVNLEVPYYRYVPDPVLENGRATLYWDRSIITDRTIVANKPDIVLIDRLERRAMIVDIAVPHDENLVKVEKEKQIKYLDLSHEIVDMWNVDSVIIVPIVVSAHGLIAKSLDQHLKRLTLDGWIKGLMQKAVLLDTARIVRRFLSLES

SEQ ID NO: 27438 - protein, 1200 aa, Arctia plantaginis
MLTRARSRALTTSPDSSLRSVLPSPEATTEVPAVAEASSSTSSDEFFSPPTSPTPVRRQGRGRPPTSLGSRGLLTSNRVPATGGDVRRMKWTKSINENVMRAYYRATEVGTNLTAYRVRLVSLFQELEPAVNVSAQRLSDQVRAIQRCHLLDDAVLERIRSDIRNSLIIPSSSHTVDSVANSTPQLASYTDDIDELVESEVISVSTQYNDRIRSALEDAILEYRYLNCNDRPRLFRLPIHKRNLALVGALDSLLPEYLDNSEDLSDTHSILYCAAIAACRVAGVKIANNVTTTRPKSTVPAWQYRIERRITETRTLIGKLISYRSGNMRPRVMRFVKQAFLGTTISPQQYMSCVTERIDFLKQKIYAWANRIRRYKKRIDRYNQNRMFQRNEKWVYRKWEEPDPCVGDRHLPDENVTNTFWRNIWSVPVTHIEGDWLQNVRRSCESITPMEPVKIDKDDVSCAVRSLPNWKSPGPDGLHNFWLKWFGSSHARLASQFQAALDSGSLPQFLTTGITHLLYKSGSVMDPKNFRPITCLPTMYKLLTSILRLKITLHINNNSIMSVSQNGCRSGTRGTKDLLIIDMTISQQVRCNRKSLATCWIDYKKAYDSVPHTWLLKVLELYKIDTTLCTFLKSCMGQWRTALRYPGCRQTAIHDVLIKIERGIFQGDSLSPLWFCLALNPLSTLLEGSGLGYRLQKDDQVISHLLYMDDLKLLASNKLQLTKLLKVTENFSNSIKMEFGVDKCAVMYVKKGVIVESEGIELLDSTKLRSLSATDTYKYLGISQSLGIPESNMKQTLQERFFGRLKKVLKSLLSGGNKVRACNGWVMPVLMYSFGILRWTQTELDALDRKVRTLLTASRMHHPRSSVMRLYIPRKLGGRGLLNIKTLHNREVCNLREYFLHTDVGVHRNVVAVDTGFTPLALAKENWRRPVVLGVNDRREVWKGKELHGRFYRALNGSDIDLKASTTWLRHGDLFGETEGFVCAIMDEVIMTNNYRKYILKDGTVDICRACHRPGESIRHIISGCSRLANGEYLHRHNQVARIVHQQLALKYHLVNLEVPYYRYVPDPVLENGRATLYWDRSIITDRTIVANKPDIVLIDRLERRAMIVDIAVPHDENLVKVEKEKQIKYLDLSHEIVDMWNVDSVIIVPIVVSAHGLIAKSLDQHLKRLTLDGWIKGLMQKAVLLDTARIVRRFLSLES

SEQ ID NO: 27439 - protein, 1200 aa, Arctia plantaginis
MLTRARSRALTTSPDSSLRSVLPSPEATTEVPAVAEASSSTSSDEFFSPPTSPTPVRRQGRGRPPTSLGSRGLLTSNRVPATGGDVRRMKWTKSINENVMRAYYRATEVGTNLTAYRVRLVSLFQELEPAVNVSAQRLSDQVRAIQRCHLLDDAVLERIRSDIRNSLIIPSSSHTVDSVANSTPQLASYTDDIDELVESEVISVSTQYNDRIRSALEDAILEYRYLNCNDRPRLFRLPIHKRNLALVGALDSLLPEYLDNSEDLSDTHSILYCAAIAACRVAGVKIANNVTTTRPKSTVPAWQYRIERRITETRTLIGKLISYRSGNMRPRVMRFVKQAFLGTTISPQQYMSCVTERIDFLKQKIYAWANRIRRYKKRIDRYNQNRMFQRNEKWVYRKWEEPDPCVGDRHLPDENVTNTFWRNIWSVPVTHIEGDWLQDVRRSCESITPMEPVKIDKDDVSCAVRSLPNWKSPGPDGLHNFWLKWFRSSHARLASQFQAALDSGSLPQFLTTGITHLLYKSGSVMDPKNFRPITCLPTMYKLLTSILRLKITLHINNNSIMSVSQNGCRSGTRGTKDLLIIDMTISQQVRCNRKSLATCWIDYKKAYDSVPHTWLLKVLELYKIDTTLCTFLKSCMGQWRTALRYPGCRQTAIHDVLIKIERGIFQGDSLSPLWFCLALNPLSTLLEGSGLGYRLQKDDQVISHLLYMDDLKLLASNKLQLTKLLKVTENFSNSIKMEFGVDKCADMYVKKGVIVESEGIELLDSTKLRSLSATETYKYLGISQSLGIPESNMKQTLQERFFGRLKKVLKSLLSGGNKVRACNGWVMPVLMYSFGILRWTQTELDALDRKVRTLLTASRMHHPRSSVMRLYIPRKLGGRGLLNIKTLHNREVCNLREYFLHTDVGVHRNVVAVDTGFTPLALAKENWRRPVVLGVNDRREVWKGKELHGRFYRALNGSDIDLKASTTWLRHGDLFGETEGFVCAIMDEVIMTNNYRKYILKDGTVDICRACHRPGESIRHIISGCSRLANGEYLHRHNQVARIVHQQLALKYHLVNLEVPYYRYVPDPVLENGRATLYWDRSIITDRTIVANKPDIVLIDRLERRAMIVDIAVPHDENLVKVEKEKQIKYLDLSHEIVDMWNVDSVIIVPIVVSAHGLIAKSLDQHLKRLTLDGWIKGLMQKAVLLDTARIVRRFLSLES

SEQ ID NO: 27440 - protein, 1200 aa, Arctia plantaginis
MLTRARSRALTTSPDSSLRSVLPSPEATTEVPAVAEASSSTSSDEFFSPPTSPTPVRRQGRGRPPTSLGSRGLLTSNRVPATGGDVRRMKWTKSINENVMRAYYRATEVGTNLTAYRVRLVSLFQELEPAVNVSAQRLSDQVRAIQRCHLLDDAVLERIRSDIRNSLIIPSSSHTVDSVANSTPQLASYTDDIDELVESEVISVSTQYNDRIRSALEDAILEYRYLNCNDRPRLFRLPIHKRNLALVGALDSLLPEYLDNSEDLSDTHSILYCAAIAVCRVAGVKIANNVTTTRPKSTVPAWQYRIERRIAETRTLIGKLISYRSGNTRPRVMRFVKQAFLGTTISPQQYMSCVTERIDFLKQKIYAWANRIRRYKKRIDRYNQNRMFQRNEKWVYRKWEEPDPCVGDRHLPDENVTNTFWRNIWSVPVTHIEGDWLQDVRRSCESITPMEPVKIDKDDVSCAVRLLPNWKSPGPDGLHNFWLKWFRSSHARLASQFQAALDSGSLPQFLTTGITHLLYKSGSVMDPKNFRPITCLPTMYKLLTSILRLKITLHINNNSIMSVSQNGCRSGTRGTKDLLIIDMTISQQVRRNRKSLATCWIDYKKAYDSVPHTWLLKVLELYKIDTTLCTFLKSCMGQWRTALRYPGCRQTAIHDVLIKIERGIFQGDSLSPLWFCLALNPLSTLLEGSGLGYRLQKDDKVISHLLYMDDLKLLASNKLQLTKLLKVTENFSNSIKMEFGVDKCAVMYVKKGVIVESEGIELSDSTKLRSLSATETYKYLGISQSLGIPESNMKQTLQERFFGRLKKVLKSLLSGGNKVRACNGWVMPVLMYSFGILRWTQTELDALDRKVRTLLTASRMHHPRSSVMRLYIPRKLGGRGLLNIKTLHNREICNLREYFLHTDVGVHRNVVAVDTGFTPLALAKENWRRPVVLSVNDRREVWKGKELHGRFYRALNGSDIDLKASTTWLRYGDLFGETEGFVCAIMDEVIMTNNYRKYILKDGTVDICRACHRPGESIRHIISGCSRLANGEYLHRHNQVARIVHQQLALKYHLVNLEVPYYRYVPDPVLENGRATLYWDRSIITDRTIVANKPDIVLIDRLERRAMIVDIAVPHDENLVKVEKEKQIKYLDLSHEIVDMWNVDSVIIVPIVVSAHGLIAKSLDQHLKRLTLDGWIKGLMQKAVLLDTARIVRRFLSLES

SEQ ID NO: 27441 - protein, 1100 aa, Arctia plantaginis
MRAYYRATEVGTNLTAYRVRLVSLFQELEPAVNVSAQRLSDQVRAIQRCHLLDDAVLERIRSDIRNSLIIPSSSHTVDSVANSTPQLASYTDDIDELVESEVISVSTQYNDRIRSALEDAILEYRYLNCNDRPRLFRFPIHKRNLALVGALDSLLPEYLDNSEDLSDTHSILYCAAIAVCRVAGVKIANNVATTRPKSTVPAWQYRIERRIAETRTLIGKLISYRSGNTRPRVMRFVKQAFLGTTISPQQYMSCVTERIDFLKQKIYAWANRIRRYKKRIDRYNQNRMFQRNEKWVYRKWEEPDPCVGDRHLPDENVTNTFWRNIWSVPVTHIEGDWLQDVKRSCESITPMEPVKIDKDDVSCAVRSLPNWKSPGPDGLRNFWLKWFRSSHARLASQFQAALDSGSLPQFLTTGITHLLYKSGSVMDPKNFRPITCLPTMYKLTSILRLKITLHINNNSIMSVSQNGCRSGTRGTKDLLIIDMTISQQVRRNRKSLATCWIDYKKAYDSVPHTWLLKVLELYKIDTTLCTFLKSCMGQWRTALRYPGCRQTAIHDVLIKIERGIFQGDSLSPLWFYLALNPLSTLLEGSGLGYRLQKDDKVISHLLYMDDLKLLASNKLQLTKLLKVTENFSNSIKMEFGVDKCAVMYVKKGVIVESEGIELSDSTKLRSLSATETYKYLGISQSLGIPESNMKQTLQERFFGRLKKVLKSLLSGGNKVRACNGWVMPVLMYSFGILRWTQTELDALDRKVRTLLTASRMHHPRSSVMRLYIPRKLGGRGLLNIKTLHNREICNLREYFLHTDVGVHRNVVAVDTGFTPLALAKENWRRPVVLSVNDRREVWKGKELHGRFYRALNGSDIDLKASTTWLRYGDLFGETEGFVCAIMDEVIMTNNYRKYILKDGTVDICRACHRPGESIRHIISGCSRLANGEYLHRHNQVARIVHQQLALKYHLVNLEVPYYRYVPDPVLENGRATLYWDRSIITDRTIVANKPDIVLIDRLERRAMIVDIAVPHDENLVKVEKEKQIKYLDLSHEIVDMWNVDSVIIVPIVVSAHGLIAKSLDQHLKRLTLDGWIKGLMQKAVLLDTARIVRRFLSLES

SEQ ID NO: 27442 - protein, 1199 aa, Arctia plantaginis
MITRARSKAQLTSPDSSLRSVLPSTETTTEAPAVAEASSSTSSDEFFSPPTSPTPVRRQGRGRPPICLGSRGPLTSNRVPATGGNVRRMKWTNSINENVMRAYYRATEVGTNLTAYRVRLVSLFQELEPAVNVSAQRLSDQVRAIQRCHLLDDAVLERIRSDIRNSLIIPSSSHTVDLVANSTPQLVSHTNDVDELVEGEVISVSTQYNDRIRSALEDAILEYRYVNWNNRPRLSRLPIHKRNLALVGALDSLLPDYLDNSEDLGDTHSILYCAAVAVCRVAGVNIVENVTTTRPKSTVPAWQCRIERRIAETRVLIGKLISFRSGNTRPRVMRFVKQAFLGTTIGPQQYMSCVTERIDFLKQKIYEWANRIRRYKKRIDRYNQNRMFQRNEKWVYRKWEEPDPCVSHGHLPDENVTHTFWRNIWSVPVTHIEGDWLRDVRRSCESITPMEPVIIDKDDVSCAVRSLPNWKSPGLDGLHNFWLKWFRSSHACLASQFQAALNSGSLPQFLTTGITHLLYKSGSVMDPKNFRPITCLPTMYKLLTSILRLKITLHINNNSIMSVSQNGCRSGSRGTKDLLIIDRAISQQVRRNRKSLATCWIDYKKAYDSVPHTWLLRVLELYKIDTTLCTFLKSCMGQWRTALRHPGCRQTTVIDAPIKIERGIFQGDSLSPLWFCLALNPLSTLLEGSGLGRLQKDDQVISHLLYMDDLKLLAPTKLQLSALLKVTENFSNSIKMEFGVDKCAVMYVKKGEIVESEGIELSDSTKLRSLSATETYKYLGISQSLGIPESDMKQTLQERFFGRLKKVLKSLLSGGNKVRACNGWVMPILMYSFGILKWTQIELDALDRRVRTLLTAFRMHHPRSSVMRLYIPRKLGGRGLLNIKTLHNREICNLREYFLHTDVGMHRNVVAVDIGFTPLALAKENWREPVVFSTNDRREVWKGKELHGRFYRALNGSDIDFKASTTWLRYGDLFGETEGFVCAIMDEVIMTNNYRKYILKDGTVDICRACHRPGESIRHIISGCSRLANGEYLHRHNQVAKIVHQQLALKYHLVNLEVPYYRYVPDPVLENGRATLYWDRSIITDRTIVANKPDIVVIDRLERRAIIVDIAVPHDENLVEVEKEKQIKYLDLSHEIVDMWNVDSVIIVPIVVSAHGLIAKSLDQHLKRLTLDGWIKGLIQKAVLLDTARIVRRFLSLQS

SEQ ID NO: 27443 - protein, 1200 aa, Arctia plantaginis
MLTRARSRALTTSPDSSLRSVLPSPEATTEVPAVAEASSSTSSDEFFSPPTSPTPVRRQGRGRPPTSLGSRGLLTSNRVPATGGDVRRMKWTKSINENVMRAYYRATEVGTNLTAYRVRLVSLFQELEPAVNVSAQRLSDQVRAIQRCHLLDDAVLERIRSDIRNSLIIPSSSHTVDSVANSTPQLASYTDDIDELVESEVISVSTQYNDRIRSALEDAILEYRYLNCNDRPRLFRLPIHKRNLALVGALDSLLPEYLDNSEDLSDTHSILYCAAIAACRVAGVKIANNVTTTRPKSTVPAWQYRIERRITETRTLIGKLISYRSGNMRPRVMRFVKQAFLGTTISPQQYMSCVTERIDFLKQKIYAWANRIRRYKKRIDRYNQNRMFQRNEKWVYRKWEEPDPCVGDRHLPDENVTNTFWRNIWSVPVTHIEGDWLQDVRRSCESITPMEPVKIDKDDVSCAVRSLPNWKSPGPDGLHNFWLKWFQSSHARLASQFQAALDSGSLPQFLTTGITHLLYKSGSVMDPKNFRPITCLPTMYKLLTSILRLKITLHINNNSIMSVSQNGCRSGTRGTKDLLIIDMTISQQVRCNRKSLATCWIDYKKAYDSVPHTWLLKVLELYKIDTTLCTFLKSCMGQWRTALRYPGCRQTAIHDVLIKIERGIFQGDSLSPLWFCLALNPLSTLLEGSGLGYRLQKDDQVISHLLYMDDLKLLASNKLQLTKLLKVTENFSNSIKMEFGVDKCAVMYVKKGVIVESEGIELLDSTKLRSLSATETYKYLGISQSLGIPESNMKQTLQERFFGRLKKVLKSLLSGGNKVRACNGWVMPVLMYSFGILRWTQTELDALDRKVRTLLTASRMHHPRSSVMRLYIPRKLGGRGLLNIKTLHNREVCNLREYFLHTDVGVHRNVVAVDTGFTPLALAKENWRRPVVLGVNDRREVWKGKELHGRFYRALNGSDIDLKASTTWLRHGDLFGETEGFVCAIMDEVIMTNNYRKYILKDGTVDICRACHRPGESIRHIISGCSRLANGEYLHRHNQVARIVHQQLALKYHLVNLEVPYYRYVPDPVLENGRATLYWDRSIITDRTIVANKPDIVLIDRLERRAMIVDIAVPHDENLVKVEKEKQIKYLDLSHEIVDMWNVDSVIIVPIVVSAHGLIAKSLDQHLKRLTLDGWIKGLIQKAVLLDTARIVRRFLSLES

SEQ ID NO: 27444 - protein, 1200 aa, Arctia plantaginis
MLTRARSRALTTSPDSSLRSVLPSPEATTEVPAVAEASSSTSSDEFFSPPTSPTPVRRQGRGRPPTSLGSRGLLTSNRVPATGGDVRRMKWTKSINENVMRAYYRATEVGTNLTAYRVRLVSLFQELEPAVNVSAQRLSDQVRAIQRCHLLDDAVLERIRSDIRNSLIIPSSSHTVDSVANSTPQLASYTDDIDELVESEVISVSTQYNDRIRSALEDAILEYRYLNCNDRPRLFRLPIHKRNLALVGALDSLLPEYLDNSEDLSDTHSILYCAAIAACRVAGVKIANNVTTTRPKSTVPAWQYRIERRITETRTLIGKLISYRSGNMRPRVMRFVKQAFLGTTISPQQYMSCVTERIDFLKQKIYAWANRIRRYKKRIDRYNQNRMFQRNEKWVYRKWEEPDPCVGDRHLPDENVTNTFWRNIWSVPVTHIEGDWLQDVRRSCESITPMESVKIDKDDVSCAVRSLPNWKSPGPDGLHNFWLKWFRSSHARLASQFQAALDSGSLPQFLTTGITHLLYKSGSVMDPKNFRPITCLPTMYKLLTSILRLKITLHINSNSIMSVSQNGCRSGTRGTKDLLIIDMTISQQVRCNRKSLATCWIDYKKAYDSVPHTWLLKVLELYKIDTTLCTFLKSCMGQWRTALRYPGCRQTAIHDVLIKIERGIFQGDSLSPLWFCLALNPLSTLLEGSGLGYRLQKDDQVISHLLYMDDLKLLASNKLQLTKLLKVTENFSNSIKMEFGVDKCAVMYVKKGVIVESEGIELLDSTKLRSLSATETYKYLGISQSLGIPESNMKQTLQERFFGRLKKVLKSLLSGGNKVRACNGWVMPVLMYSFGILRWTQTELDALDRKVRTLLTASRMHHPRSSVMRLYIPRKLGGRGLLNIKTLHNREVCNLREYFLHTDVGVHRNVVAVDTGFTPLALAKENWRRPVVLGVNDRREVWKGKELHGRFYRALNGSDIDLKASTTWLRHGDLFGETEGFVCAIMDEVIMTNNYRKYILKDGTVDICRACHRPGESIRHIISGCSRLANGEYLHRHNQVARIVHQQLALKYHLVNLEVPYYRYVPDPVLENGRATLYWDRSIITDRTIVANKPDIVLIDRLERRAMIVDIAVPHDENLVKVEKEKQIKYLDLSHEIVDMWNVDSVIIVPIVVSAHGLIAKSLDQHLKRLTLDGWIKGLMQKAVLLDTARIVRRFLSLES

SEQ ID NO: 27445 - protein, 1200 aa, Arctia plantaginis
MLTRARSRALTTSPDSSLRSVLPSPEATTEVPAVAEASSSTSSDEFFSPPTSPTPVRRQGRGRPPTSLGSRGLLTSNRVPATGGDVRRMKWTKSINENVMRAYYRATEVGTNLTAYRVRLVSLFQELEPAVNVSAQRLSDQVRAIQRCHLLDDAVLERIRSDIRNSLIIPSSSHTVDSVANSTPQLASYTDDIDELVESEVISVSTQYNDRIRSALEDAILEYRYLNCNDRPRLFRLPIHKRNLALVGALDSLLPEYLDNSEDLSDTHSILYCAAIAACRVAGVKIANNVTTTRPKSTVPAWQYRIERRITETRTLIGKLISYRSGNMRPRVMRFVKQAFLGTTISPQQYMSCVTERIDFLKQKIYAWANRIRRYKKRIDRYNQNRMFQRNEKWVYRKWEEPDPCVGDRHLPDENVTNTFWRNIWSVPVTHIEGDWLQDVRRSCESITPMEPVKIDKDDVSCAVRSLPNWKSPGPDGLHNFWLKWFRSSHARLASQFQAALDSGSLPQFLTTGITHLLYKSGSVMDPKNFRPITCLPTMYKLLTSILRLKITLHINNNSIMSVSQNGCRSGTRGTKDLLIIDMTISQQVRCNRKSLATCWIDYKKAYDSVPHTWLLKVLELYKIDTTLCTFLKSCMGQWRTALRYPGCRQTAIHDVLIKIERGIFQGDSLSPLWFCLALNPLSTLLEGSGLGYRLQKDDQVISHLLYMDDLKLLASNKLQLTKLLKVTENFSNSIKMEFGVDKCAVMYVKKGVIVESEGIELLDSTKLRSLSATETYKYLGISQSLGIPESNMKQTLQERFFGRLKKVLKSLLSGGNKVRACNGWVMPVLMYSFGILRWTQTELDALDRKVRTLLTASRMHHPRSSVMRLYIPRKLGGRGLLNIKTLHNREVCNLREYFLHTDVGVHRNVVAVDTGFTPLALAKENWRRPVVLGVNDRREVWKGKELHGRFYRALNGSDIDLKASTTWLRHGDLFGETEGFVCAIMDEVIMTNNCRKYILKDGTVDICRACHRPGESIRHIISGCSRLANGEYLHRHNQVARIVHQQLALKYHLVNLEVPYYRYVPDPVLENGRATLYWDRSIITDRTIVANKPDIVLIDRLERRAMIVDIAVPHDENLVKVEKEKQIKYLDLSHEIVDMWNVDSVIIVPIVVSAHGLIAKSLDQHLKRLTLDGWIKGLMQKAVLLDTARIVRRFLSLES

SEQ ID NO: 27446 - protein, 1189 aa, Arctia plantaginis
MITRARSKAQLTSPDSSLRSVLPSTETTTEAPAVAEASSSTSSDEFFSPPTSPTPVRRQGRGRPPICLGSRGPLTSNRVPATGGNVRRMKWTNSINENIMRAYYRATEMGTNLTAYRVRLVSLFQELEPAVNVSAQRLSDQVRAIQRCHLLDDAVFERIRSDLRNSLIIPSSSHTVDLVANSTPQLVSHTNDVDELVEGEVISVSTQYNDRIRSALEDAILEYRYVNWNNRPRLSRLPIHKRNLALVGALDSLLPDYLDNSEDLGDTHSILYCAAVAVCRVAGVNIVENVTTTRPKSTVPAWQCRIERRIAETRVLIGKLISFRSGNTRPRVMRFVKQAFLGTTIGPQQYMSCVTERIDFLKQKIYAWANRLRRYKKRIDRYNQNRMFQRNEKWVYRKWEEPDPCVSHGHLPDENVTHTFWRNIWSVPVTHIEGDWLRDVRRSCESITPMEPVIIDKDDVSCAVRSLPNWKSPGLDGLHNFWLKWFRSSHACLASQFQAALDSGSLPQFLTTGITHLLYKSGSVMDPKNFRPITCLPTMYKLLTSILRLKITLHINNNSIMSVSQNGCRSGSRGTKDLLIIDRAISQQVRRNRKSLATCWIDYKKAYDSVPHTWLLRVLELYKIDTTLCTFLKSCMGQWRTALRYPGCRQTTVIDAPIKIERGIFQGDSLSPLWFCLALNPLSTLLEGSGLGYRLQKDDQVISHLLYMDDLKLLAPTKLQLSALLKVTENFSNSIKMEFGVDKCAVMYVKKGEIVESEGIELSDSTKLRSLSATETYKYLGISQSLGIPESDMKQTLQERFFGLLKKVLKSLLSGGNKVRACNGWVMPILMYSFGILKWTQTELDALDRRVRTLLTAFRMHHPRSSVMRLYIPRKLHNREICNLREYFLHTDVGMHRNVVAVDIGFTPLALAKENWRKPVVFSTNDRREVWKGKELHGRFYRALNGSDIDFKASTTWLRYGDLFGETEGFVCAIMDEVIMTNNYRKYILKDGTVDICRACHRPGESIRHIISGCSRLANGEYLHRHNQVARIVHQQLALKYHLVNLEVPYYRYVPDPVLENGRATLYWDRSIITDKTIVANKPDIVVIDRLERRAMIVDIAVPHDENLVKVEKEKQIKYLDLSHEIVDMWNVDSVIIVPIVVSAHGLIAKSLDQHLKRLTLDGWIKGLIQKAVLLDTARIVRRFLSLQS

SEQ ID NO: 27447 - protein, 1200 aa, Arctia plantaginis
MLTRARSRALTTSPDSSLRSVLPSPEATTEVPAVAEASSSTSSDEFFSPPTSPTPVRRQGRGRPPTSLGSRGLLTSNRVPATGGDVRRMKWTKSINENVMRAYYRATEVGTNLTAYRVRLVSLFQELEPAVNVSAQRLSDQVRAIQRCHLLDDAVLERIRSDIRNSLIIPSSSHTVDSVANSTPQLASYTDDIDELVESEVISVSTQYNDRIRSALEDAILEYRYLNCNDRPRLFRLPIHKRNLALVGALDSLLPEYLDNSEDLSDTHSILYCAAIAACRVAGVKIANNVTTTRPKSTVPAWQYRIERRITETRTLIGKLICYRSGNMRPRVMRFVKQAFLGTTISPQQYMSCVTERIDFLKQKIYAWANRIRRYKKRIDRYNQNRMFQRNEKWVYRKWEEPDPCVGDRHLPDENVTNTFWRNIWSVPVTHIEGDWLHDVRRSCESITPMEPVKIDKDDVSCAVRSLPNWKSPGPDGLHNFWLKWFRSSHARLASQFQAALDSGSLPQFLTTGITHLLYKSGSVMDPKNFRPITCLPTMYKLLTSILRLKITLHINNNSIMSVSQNGCRSGTRGTKDLLIIDMTISQQVRCNRKSLATCWIDYKKAYDSVPHTWLLKVLELYKIDTTLCTFLKSCMGQWRTALRYPGCRQTAIHDVLIKIERGIFQGDSLSPLWFCLALNPLSTLLEGSGLGYRLQKDDQVISHLLYMDDLKLLASNKLQLTKLLKVTENFSNSIKMEFGVDKCAVMYVKKGVIVESEGIELLDSTKLRSLSATETYKYLGISQSLGIPESNMKQTLQERFFGRLKKVLKSLLSGGNKVRACNGWVMPVLMYSFGILRWTQTELDALDRKVRTLLTASRMHHPRSSVMRLYIPRKLGGRGLLNIKTLHNREVCNLREYFLHTDVGVHRNVVAVDTGFTPLALAKENWRRLVVLGVNDRREVWKGKELHGRFYRALNGSDIDLKASTTWLRHGDLFGETEGFVCAIMDEVIMTNNYRKYILKDGTVDICRACHRPGESIRHIISGCSRLANGEYLHRHNQVARIVHQQLALKYHLVNLEVPYYRYVPDPVLENGRATLYWDRSIITDRTIVANKPDIVLIDRLERRAMIVDIAVPHDENLVKVEKEKQIKYLDLSHEIVDMWNVDSVIIVPIVVSAHGLIAKSLDQHLKRLTLDGWIKGLMQKAVLLDTARIVRRFLSLES

SEQ ID NO: 27448 - protein, 1200 aa, Arctia plantaginis
MLTRARSRALTTSPDSSLRSVLPSPEATTEVPAVAEASSSTSSDEFFSPPTSPTPVRRQGRGRPPTSLRSRGLLTSNRVPATGGDVRRMKWTKSINENVMRAYYRATEVGMNLTAYRVRLVSLFQELEPTVNVSAQRLSDQVRAIQRCHLLDDAVLERIRSDIRNSLIIPSSSHTVDSVANNTPQLASYTNDIDELVESEVISVSTQYNDRIRSALEDAILEYRYLNCNDRPRLFRLPIHKRNLALVGALDSLLPEYLDNSEDLSDTHSILYCAAIAVCRVAGVKIANNVTTTRPKSTVPAWQYRIERRIAETRTLIGKLISYRSGNTRPRVMRFVKQAFLGTTISPQQYMSCVTERIDFLKQKIYAWANRIRRYQKRIDRYNQNRMFQRNEKWVYRKWEEPDPCVGDRHLPDENVTNTFWRNIWSVPVTHIEGDWLQDVRRSCESITPMEPVKIDKDDVSCAVRSLPNWKSPGPDGLHNFWLKWFRSSHARLASQFQAALDSGSLPQLLTTGITHLLYKSGSVMDPKNFRPITCLPTMYKLLTSILRLKITLHINNNSIMSVSQNGCRSGTRGTKDLLIIDMTISQQVRRNRKSLATCWIDYKKAYDSVPHTWLLKVLELYKIDTTLCTFLKSCMGQWRTALRYPGCRQTAIHDVLIKIERGIFQGNSLSPLWFCLALNPLSTLLEGSGLGYRLQKDDKVISHLLYMDDLKLLASNKLQLTKLLKVTENFSNSIKMEFGVDKCAVMYVKKGVIVESEGIELSDSTKLRSLSATETYKYLGISQSLGIPESNMKQTLQERFFGRLKKVLKSLLSGGNKVRACNGWVMPVLMYSFGILRWTQTELDALDRKVRTLLTASRMHHPRSSVMRLYIPRKLGGRGLLNIKTLHNREICNLREYFLHTDVGVHRNVVAVDTGFTPLALAKENWRRPVVLSVNDRREVWKGKELHGRFYRALNGSDIDLKASTTWLRYGDLFGETEGFVCAIMDEVIMTNNYRKYILKDGTVDICRACHRPGESIRHIISGSSRLANGEYLHRHNQVARIVHQQLALKYHLVNLEVPYYRYVPDPVLENGRATLYWDRSIITDRTIVANKPDIVLIDRLERRAMIVDIAVPHDENLVKVEKEKQIKYLDLSHEIVDMWNVDSVIIVPIVVSAHGLIAKSLDQHLKRLTLDGWIKGLMQKAVLLDTARIVRRFLSLES

SEQ ID NO: 27449 - protein, 1200 aa, Arctia plantaginis
MLTRARSRALTTSPDSSLRSVLPSPEATTEVPAVAEASSSTSSDEFFSPPTSPTPVRRQGRGRPPTSLGSRGLLTSNRVPATGGDVRRMKWTKSINENVMRAYYRATEVGTNLTAYRVRLVSLFQELEPAVNVSAQRLSDQVRAIQRCHLLDDAVLERIRSDIRNSLIIPSSSHTVDSVANSTPQLASYTDDIDELVESEVISVSTQYNDRIRSALEDAILEYRYLNCNDRPRLFRLPIHKRNLALVGALDSLLPEYLDNSEDLSDTHSILYCAAIAVCRVAGVKIANNVTTTRPKSTVPAWQYRIERRITETRTLIGKLISYRSGNMRPRVMRFVKQAFLGTTISPQQYMSCVTERIDFLKQKIYAWANRIRRYKKRIDRYNQNRMFQRNEKWVYRKWEEPDPCVGDRHLPDENVTNTFWRNIWSVPVTHIEGDWLQDVRRSCESITPMEPVKIDKDDVSCAVRSLPNWKSPGPDGLHNFWLKWFRSSHARLASQFQAALDSGSLPQFLTTGITHLLYKSGSVMDPKNFRPITCLPTMYKLLTSILRLKITLHINNNSIMSVSQNGCRSGTRGTKDLLIIDMTISQQVRCNRKSLATCWIDYKKAYDSVPHTWLLKVLELYKIDTTLCTFLKSCMGQWRTALRYPGCRQTAIHDVLIKIERGIFQGDSLSPLWFCLALNPLSTLLEGSGLGYRLQKDDQVISHLLYMDDLKLLASNKLQLTKLLKVTENFSNSIKMEFGVDKCAVMYVKKGVIVESEGIELLDSTKLRSLSATETYKYLGISQSLGIPESNMKQTLQERFFGRLKKVLKSLLSGGNKVRACNGWVMPVLMYSFGILRWTQTELDALDRKVRTLLTASRMHHPRSSVMRLYIPRKLGGRGLLNIKTLHNREVCNLREYFLHTDVGVHRNVVAVDTGFTPLALAKENWRRPVVLGVNDRREVWKGKELHGRFYRALNGSDIDLKASTTWLRHGDLFGETEGFVCAIMDEVIMTNNYRKYILKDGTVDICRACHRPGESIRHIISGCSRLANGEYLHRHNQVARIVHQQLALKYHLVNLEVPYYRYVPDPVLENGRATLYWDRSIITDRTIVANKPDIVLIDRLERRAMIVDIAVPHDENLVKVEKEKQIKYLDLSHEIGDMWNVDSVIIVPIVVSAHGLIAKSLDQHLKRLTLDGWIKGLMQKAVLLDTARIVRRFLSLES

SEQ ID NO: 27450 - protein, 1200 aa, Arctia plantaginis
MLTRARSRALTTSPDSSLRSVLPSPEATTEVPAVAEASSSTSSDEFFSPPTSPTPVRRQGRGRPPTSLGSRGLLTSNRVPATGGDVRRMKWTKSINENVMRAYYRATEVGTNLTAYRVRLVSLFQELEPAVNVSAQRLSDQVRAIQRCHLLDDAVLERIRSDIRNSLIIPSSSHTVDSVANSTPQLASYTDDIDELVESEVISVSTQYNDRIRSALEDAILEYRYLNCNDRPRLFRLPIHKRNLALVGALDSLLPEYLDNSEDLSDTHSILYCAAIAVCRVAGVKIANNVTTTRPKSTVPAWQYRIERRITETRTLIGKLISYRSGNMRPRVMRFVKQAFLGTTISPQQYMSCVTERIDFLKQKIYAWANRIRRYKKRIDRYNQNRMFQRNEKWVYRKWEEPDPCVGDRHLPDENVTNTFWRNIWSVPVTHIEGDWLQDVRRSCESITPMEPIKIDKDDVSCAVRSLPNWKSPGPDGLHNFWLKWFRSSHARLASQFQAALNSGSLPQFLTTGITHLLYKSGSVMDPKNFRPITCLPTMYKLLTSILRLKITLHINNNSIMSVSQNGCRSGTRGTKDLLITDMTISQQVRCNRKSLATCWIDYKKAYDSVPHTWLLKVLELYKIDTTLCTFLKSCMGQWRTALRYPGCRQTAIHDVLIKIERGIFQGDSLSPLWFCLALNPLSTLLEGSGLGYRLQKDDQVISHLLYMDDLKLLASNKLQLTKLLKVTENFSNSIKMEFGVDKCAVMYVKKGVIVESEGIELLDSTKLRSLSATETYKYLGISQSLGIPESNMKQTLQERFFGRLKKVLKSLLSGGNKVRACNGWVMPVLMYSFGILRWTQTELDALDRKVRTLLTASRMHHPRSSVMRLYIPRKLGGRGLLNIKTLHNREVCNLREYFLHTDVGVHRNVVAVDTGFTPLALAKENWRRPVVLGVNDRREVWKGKEFHGRFYRALNGSDIDLKASTTWLRHGDLFGETEGFVCAIMDEVIMTNNYRKYILKDGTVDICRACHRPGESIRHIISGCSRLANGEYLHRHNQVARIVHQQLALKYHLVNLEVPYYRYVPDPVLENGRATLYWDRSIITDRTIVANKPDIVLIDRLERRAMIVDIAVPHDENLVKVEKEKQIKYLDLSHEIVDMWNVDSVIIVPIVVSAHGLIAKSLDQHLKRLTLDGWIKGLMQKAVLLDTARIVRRFLSLES

SEQ ID NO: 27451 - protein, 1200 aa, Arctia plantaginis
MLTRARSRALTTSPDSSLRSVLPSPEATTEVPAVAEASSSTSSDEFFSPPTSPTPVRRQGRGRPPSSLGSRGLLTSNRVPATGGDVRRMKWTKSINENVMRAYYRATEVGTNLTAYRVRLVSLFQELEPTVNVSAQRLSDQVRAIQRCHLLDDAVLERIRSDIRNSLIIPSSSHTVDSVANSTPQLASYTDDIDELVESEVISVSTQYNDRIRSALEDAILEYRYLNCNDRPRLFRLPIHKRNLALVGALDSLLPEYLDNSEDLSDTHSILYCAAIAVCRVAGVKIANNVATTRPKSTVPAWQYRVERRIAETRTLIGKLISYRSGNTRPRVMRFVKQAFLGTTVSPQQYMSCVTERIDFLKQKIYAWANRIRRYKKRIDRYNQNRMFQRNEKWVYRKWEEPDPCVGDRHLPDENVTNTFWRNIWSVPVTHIEGDWLQDVKRSCESITPMEPVKIDKDDVSCAVRSLPNWKSPGPDGLHNFWLKWFRSSHARLASQFQAALDSGSLPQFLTTGITHLLYKSGSVMDPKNFRPITCLPTMYKLLTSILRLKITLHINNNSIMSVSQNGCRSGTRGTKDLLIIDMTISQQVRRNRKSLATCWIDYKKAYDSVPHTWLLRVLELYKIDTTLCTFLKSCMGQWRTALRYPGCRQTAIHDVLIKIERGIFQGDSLSPLWFCLALNPLSTLLEGSGLGYRLQKDDKVISHLLYMDDLKLLASNKLQLTKLLKVTENFSNSIKMEFGVDKCAVMYVKKGVIVESEGIELSDSTKLRSLSATETYKYLGISQSLGIPESNMKQTLQERFFGRLKKVLKSLLSGGNKVRACNGWVMPVLMYSFGILRWTQTELDALDRKVRTLLTASRMHHPCSSVMRLYIPRKLGGRGLLNIKTLHNREICNLREYFLHTDVGVHRNVVAVDTGFTPLALAKENWRRPVVLSVNDRREVWKGKELHGRFYRALNGSDIDLKASTTWLRYGDLFGETEGFVCAIMDEVIMTNNYRKYILKDGTVDICRACHRPGESIRHIISGCSRLANGEYLHRHNQVARIVHQQLALKYHLVNLEVPYYRYVPDPVLENGRATLYWDRSIITDRTIVANKPDIVLIDRLERRAMIVDIAVPHDENLVKVEKEKQIKYLDLSHEIVDMWNVDSVIIVPIVVSAHGLIAKSLDQHLKRLTLDGWIKGLMQKAVLLDTARIVRRFLSLES

SEQ ID NO: 27452 - protein, 868 aa, Arctia plantaginis
MRFVKQAFLGTTISPQQYMSCVTERIDFLKQKIYAWANRIRRYKKRIDRYNQNRMFQRNEKWVYRKWEEPDPCVGDRHLPDENVTNTFWRNIWSVPVTHIEGDWLQDVRRSCESITPMEPVKIDKDDVSCAVRLLPNWKSPGPDGLHNFWLKWFRSSHARLASQFQAALDSGSLPQFLTTGITHLLYKSGSVMDPKNFRPITCLPTMYKLLTSILRLKITLHINNNSIMSVSQNGCRSGTRGTKDLLIIDMTISQQVRCNRKSLATCWIDYKKAYDSVPHTWLLKVLELYKIDTTLCTFLKSCMGQWRTALRYPGCRQTAIHDVLIKIERGIFQGDSLSPLWFCLALNPLSTLLEGSGLGYRLQKDDKVISHLLYMDDLKLLASNKLQLTKLLKVTENFSNSIKMEFGVDKCAVMYVKKGVIVESEGIELSDSTKLRSLSATETYKYLGISQSLGIPESNMKQTLQERFFGRLKKVLKSLLSGGNKVRACNGWVMPVLMYSFGILRWTQTELDALDRKVRTLLTASRMHHPRSSVMRLYIPRKLGGRGLLNIKTLHNREICNLREYFLHTDMGVHRNVVAVDTGFTPLALAKENWRRPVVLSVNDRREVWKGKELHGRFYRALNGSDIDLKASTTWLRYGDLFGETEGFVCAIMDEVIMTNNYRKYILKDGTVDICRACHRPGESIRHIISGCSRLANGEYLHRHNQVARIVHQQLALSYHLVNLEVPYYRYVPDPVLENGRATLYWDRSIITDRTIVANKPDIVLIDRLERRAMIVDIAVPHDENLVKVEKEKQIKYLDLSHEIVDMWNVDSVIIVPIVVSAHGLIAKSLDQHLKRLTLDGWIKGLMQKAVLLDTARIVRRFLSLES

SEQ ID NO: 27453 - protein, 1200 aa, Arctia plantaginis
MLTRARSRALTTSPDSSLRSVLPSPEATTEVPAVAEASSSTSSDEFFSPPTSPTPVRRQGRGRPPTSLGSRGLLTSNRVPATGGDVRRMKWTKSINENVMRAYYRATEVGTNLTAYRVRLVSLFQELEPAVKVSAQRLSDQVRAIQRCHLLDDAVLERIRSDIRNSLIIPSSSHTVDSVANSTPQLASYTDDIDELVESEVISVSTQYNDRIRSALEDAILEYRYLNCNDRPRLFRLPIHKRNLALVGALDSLLPEYLDNSEDLSDTHSILYCAAIAACRVAGVKIANNVTTTRPKSTVPAWQYRIERRITETRTLIGKLISYRSGNMRPRVMRFVKQAFLGTTISPQQYMSCVTERIDFLKQKIYAWANRIRRYKKRIDRYNQNRMFQRNEKWVYRKWEEPDPCVGDRHLPDENVTNTFWRNIWSVPVTHIEGDWLQDVRRSCESITPMEPVKIDKDDVSCAVRSLPNWKSPGPDGLHNFWLKWFRSSHARLASQFQAALDSGSLPQFLITGITHLLYKSGSVMDPKNFRPITCLPTMYKLLTSILRLKITLHINNNSIMSVSQNGCRSGTRGTKDLLIIDMTISQQVRCNRKSLATCWIDYKKAYDSVPHTWLLKVLELYKIDTTLCTFLKSCMGQWRTALRYPGCRQTAIHDVLIKIERGIFQGDSLSPLWFCLALNPLSTLLEGSGLGYRLQKDDQVISHLLYMDDLKLLASNKLQLTKLLKVTENFSNSIKMEFGVDKCAVMYVKKGVIVESEGIELLDSTKLRSLSATETYKYLGISQSLGIPESNMKQTLQERFFGRLKKVLKSLLSGGNKVRACNGWVMPVLMYSFGILRWTQTELDALDRKVRTLLTASRMHHPRSSVMRLYIPRKLGGRGLLNIKTLHNREVCNLREYFLHTDVGVHRNVVAVDTGFTPLALAKENWRRPVVLGVNDRREVWKGKELHGRFYRALNGSDIDLKASTTWLRHGDLFGETEGFVCAIMDEVIMTNNYRKYILKDGTVDICRACHRPGESIRHIISGCSRLANGEYLHRHNQVARIVHQQLALKYHLVNLEVPYYRYVPDPVLENGRATLYWDRSIITDRTIVANKPDIVLIDRLERRAMIVDIAVPHDENLVKVEKEKQIKYLDLSHEIVDMWNVDSVIIVPIVVSAHGLIAKSLDQHLKRLTLDGWIKGLMQKAVLLDTARIVRRFLSLES

SEQ ID NO: 27454 - protein, 873 aa, Arctia plantaginis
MRPRVMRFVKQAFLGTTISPQQYMSCVTERIDFLKQKIYAWANRIRRYKKRIDRYNQNRMFQRNEKWVYRKWEEPDPCVGDRHLPDENVTNTFWRNIWSVPVTHIEGDWLQDVRRSCESITAMEPVKIDKDDVSCAVRSLPNWKSPGPDGLHNFWLKWFRSSHARLASQFQAALDSGSLPQFLTTGITHLLYKSGSVMDPKNFRPITCLPTMYKLLTSILRLKITLHINNNSIMSVSQNGCRSGTRGTKDLLIIDMTISQQVCCNRKSLATCWIDYKKAYDSVPHTWLLKVLELYKIDTTLCTFLKSCMGQWRTALRYPGCRQTAIHDVLIKIERGIFQGDSLSPLWFCLALNPLSTLLEGSGLGYRLQKDDQVISHLLYMDDLKLLASNKLQLTKLLKVTENFSNSIKMEFGVDKCAVMYVKKGVIVESEGIELLDSTKLRSLSATETYKYLGISQSLGIPESNMKQTLQERFFGRLKKVLKSLLSGGNKVRACNGWVMPVLMYSFGILRWTQTELDALDRKVRTLLTASRMHHPRSSVMRLYIPRKLGGRGLLNIKTLHNREVCNLREYFLHTDVGVHRNVVAVDTGFTPLALAKENWRRPVVLGVNDRREVWKGKELHGRFYRALNGSDIDLKASTTWLRHGDLFGETEGFVCAIMDEVIMTNNYRKYILKDGTVDICRACHRPGESIRHIISGCSRLANGEYLHRHNQVARIVHQQLALKYHLVNLEVPYYRYVPDPVLENGRATLYWDRSIITDRTIVANKPDIVLIDRLERRAMIVDIAVPHDENLVKVEKEKQIKYLDLSHEIVDMWNVDSVIIVPIVVSAHGLIAKSLDQHLKRLTLDGWIKGLMQKAVLLDTARIVRRFLSLES

SEQ ID NO: 27455 - protein, 1112 aa, Arctia plantaginis
MKWTKSINENVMRAYYRATEVGTNLTAYRVRLVSLFQELEPAVNVSAQRLSDQVRAIQRCHLLDDAVLERIRSDIRNSLIIPSSSHTVDSVANSTPQLASYTDDIDELVESEVISVSTQYNDRIRSALEDAILEYRYLNCNDRPRLFRLPIHKRNLALVGALDSLLPEYLDNSEDLSDTHSILYCAAIAVCRVAGVKIANNVTTTRPKSTVPAWQYRIERRITETRTLIGKLISYRSGNMRPRVMRFVKQAFLGTTISPQQYMSCVTERIDFLKQKIYAWANRIRRYKKRIDRYNQNRMFQRNEKWVYRKWEEPDPCVGDRHLPDENVTNTFWRNIWSVPVTHIEGDWFQDVRRSCESITPMEPVKIDKDDVSCAVRSLPNWKSPGPDGLHNFWLKWFRSSHARLASQFQAALDSGSLPQFLTTGITHLLYKSGSVMDPKNFRPITCLPTMYKLLTSILRLKITLHINNNSIMSVSQNGCRSGTRGTKDLLIIDMTISQQVRCNRKSLATCWIDYKKAYDSVPHTWLLKVLELYKIDTTLCTFLKSCMGQWRTALRYPGCRQTAIHDVLIKIERGIFQGDSLSPLWFCLALNPLSTLLEGSGLGYRLQKDDQVISHLLYMDDLKLLASNKLQLTKLLKVTENFSNSIKMEFGVDKCAVMYVKKGVIVESEGIELLDSTKLRSLSATETYKYLGISQSLGIPESNMKQTLQERFFGRLKKVLKSLLSGGNKVRACNGWVMPVLMYSFGILRWTQTELDALDRKVRTLLTASRMHHPRSSVMRLYIPRKLGGRGLLNIKTLHNRKVCNLREYFLHTDMGVHRNVVAVDTGFTPLALAKENWRRPVVLGVNDRREVWKGKELHGRFYRALNGSDVDLKASTTWLRHGDLFGETEGFVCAIMDEVIMTNNYRKYILKDGTVDICRACHRPGESIRHIISGCSRLANGEYLHRHNQVARIVHQQLALKYHLVNLEVPYYRYVPDPVLENGRATLYWDRSIITDRTIVANKPDIVLIDRLERRAMIVDIAVPHDENLVKVEKEKQIKYLDLSHEIVDMWNVDSVIIVPIVVSAHGLIAKSLDQHLKRLTLDGWIKGLMQKAVLLDTARIVRRFLSLES

SEQ ID NO: 27456 - protein, 1078 aa, Spilosoma lubricipeda
MLTRAKLRAQLSPPDSSLCSALPPREATVEVSAVAEASSSSSSDEFFSPPTSPTPVRRQGRGRPPTSLGSRGPLTSNRAPATGGDVRRMKWTRCINENVMRAYFRATELGTNLTAYRVRLVSLFQELEPAVNVSAQRLSDQVRAIQRCHLLDDVVLERIRSDVRNTLTVPSSSHAVDVVGNTQQLPYNEDVDEQVESEIISVSTQYNDRIRSALEDAIQDYRYVNYNNRPRLPRLPIHKRNLALVSALNSLLPDYFGNSEDLSDTHSILYCAAIAVCRVAGIKFNVEQITTRPKNTVPAWQYRIERRIAETRTLIGKLIAFKFGNTRPRVMRFVKQAFLGTTISPQQYMSSVTERIDFLKQKVYAWANRIRRYKKRGDRFNQNRMFQRNEKWVYRKWEAPNPCESDGDLPDENTTNSFWRNIWSVPVTHTDGDWMRDVSRSCESITSMEPVIINEDDISCAVRSLPNWKSPGPDGLHNFWLKWFRSSHACLASQLQAALDSGSLPQFLTTGITHLLYKSGSAMDPKNFRPITCLPTLYKLLTSILRLKITKHINNNSIISVSQNGCRSGTRGTKELLITDMTISQQVRRNRKSLATCWIDYKKAFDSVPHTWLLKVLELYKIDTTLCTFLKSCMRQWRTVLRYPGCRQTAVNDVPIKIERGIFQGDSLSPLWFCLALNPLSTLLEGSGLGYRLQKEAPVISHLFYMDDLKLFAPTKLQLTALLRVTENFSNYIKMEFGIDKCAVMHVKKGVIVESEGIELSDSTRLRSLSATETYKYLGFSQSLGIPESDMKQSLRERFFGRLKKVLKSLLSGGNKVRAYNGWVMPVLMYSFGILRWTQTELDALDRRVRTLLTAFRMHHPRSSVMRLYIPRKFGGRGLLNVKTLHNREIYNLREYFLHTDVGVHRSVVAVDTGLTPLALAKENWRKPVVLGTNERREVWKGKELHGRFYRALNGSDIDFKASTSWLRYGDLFGETEGFVCAIMDEVIMTNNYRKYILKDGTVDICRACHRPGESIRHIISGCSRLANGEYLHRHNQVARIVHQQLALKYKLVSSEVPYYRYVPDPVLENGRATLYWD

SEQ ID NO: 27457 - protein, 1196 aa, Spilosoma lubricipeda
MLTRARARALLPSSDSSLRSALPSSDARTEVPTVAEASSSSSSDEFFSPPTSPIPVRRQGRDRPPTSLGSRGPLTSNRAPATGGDVRRMKWTQSINENVMRAYFRATELGTNLTAYRVRLVSLFQELEPAVNVSAQRLSDQVRAIQRCHLLDDTVLERICSDIRNSLTVPSSPHVVDVVTNSTPQNEDVSELVDSEIISVSTLYNDKIRSTLEDVIREYRCVNFNNRPRLPRLPIHKRNLALVSALDSLLPDYFGNSEDLSDTHSILYCAAIAVCRVAGIKFAENITTTRPENTVPAWQCRIERRIAGARTLIGKLISFRSGNTRPKVMRFVKQAFLGTTISPQQYMSCVTERIDFLKQKVYAWANRIRRYRKRIDRYNQNRMFQRNEKWVYRKWENLSPCMSDGQVPDENATNSFWRSIWSVPVAHTEGDWYRDVERSCESLLPMELINIDKEDVSCAVRSLPNWKAPGPDGLHNFWLKWFRSSHACLASQFQTALDSGSLPQFLTTGITHLLYKSGSAMDPKNFRPITCLPTLYKLLTSILRLKITTHINQNSILSISQNGCRSGTRGTKELLIIDMTISQQVRRNRKSLATCWIDYKKAFDSVPHTWLLKVLELYKIDTTLCTFLKSCMRQWRTVLRYPGCRQTAVNDVPIKIERGIFQGDSLSPLWFCLALNPLSTLLEGSGLGYRLQKEAPVISHLFYMDDLKLFAPTKLQLTALLRVTENFSNSIKMEFGIDKCAVMHVKKGVIVESEGIELSDSTRLRSLSVTETYKYLGFSQSLGIPESDMKQSLRERFFGRLKKVLKSLLSGGNRVRAYNGWVMPVLMYSFGILRWTQTELDALDRRVRTLLTAFRMHHPRSSVMRLYIPRKFGGRGLLNVKTLHNREICNLREYFLHTDVGVHRSVVAMDTGLTPLALAKENWRKPVVLGTNERREVWKGKELHGRFYRALNGPDIDFKASTSWLRYGDLFGETEGFVCAIMDEVIMTNNYRKYILKDGTVDICRACHRPGESIRHIISGCSRLANGEYLHRHNQVARIVHQQLALKYKLVNSEVPYYRYVPDPVLENGHATLYWDRSIITDRTIVANKPDIVVIDRSERRAMIVDIAVPHDENLVKVEKEKQIKYLDLSHEIVDMWDVDSVIIVPIVVSVHGLIAKSLDQHLKRLTLDGWIKGLMQKAVLLDTARIVRRFLSLEP

SEQ ID NO: 27458 - protein, 981 aa, Spilosoma lubricipeda
MDRNRKVNLIIIIIICRLPIHKRNLALVSALNSLLPDYFGDSEDLSDTHSILYCAAIAVCRVAGIKFNVEQITTRPKNTVPAWQYRIERRIAETRTLIGKLIAFKFGNTRPRVMRFVKQAFLGTTISPQQYMSSVTERIDFLKQKVYAWANRIRRYKKRGDRFNQNRMFQRNEKWVYRKWEAPNPCESDGDLPDENTTNSFWRNIWSVPVTHTDGDWMRDVSRSCESITSMEPVIINEDDISCAVRSLPNWKSPGPDGLHNFWLKWFRSSHACLASQLQAALDSGSLPQFLTTGITHLLYKSGSAMDPKNFRPITCFPTLYKLLTSILRLKITKHINNNSIISVSQNGCRSGTRGTKELLITDMTISQQVRRNRKSLATCWIDYKKAFDSVPHTWLLKVLELYKIDTTLCTFLKSCMRQWRTVLRYPGCRQTAVNDVPIKIERGIFQGDSLSPLWFCLALNPLSTLLEGSGLGYRLQKEAPVISHLFYMDDLKLFAPTKLQLTALLRVTENFSNSIKMEFGIDKCAVMHVKKGVIVESEGIELSDSTRLRSLSATETYKYLGFSQSLGIPESDMKQSLRERFFGRLKKVLKSLLSGGNKVRAYNGWVMPVLMYSFGILRWTQTELDALDRRVRTLLTAFRMHHPRSSVMRLYIPRKFGGRGLLNVKTLHNREIYNLREYFLHTDVGVHRSVVAVDTGLTPLALAKENWRKPVVLGTNERREVWKGKELHGRFYRALNGSDIDFKASTSWLRYGDLFGETEGFVCAIMDEVIMTNNYRKYILKDGTVDICRACHRPGESIRHIISGCSRLANGEYLHRHNQVARIVHQQLALKYELVSSEVPYYRYVPDPVLENGRATLYWDRSVITDRTIVANKPDIVVIDRSERRAMIVDIAVPHDENLVKVEKEKQIKYLDLSHEIVEMWDVDSVIIVPIVVSVHGLIAKSLDQHLKRLTLDGWIKGLMQKAVLLDTARIVRRFLSLEP

SEQ ID NO: 27459 - protein, 1114 aa, Spilarctia lutea
MLTRARRRAQLSPPDSSLRSALPSPEEAIEVPAGAEASSSSSSDEFFSPPTSPIPVRRQGRGRPPTSLGSRGPLTSNRAPAAGGDVRRMKWTHSINENVMRAYFRATELGTNLTAYRVRLVSLFQELEPAVNVSAQRLSDQVRAIQRCHLLDDAALERIRSDIRNSLTVPSSSHVLNVVTNSTPQVPQNDDISELVDSEIISVSTQYNDRIRSTLEDAIREYRYVNLNNRPRLSRLPIHKRNLALVSALDSLLPKYFSNSEDLSDTHSILYCAAIAVCRVAGVKFAEYTTTTRQENTLPAWQYRIERRIAEARTLIGKLMSFRSGNTRPRVMRFVKRAFLGTTISPQEYISCVTERIDFLKQKVYAWANRIRRYRKRVDRYNQNRMFQRNEKWVYRKWENLSPCMSDGQVPDENATNSFWRNMWSVPVTHTEGDWYRDVERSCESLLPMEPISIDEEDVSCAVRSLPNWKAPGPDGLHNFWLKWFRSSHACLASQFQTALDSGSLPQFLTTGITHLLYKSGDAMDPKNFRPITCLPTLYKLLTSILRLKITTHINHNSILSISQNGCRSGTRGTKELLIIDMTISQQVRRNRKSLATCWIDYKKAFDSVPHTWLLKVLELYKIDTTLCTFLEVCMGQWRTALRYPGCRQSAMNDVLIKIERGIFQGDSLSPLWFCLALNPLSTLLEGSGLGYRLQKDDRVISHLFYMDDLKLLAPTKLQLTALLKVTENFSNSIKMEFGVDKCAVMYVKKGEIVESEGIELSDSTKLRSLSATETYKYLGFSQSLGMPESDMKQTLRERFFSRLKKVLKSLLSGGNKVRACNGWVMPVLMYSFGVLRWTQTELDAIDRRVRTLLTAFRMHHSRSSVMRLYIPRRLGGRGLLNIKTLHNREVYNLREYFLQTDVGVHRSVVTVDTGLTPLALAKENWRKPVVLSTNDRREVWKGKELHGRFYRALHGPDIDFKTSTSWLRYGDLFGETEGFVCAIMDEVIMTNNYRRYILRDGTVDICRACHRPGESIRHIISGCSRLANGEYLHRHNQVARIVHQQLALKYHLVNSEVPYYRYVPDPVLENGRATLYWDRSIITDRTIVANKPDIVVIDRLERRAIIRRYRRSS

SEQ ID NO: 27460 - protein, 939 aa, Spilosoma lubricipeda
MTPTGPMETVRTYIRIIIIIIIMMINVEQITTRPKNTVPAWQYRIERRIAETRTLIGKLIAFKFGNTRPRVMRFVKQAFLGTTISPQQYMSSVTERIDFLKQKVYAWANRIRRYKKRGDRFNQNRMFQRNEKWVYRKWEAPNPCESDGDLPDENTTNSFWRNIWSVPVTHTDGDWMRDVSRSCESITSMEPVIINEDDISCAVRSLANWKSPGPDGLHNFWLKWFRSSHACLASQLQAALDSGSLPQFLTTGITHLLYKSGSGMDPKNFRPITCLPTLYKLLTSILRLKITKHINNNSIISVSQNGCRSGTRGTKELLITDMTISQQVRRNRKSLATCWIDYKKAFDSVPHTWLLKVLELYKIDTTLCTFLESCMRQWRTVLRYPGCRQTAVNDVPIKIERGIFQGDSLSPLWFCLALNPLSTLLEDSGLGYRLQKEAPVISHLFYMDDLKLFAPTKLQLTALLRVTENFSNSIKMEFGIDKCAVMHVKKGVIVESEGIELSDSTRLRSLSATETYKYLGFSQSLGIPESDMKQSLRERFFGRLKKVLKSLLSGGNKVRAYNGWVMPVLMYSFGILRWTQTELDALDRRVRTLLTAFRMHHSRSSVMRLYIPRKFGGRGLLNVKTLHNREIYNLREYFLHTDVGVHRSVVAVDTGLTPLALAKENWRKPVVLGTNERREVWKGKELHGRFYRALNGSDIDFKASTSWLRYGDLFGETEGFVCAIMDEVIMTNNYRKYILKDGTVDICRACHRPGESIRHIISGCSRLANGEYLHRHNQVARIVHQQLALKYKLVNSEVPYYRYVPDPVLENGRATLYWDRSIITDRTIVANKPDIVVIDRSERRAMIVDIAVPHDENLVKVEKEKQIKYLDLSHEIVDMWDVDSVIIVPIVVSVHGLIAKSLDQHLKRLTLDGWIKGLMQKAVLLDTARIVRRFLYLEP

SEQ ID NO: 27461 - protein, 959 aa, Spilarctia lutea
MIYVYTIILIIIILIIIVSALDSLLPKYFSNSEDLSDTHSILYCAAIAVCRVAGVKFAEYTTTTRQENTLPAWQCRIERRIAEARTLIGKLMSFRSGNTRPRVMRFVKRAFLGTTISPQEYMSCVTERIDFLKQKNYAWANRIRRYRKRVDRYNQNRMFQRNEKWVYRKWENLSPCMSDGQVPDENATNSFWYSIWSVPVTHTEGDWYRDVERSCESLLPMEPISIDEEDVSCAIRSLPNWKAPGPDGLHNFWLKWFRSSHACLASQFQTALDSGSLPQFLTTGITHLLYKSGDAMDPKNFRPITCLPTLYKLLTSILRLKITTHINHNSILSISQNGCRSGTRGTKKLLIIDMTISQQVRRNRKSLATCWIDYKKAFDSVPHTWLLKVLELYKIDATLCTFLKVCMGQWRTALRYPGCRQSAMNDVLIKIERGIFQGDSLSPLWFCLALNPLSTLLEGSGLGYRLQKDDRVISHLLYMDDLKLLAPTKLQLTALLKVTENFSNSIKMGFGVDKCAVMYVKKGEIVESEGIELSDSTKLRSLSATETYKYLGFSQSLGIPESDMKQTLRERFFSRLKKVLKSLLSGGNKVRACNGWVMPVLMYSFGVLRWTQTELDDIDRRVRTLLTAFRMHHPRSSVMRLYIPRRLGGRGLLNIKTLHNREVYNLREYFLQTDVGVHRSVVTVDTGLTPLALAKENWRKPVVLSTNDRREVWKGKVLHGRYYRALNGPDIDFKASTSWLRYSDLFGETEGFVCAIMDEVIMTNNYRRYILKDGTVDICRACHRPGESIRHIISGCSRLANGEYLHRHNQVARIVHQQLALKYNLVISEVPYYRYVPDPVLENGRATLYWDRSIITDRNIVANKPDIVDIAVPHDENLVKVEKEKQIKYLDLSHEIVDMWNVDSVIIVPIVVSAHGLIAKSLDQHLKRLTLGGWIKGLIQKAVLLDTARIVRRFLSLEP

SEQ ID NO: 27462 - protein, 1195 aa, Spilosoma lubricipeda
MLTRARARALLPSSDSSLRSALPSSDARTEVPTVAEASSSSSSDEFFSPPTSPTPVRQQGRERPPTSLGSRGPLTSNRAPAAGGDVRRMKWTQSINENVMRAYFRATELGTNLTAYRVRLVSLFQELEPAVNVSAQRLSDQVRAIQRCHLLDDTVLERICSDIRNSLTVPSSPHVVDVVTNSTPQNEDVSELVDSEIISVSTLYSDKIRSTLEDVIREYRCVNFNNRPRLPRLPIHKRNLALVSALDSLLPDYFGNSEDLSDTHSILYCAAIAVCRVAGIKFTENITTTRPENTVPAWQCRIERRIAGARTLIGKLISFRSVNTRPKVMRFVKQAFLGTTISPQQYMSCVTERIDFLKQKVYAWANRIRRYRKRIDRYNQNRMFQRNEKWVYRKWENLSPCMSDGQVPDENATNSFWRSIWSVPVAHTEGDWYRDVERSCESLLPMELINIDKEDVSCAVRSLPNWKAPGPDGLHNFWLKWFRSSHACLASQFQTALDSGSLPQFLTTGITHLLYKSGSAMDPKNFRPITCLPTLYKLLTSILRLKITTHINQNSILSVSQNGCRSGTRGTKELLIIDMTISQQVRRNRKNLAICWIDYKKAYDSVPHTWLLKVLELYKIDTTLCTFLKSCMGHLTVLRYPGCRQTAVNDVPIKIERGIFQGDSLSPLWFCLALNPLSTLLESSGLGYRLQKDAALISHLFYMDDLKLFAPTKLQLTALLRVTENFSNSIKMEFCVDKCAVMHVKKGVIVESEGIELSDSTKLRFLSATETYKYLGFSQSLGIPEPDMKQSLRERFFGRLKKVLKSLLSGGNKVRAYNGWVMPVLMYSFGILRWTQTELDAIDRRVRTLLTAFRMHHPRSSVMRLYIPRKLGGRGLLNAKTLHNREIYNLREYFLHTDVGVHRSVVTVDTGLTPLALAKENWRKPVVLSTNDRREVWKGKELHGRFYRALNGPDIDFKASTSWLRYGDLFGETEGFVCAIMDEVIMTNNYRKYILKDGTVDICRACHRPGESIRHIISGCSRLANGEYLHRHNQVARIVHQQLALKYHLVSSEVPYYRYVPDPVLENGRATLYWDRSIITDRTIVANKPDIVVIDRLERRAMIVDIAVPHDENLVKVEKEKQIKYLDLSHEIVDMWNVDSAIIVPIVVSAHGLTAKSLDQHLKRLTLEGWIKGLMQKAVLLDTARIVRRFLSLEP

SEQ ID NO: 27463 - protein, 826 aa, Phalera bucephala
MHRRSISLVSALDSVLKPHWETSVDLCDTHSILYCGAVAVCRVAGVRFPNLHRATQPTNAKPFWQCRIERRINMARTLIAKLLCFQAGNNRPRVMRFVAQAFAGTGVAPVDYVAGVAERIDYWKQKVYAWAKRIRRYKARADRYHVNRTFQTNQRSVYQAWERPQERVTDVHLPNAAVMAEFWRKIWSVPVSHSEGEWFDVVGRSCGPIQEMEPVVISREDLACAVRAAPNWKSPGPNGLHAFWLKRLQGSHSRLATQFQEALQLGSLPSFMTSGDTHLIHKSGSILEPKNYRPITCLPTVYKLLTSILRIKINNHLKAQHILSPTQNGCKGGSRGTKDLLLIDMAICQQVRRSRKNVSMAWIDYKKAYDSVPHTWLGRVLELYRVHPALCSFLGSCMRQWTTVLRHPGCGGLSGSSDLIKISRGIFQGDSLSPLWFCLALNPLSAYLILKDSKLGYHLRRESEPISHLLYMDDLKLYASKKTDLMELLKITGNFSNDIGMEFGVDKCAVIHVQRGRVEDSFNLQLSEDISLRSLSEMDSYKYLGMSQALSIAEQDMKQSLKDRFFARLIKVLKSLLSGGNKVRAFNGWVMPVLTYSFGILRWTQSELDALDRKVRRLLTAYRMHHPRSSVMRLYIPRKCGGRGFLNAKTLHNREVCNLRQYFLSVSVVMYRDVAAIDRGLTPVSLANENWRRPQVLSISDRTAIWKGKELHGRFYRALTGPDVDQLASVNWLRFSNLFGETEGFVFAIMDEVIMTNNYRRHILKDGTVDICRACHRPGESIRHVVSGCSRLANGEYLHRHNQVARIIHQQLALKYGLVDSEVPYY

SEQ ID NO: 27464 - protein, 1065 aa, Clostera curtula
MSDSAPRRNPSRRCRLRAAYGTNCARPTSSSSSSPTSGNEYHTPPVTAASSDDAGSPVPPAAQSSARRGRPLPASLRSTEHTATSMASATGGSVRRMRWSQELNEKVMRAYYGATEGGTNLTAYRSRMFALFQDLNPGTTVTVQRLSDQVRAIQRLQLLAQPVLDRLRLETLSSRPVVRPQPDPAVSAIAVQPDPPLVAPAELVQNEEVNVNNQYDEQLRRALDDAILVYRDVPASDRPRLPRLPMNKHILALTSVLNTFLQSHFDKSENLTETHSILYCGAVAVCRVGGVRFPNQNRPTTQMETIPAWQHRIELRINTARTIIAKLYTYKNGNSRPRVMRFVHQAFNGTGVRPQDYSAWITERIDFYKQKVLAWAKRIRRFKERSDRYKQNRLFQSDAKKVYRNWEQNSRQISLGVTPDPVRMYTFWQDIWAQPINHTEGEWMTIVRRSCEHITAMEQVIISQADIARALRLAPNWKSPGPDGLHNFWLKRFHSSHERLATQFHNAISSKTLPTFLTNGVTYLLYKSGSTSEPKNYRPITCLPTTYKLLTSILKFKIMDHILANNIMATAQNGCKPRSRGTKELLLIDMTICQQVRRVKKNISMAWIDYKKAYDSVPHSWLSRVLDLYRLHPNLCSFLSVCMSQWTTRLCLPDMAGFSDSTGLLRIKRGIFQGDSLSPLWFCLAMNPLSTLLMDSKIGYLLRRDGEVISHLLYMDDLKLYAPKKSDLVSLLKITENFSNDIKMEFGVDKCAAIHVQRGRVVTSEELQLSENMSFRCLSESETYRYLGMAEGLGIADKEIKQALTTCFFSRLTKVLKSLLCGGNKVRAVNGWVMPALAYSFGILRWTQTELDALDRRVRRQLTLYRMHHPRSSVMRLYIPRKCGGRGFLNVKNLHNREVCNLRDYFLQSTEDVHRDMANVDNSFTPLSLAKQNWRKPQVLSISDRTTIWKSKELHGRFYKALTGPDVDQLASVAWLRFSNLFGETEGFACAIMDEVIMTNNYRRHILKDGTADICRACHRPGESIRHIVSGCSRLANGEYLHRHNQVAKIVHQQLALKYSLVDTY

SEQ ID NO: 27465 - protein, 905 aa, Clostera curtula
METIPAWQHRIELRINTARTIIAKLYAYKNGNSRPRVMRFVHQAFNGTGVRPQDYNAWITERIDFYKQKVQAWAKRIRRFKERSNRYKQNRLFQSDAKKVYRNWEQNSRQISLGVTPDPVRMYTFWQDIWAQPINHTEGDWMTIVRRSCEHITAMEQVIISQADIARAVRLAPNWKSPGPDGLHNFWLKRFHSSHERLATQFQNAISSKTLPTFLTNGVTYLLYKSGSTSEPKNYRPITCLPTNYKLLTSILKFKIMDHILANNIMATAQNGCKPRSRGTKELLLIDMTICQQVRRVKKNMSMAWIGYKKRYDSVPHSWLSRVLDLYRLHPNLCSFLSVCMSQWTTRLCLPDMAGFSDSTGLLRIKRGIFQGDSLSPLWFCLAMNPLSTLLMDSKIGYRLRRDGEVISHLLYMDDLKLYAPKKSDLVSLLKITEKFSNDIKMEFGVDKCAAIHVQRGRVVTSEELQLSENMSFRFLSESETYRYLGMAEGLGIADKEIKQALTTCFFSRLTKVLKSLLSGGNKVRAVNGWVMPALAYSFGILRWTQTELDALDRRVRRQLTLYRMHHPRSSVMRLYIPRKCGGRGFLNVKTLHNREVCNLREYFLQSTEDVHRDMANVDNSFTPLSLAKQNWRKPQVLSISDRTTIWKSKELHGRFYKALTGPDVDQLASVAWLRFSNLFGETEGFACAIMDEVIMTNNYRRHILKDGTADICRACHRPGESIRHIVSGCSRLANGEYLHRHNQVAKIVHQQLALKYSLVDTEVPYYQYQPAPVLDNGHVTLYWDRSIITDRTILANKPDIVIIDRLASRAMLVDVTIPHDENLVKAEKEKLTKYLDLAHEVTAMWHVDSTIIVPIVVSVNGLIAKSFDQHLKKLSLGCWIKGLIQKAVILESARIVRRFLSLEP

SEQ ID NO: 27466 - protein, 1011 aa, Dendrolimus punctatus
MRWSQQMNESVMRAYFKATNIGTNLTAYRDRMLSLFQVLHPDTTVTAQRLSDQVRAIQRLHLLDEPVLDRLRTEVRTSLRISETSQSPVPQNNNIITNTMIELTSTAAVTPEADLGNPTADYVSSQDNEHMRRNLETAINDFKDMPTLSRPRLPRLPIHRRSLAIMGHMNSLLASHLMQSKDLIETHSILYCGAVAVCRTVGVNFADNPQPTRDACQKPAWQYRIERRINTARTLIAKLLCFRSGNTRPKVMRFVTQAFVGTNIGPNDYKERVMERIDFLKQKIYAWANRIRRYKKRTKRFYLNRRFQRDQKGVYRGWEQPEEQVADRQLPNADAIAAFWRGIWSVPVNHTEGDWMGVVEQRCELIPEMDSITIEPYDVGYAIRSAHNWKSPGPDGLHNFWIKWFKVSHPCLATQFQDALNSGNVPTFMTTGVTHLLFKSGSTTEPKNYRPITCLPTIYKLLTSILRSKLIKHLVDNTLLAKTQNGCRPGTRGTKEFLLIDMTINQQVRRNRKNLCTAWVDYKKAYDSVPHTWLGRVLELYKIDVTLRTFLGVCMGQWVTRLCMPGGGSLPISDGLIKIERGIFQGDSLSPLWFCLALNPLSSLLEDSKLGFHLRRGGEAISHLLYMDDLKLFASKKHDLLELLNLTETFSSSIGMEFGVDKCAVMYVQRGRVVNSNGLQLSEGVCFKTLSEDETYKYLGISQSLGIVDENVKQLIKERFFSRLRKVLNCLLSGGNKIRAFNSWVMPSLTYSFGILKWTQTELDALDRRIRYMLTTYRMHHPRSSVMRLYIPRKCGGRGLLNAKDLHNREVYNLREYFLKTNESIHRDMLSVDKGLTPLSLAKQNWLRLPVSSTSERMDVWKSKELHGRFHRALYGPDIDLPSSVNWLRFGDLFGETEGFACAIMDEVIKTKNYRKYIMKDGTLDICRACHHPGESIRHIISCCSRLANSEYLHRHNLVARIIHQQLALQYDLIATEVPYYKYTPEPVLEKGSYHALLGSIYYHRQDYCCQ

SEQ ID NO: 27467 - protein, 937 aa, Dendrolimus punctatus
MRWSQQMNESVMRAYFKATNIGTNLTAYRDRMLSLFQVLLYRIERRINTARTLIAKLLCFRSGNTRPKVMRFVTQAFVGTNIGPNDYEERVMERIDFLKQKIYAWANRIRRYKKRTKRFYLNRRFQRDQKGVYRGWEQPEEQVADRQLPNADAIVAFWRGIWSVPVNHTEGDWMGVVEQRCELIPEMDSITIEPYDVGYAIRSAHNWKSPGPDGLHNFWIKWFKVSHPCLATQFQGALNSGNVPTFMTTGVTHLLFKSGSTTEPKNYRPITCLPTIYKLLTSILRSKLIKHLVDNTLLAKTQNGCRPGTRGTKELLLIDMTINQQVRRNRKNLCTAWVDYKKAYDSVPHTWLGRVLELYKIDVTLRTFLGVCMGQWVTRLCMPGGGSLPISDGLIKIERGIFQGDSLSPLWFCLALNPLSSLLEDSKLGFHLRRGGEAISHLLYMDDLKLFASKKHDLLELLNLTETFSSSIGMEFGVDKCAVMYVQRGRVVNSNGLQLSEGVCFKTLSEDETYKYLGISQSLGIVDENVKQLIKERFFSRLRKVLNCLLSGGNKIRAFNGWVMPSLTYSFGILKWTQTELDALDRRIRYMLTTYRMHHPRSSVMRLYIPRKCGGRGLLNAKDLHNREVYNLREYFLKTNKSIHRDMLSVDKGLTPLSLAKQNWLRLPVSSTSERMDVWKSKELHGRFHRALYGPDIDLPASVNWLRFGDLFGETEGFACAIMDEVIKTKNYRKYIMKDGTLDICRACHHPGESIRHIISCCSRLANSEYLHRHNLVARIIHQQLALQYDLIATEVPYYKYTPEPVLEKGHITLYWDRSIITDRTIVANKPDIVIIDRSARRTMLVDISIPHDCNLIKAETDKLTKYLDLAHEIAAMWHMESTIIVPIVVSVNGLIAKSLDRHLERLSLGKWVKGQIQKAVILSTTRIVRKFLSLEP

SEQ ID NO: 27468 - protein, 1112 aa, Dendrolimus punctatus
MRWTQQMNENVMRAYYEATDIGINLTAYRDRMLSLFQILQPDTNVTAQRLSDQVRAIQRRHLLDESTLDRLRTEIRTTRRISETPSSPQHPNITPRVTALSPMEINDTTVGNVSSQDNELMRRALEEAIQDYKEIPILSRPRLPRLPTYKRNLLLMGVLDSLLAPYFKASKDLTETHSILYCGAVAVCRVSGTKFPNLEQRSRRSNGQPAWQKRIECRIGKARTLIAKLLCFRTGNTRPKVMRFVNRAFTGTDINPSDYLSRVTERIDFYKQKICAWANRLRRYKKRADRYNLNRFFQRDQKRVYRGWEQPCVSVDDSHRPDIDSMTAFWSNIWSVPVTHQEGDWTRMAEQACEMIPEMEPLALEPVDIGCAIRVAQNWKSPGPDGLHNFWIKWFKSSHACLAVQFQEAINMGSLPSFMTTGVTHLLHKSGSTTEAKNYRPITCLPTIYKLLTSVLRSKLMKHLTNNNILANTQNGCKDGSRGTKELLLIDMTISHQVRRNRKNLSVAWIDYKKAYDSVPHTWLEKVLELYKVNATLRAFLSSCMGQWTTVLRHPGDRGNLSALHDPIRIKRGIFQGDSLSPLWFCLALNPLSTLLRESKLGFQLRRGGEIISHLMYMDDVKLFASKKPDLLQLLKITESFSNSISMEFGVDKCAVMHVQRGRVVNSENLQLSENISLKTLSEGETYKYLGISESLGIPDADVKQAMKDRFFSRLRKVLTSLLSGGNKVRAFNAWVMPALAYSFGILRWTQTELDALDRRVRCLLTTHRMHHPRSSVMRLYIPRKCGGRGFLNTKDLHNREVYNLREYFLKVGETAGMHHDMVSVDKGFTPLSLAKQNWQKPLVMSASDRMDVWKSKELHGRFYQALTGPDVDLPASVNWLRFGDLFGETEGFVCAIMDEVIKTNNYRRYILKDGTLDICRACHHPGESLRHVTSGCSRLANSEYLHRHNLVARIIHQQLALKYGLVSLEVPYYQYKPEPVLDNGQYLLYWDRSIITDRTIVANKPDIVIVDRSARRAIIVDVAIPHDGNLVKAEKEKQIKYIDLAHEVTAMWNMDSTIIVPIVVSVNGLIAKSLDRHLERLSLGTWVKGRMQKAALLDTTRIVRRFLSLEP

SEQ ID NO: 27469 - protein, 871 aa, Dendrolimus kikuchii
MRFVNRAFTGTDSNPSDYLARVTERIDFYKQKISAWANRLRRYKKRADRYNLNRLFQRDQKRVYRGWERPCVSVDDGHWPDIDSMTAFWSNIWSVPVTHREGDWTRMVEQACETIPEMEPLALEPVDISCAIRMAQNWKSPGPDGLHNFWIKWFKSSHACLAVQFQEAINIGSLPSFMTTGVTHLLHKSGSTTEAKNYRPITCLPTIYKLLTSVLRSKLIEHLTNNNILANTQNGCKNGSRGTKELLLIDMTISHQVRRNRKNLSVAWIDYKKAYDSVPHTWLEKVLELYKVNATLRAFLSSCMEQWTTVLRHPGDRGNLSVLHDPIRIKRGIFQGDSLSPLWFCLALNPLSTLLRESKLGFQLRRGGEIISHLMYMDDVKLFASKKPDLLQLLKITESFSNSISMEFGVDKCAVMHVQRGRVVNSENLQLSENISLKTLSEGETYKYLGMSESLGIPDADVKQAMKDRFFSRLRKVLTSLLSGGNKVRAFNAWVMPALAYSFGILRWTQTELDALDRRVRCLLTTHRMHHPRSSVMRLYIPRKCGGRGFLNTKDLHNREVYNLREYFLKVGETAGMHHDVVSVDKGFTPLSLAKQNWQRPLVMSASDRMDVWKSKELHGRFYQALTGPDVDLPASVNWLRFGDLFGETEGFVCAIMDEVIKTNNYRKYILKDGTLDICRACHRPGESLRHVTSGCSRLANSEYLHRHNLVARIIHQQLALKYGLVLSEVPYYQYKPEPVLDNGQYLLYWDRSIITDRTIVANKPDIVIVDRSARRAIIVDVAIPHDGNLVNAEKDKQIKYIDLAHEVTAMWNLDSTIIVPIVVSVNGLIAKSLDRHLERLSLGIWLKGRMQKAALLDTARIVRRFLCLEP

SEQ ID NO: 27470 - protein, 992 aa, Dendrolimus kikuchii
MRRALEEAIEDYKMMPILSRPRLPRLPTHKHNLLIMGVLDSLLAPYFRASKDLAETHSILYCGAVAVCRVSGTKFPNLEQSPRRSDGQPAWQKRIECRIGKARTLIAKLLSFRAGNTRPKVMRFVNRAFTGTDSNPSDYLARVTERIDFYKQKISAWANRLRRYKKRADRYNLNRLFQRDQKRVYRGWERPCVSVDDGHWPDIDSMTAFWSNIWSVPVTHREGDWTRMVEQACETIPEMEPLALEPVDISCAIRMAQNWKSPGPDGLHNFWIKWFKSSHACLAVQFQEAINIGSLPSFMTTGVTHLLHKSGSTTEAKNYRPITCLPTIYKLLTSVLRSKLIEHLTNNNILANTQNGCKNGSRGTKELLLIDMTISHQVRRNRKNLSVAWIDYKKAYDSVPHTWLEKVLELYKVNATLRAFLSSCMEQWTTVLRHPGDRGNLSVLHDPIRIKRGIFQGDSLSPLWFCLALNPLSTLLRESKLGFQLRRGGEIISHLMYMDDVKLFASKKPDLLQLLKITESFSNSISMEFGVDKCAVMHVQRGRVVNSENLQLSENISLKTLSEGETYKYLGMSESLGIPDADVKQAMKDRFFSRLRKVLTSLLSGGNKVRAFNAWVMPALAYSFGILRWTQTELDALDRRVRCLLTTHRMHHPRSSVMRLYIPRKCGGRGFLNTKDLHNREVYNLREYFLKVGETAGMHHDVVSVDKGFTPLSLAKQNWQRPLVMSASDRMDVWKSKELHGRFYQALTGPDVDLPASVNWLRFGDLFGETEGFVCAIMDEVIKTNNYRKYILKDGTLDICRACHRPGESLRHVTSGCSRLANSEYLHRHNLVARIIHQQLALKYGLVLSEVPYYQYKPEPVLDNGQYLLYWDRSIITDRTIVANKPDIVIVDRSARRAIIVDVAIPHDGNLVNAEKDKQIKYIDLAHEVTAMWNLDSTIIVPIVVSVNGLIAKSLDRHLERLSLGIWLKGRMQKAALLDTARIVRRFLCLEP

SEQ ID NO: 27471 - protein, 1112 aa, Dendrolimus punctatus
MRWSQQMNESVMRAYFKATNIGINLSAYRDRMLSLFQILQPDTNVTAQRLSDQVRAIQRRHLLDESTLDRLRTEIRTTRRISETPSSPQHPNITSRVTALLPMETDDTTVGSVSSQDNELMRRALEEAIEDYKEMPILSRPHLPRLPTHKRNLLLMGVLDSLLAPYFKASKDLTETHSILYCGAVAVCRVSGTKFPNLEQRSRRSNGQPAWQKRIECRIGKARTLIAKLLCFRAGNTRPKVMRFVNRAFTGTDINPSDYLSRVTERIDFYKQKICAWANRLRRYKKRADRYNLNRFFQRDQKRVYRGWEQPCVSVDDSHRPDIDSMTAFWSNIWSVPVTHQEGDWTRMAEQACEMIPEMEPLALEPVDIGCAIRVAQNWKSPGPDGLHNFWIKWFKSSHACLAVQFQEAINMGSLPSFMTTGVTHLLHKSGSTTEAKNYRPITCLPTIYKLLTSVLRSKLMKHLTNNNILANTQNGCKDGSRGTKELLLIDMTISHQVRRNRKNLSVAWIDYKKAYDSVPHTWLEKVLELYKVNATLRAFLSSCMRQWTTVLRHPGDRGNLSALHDPIRIKRGIFQGDSLSPLWFCLALNPLSTLLRESKLGFQLRRGDEIISHLMYMDDVKLFASKKPDLLQLLKITESFSNSISMEFGVDKCAVMHVQRGRVVNSENLQLSENISLKTLSEGETYKYLGISESLGIPDADVKQAMKDRFFSRLRKVLTSLLSGGNKVRAFNAWVMPALAYSFGILRWTQTELDALDRRVRCLLTTHRMHHPRSSVMRLYIPRKCGGRGFLNTKDLHNREVYNLREYFLKVGETAGMHHDMVSVDKGFTPLSLAKQNWQKPLVMSASDRMDVWKSKELHGRFYQALTGPDVDLPASVNWLRFGDLFGETEGFVCAIMDEVIKTNNYRRYILKDGTLDICRACHHPGESLRHVTSGCSRLANSEYLHRHNLVARIIHQQLALKYGLVSLEVPYYQYKPEPVLDNGQYLLYWDRSIITDRTIVANKPDIVIVDRSARRAIIVDVAIPHDGNLVKAEKEKQIKYIDLAHEVTAMWNLDSTIIVPIVVSVNGLIAKSLDRHLERLSLGTWVKGRMQKAALLDTTRIVRRFLSLEP

SEQ ID NO: 27472 - protein, 1198 aa, Dendrolimus kikuchii
MRSRRHAHPPPAGPATPVSTPRSSSTEEDFFTPAATAASSTSEEGPAPSAPRRRSARGRGRPPSARLGPAGRIPRPAPATGGAVRRMRWTQQMNENVMRAYYEATDAGIHLTAYRDRMLSLFQILQPDTNVTAQRLSDQVRAIQRRHLLDEPTLDRLRTEIRTTCRIIETPCSPQHPNITSRVTAMPPVEVDDTTVGNVSSQDNELMRRALEEAIEDYKMMPILSRPRLPRLPTHKHNLLIMGVLDSLLAPYFRASKDLAETHSILYCGAVAVCRVSGTKFPNLEQSPRRSDGQPAWQKRIECRIGKARTLIAKLLSFRAGNTRPKVMRFVNRAFTGTDSNPSDYLARVTERIDFYKQKISAWANRLRRYKKRADRYNLNRLFQRDQKRVYRGWERPCVSVDDGHWPDIDSMTAFWSNIWSVPVTHREGDWTRMVEQACETIPEMEPLALEPVDISCAIRMAQNWKSPGPDGLHNFWIKWFKSSHACLAVQFQEAINIGSLPSFMTTGVTHLLHKSGSTTEAKNYRPITCLPTIYKLLTSVLRSKLIEHLTNNNILANTQNGCKNGSRGTKELLLIDMTISHQVRRNRKNLSVAWIDYKKAYDSVPHTWLEKVLELYKVNATLRAFLSSCMEQWTTVLRHPGDRGNLSVLHDPIRIKRGIFQGDSLSPLWFCLALNPLSTLLRESKLGFQLRRGGEIISHLMYMDDVKLFASKKPDLLQLLKITESFSNSISMEFGVDKCAVMHVQRGRVVNSENLQLSENISLKTLSEGETYKYLGMSESLGIPDADVKQAMKDRFFSRLRKVLTSLLSGGNKVRAFNAWVMPALAYSFGILRWTQTELDALDRRVRCLLTTHRMHHPRSSVMRLYIPRKCGGRGFLNTKDLHNREVYNLREYFLKVGETAGMHHDVVSVDKGFTPLSLAKQNWQRPLVMSASDRMDVWKSKELHGRFYQALTGPDVDLPASVNWLRFGDLFGETEGFVCAIMDEVIKTNNYRKYILKDGTLDICRACHRPGESLRHVTSGCSRLANSEYLHRHNLVARIIHQQLALKYGLVLSEVPYYQYKPEPVLDNGQYLLYWDRSIITDRTIVANKPDIVIVDRSARRAIIVDVAIPHDGNLVNAEKDKQIKYIDLAHEVTAMWNLDSTIIVPIVVSVNGLIAKSLDRHLERLSLGIWLKGRMQKAALLDTARIVRRFLCLEP

SEQ ID NO: 27473 - protein, 957 aa, Dendrolimus kikuchii
MGVLDSLLVPYFRASKDLAETHSILYCGAVAVCRVSGTKFPNLEQSPRRSDGQPAWQKRIECRIGKARTLIAKLLSFRAGNTRPKVMRFVNRAFTGTDSNPSDYLARVTERIDFYKQKISAWANRLRRYKKRADRYNLNRLFQRDQKRVYRGWERPCVSVDDGHWPDIDSMTAFWSNIWSVPVTHREGDWTRMVEQACETIPEMEPLALEPVDISCAIRMAQNWKSPGPDGLHNFWIKWFKSSHACLAVQFQEAINIGSLPSFMTTGVTHLLHKSGSTTEAKNYRPITCLPTIYKLLTSVLRSKLIEHLTNNNILANTQNGCKNGSRGTKELLLIDMTISHQVRRNRKNLSVAWIDYKKAYDSVPHTWLEKVLELYKVNATLRAFLSSCMEQWTTVLRHPGDRGNLSVLHDPIRIKRGIFQGDSLSPLWFCLALNPLSTLLRESKLGFQLRRGGEIISHLMYMDDVKLFASKKPDLLQLLKITESFSNSISMEFGVDKCAVMHVQRGRVVNSENLQLSENISLKTLSEGETYKYLGMSESLGIPDADVKQAMKDRFFSRLRKVLTSLLSGGNKVRAFNAWVMPALAYSFGILRWTQTELDALDRRVRCLLTTHRMHHPRSSVMRLYIPRKCGGRGFLNTKDLHNREVYNLREYFLKVGETAGMHHDVVSVDKGFTPLSLAKQNWQRPLVMSASDRMDVWKSKELHGRFYQALTGPDVDLPASVNWLRFGDLFGETEGFVCAIMDEVIKTNNYRKYILKDGTLDICRACHRPGESLRHVTSGCSRLANSEYLHRHNLVARIIHQQLALKYGLVLSEVPYYQYKPEPVLDNGQYLLYWDRSIITDRTIVANKPDIVIVDRSARRAIIVDVAIPHDGNLVNAEKDKQIKYIDLAHEVTAMWNLDSTIIVPIVVSVNGLIAKSLDRHLERLSLGIWLKGRMQKAALLDTARIVRRFLCLEP

SEQ ID NO: 27474 - protein, 1204 aa, Dendrolimus punctatus
MQTENIAARRGCARLPPAAPTSPSSTSRSSSPDEDFVTPTATGASSNNEEGPAPSAPPRRPARGRGRPPSARLGPAGRIPHSAPATGGAVRRMRWSQQMNESVMRAYFKATNIGINLTAYRDRMLSLFQILQPDTNVTAQRLSDQVRAIQRRHLLDESTLDRLRTEIRTTRRISETPSSPQHPNITSRVTALLPMETDDTTVGSVSSQDNELMRRALEEAIEDYKEMPILSRPHLPRLPTHKRNLLLMGVLDSLLAPYFKASKDLTETHSILYCGAVAVCRVSGTKFPNLEQRSRRSNGQPAWQKRIECRIGKARTLIAKLLCFRAGNTRPKVMRFVNRAFTGTDINPSDYLSRVTERIDFYKQKICAWANRLRRYKKRADRYNLNRFFQRDQKRVYRGWEQPCVSVDDSHRPDIDSMTAFWSNIWSVPVTHQEGDWTRMAEQACEMIPEMEPLALEPVDIGCAIRVAQNWKSPGPDGLHNFWIKWFKSSHACLAVQFQEAINMGSLPSFMTTGVTHLLHKSGSTTEAKNYRPITCLPTIYKLLTSVLRSKLMKHLTNNNILANTQNGCKDGSRGTKELLLIDMTISHQVRRNRKNLSVAWIDYKKAYDSVPHTWLEKVLELYKVNATLRAFLSSCMRQWTTVLRHPGDRGNLSALHDPIRIKRGIFQGDSLSPLWFCLALNPLSTLLRESKLGFQLRRGGEIISHLMYMDDVKLFASKKPDLLQLLKITESFSNSISMEFGVDKCAVMHVQRGRVVNSENLQLSENISLKTLSEGETYKYLGISESLGIPDADVKQAMKDRFFSRLRKVLTSLLSGGNKVRAFNAWVMPALAYSFGILRWTQTELDALDRRVRCLLTTHRMHHPRSSVMRLYIPRKCGGRGFLNTKDLHNREVYNLREYFLKVGETAGIHHDMVSVDKGFTPLSLAKQNWQKPLVMSASDRMDVWKSKELHGRFYQALTGPDVDLPASVNWLRFGDLFGETEGFVCAIMDEVIKTNNYRRYILKDGTLDICRACHHPGESLRHVTSGCSRLANSEYLHRHNLVARIIHQQLALKYGLVSLEVPYYQYKPEPVLDNGQYLLYWDRSIITDRTIVANKPDIVIVDRSARRAIIVDVAIPHDGNLVKAEKEKQIKYIDLAHEVTAMWNLDSTIIVPIVVSVNGLIAKSLDRHLERLSLGTWVKGRMQKAALLDTTRIVRRFLSLEP

SEQ ID NO: 27475 - protein, 1112 aa, Dendrolimus kikuchii
MRWTQQMNENVMRAYYEATDAGIHLTAYRDRMLSLFQILQPDTNVTAQRLSDQVRAIQRRHLLDEPTLDRLRTEIRTTCRIIETPCSPQHPNITSRVTAMPPVEVDDTTVGNVSSQDNELMRRALEEAIEDYKMMPILSRPRLPRLPTHKHNLLIMGVLDSLLAPYFRASKDLAETHSILYCGAVAVCRVSGTKFPNLEQSPRRSDGQPAWQKRIECRIGKARTLIAKLLSFRAGNTRPKVMRFVNRAFTGTDSNPSDYLARVTERIDFYKQKISAWANRLRRYKKRADRYNLNRLFQRDQKRVYRGWERPCVSVDDGHWPDIDSMTAFWSNIWSVPVTHREGDWTRMVEQACETIPEMEPLALEPVDISCAIRMAQNWKSPGPDGLHNFWIKWFKSSHACLAVQFQEAINIGSLPSFMTTGVTHLLHKSGSTTEAKNYRPITCLPTIYKLLTSVLRSKLIEHLTNNNILANTQNGCKNGSRGTKELLLIDMTISHQVRRNRKNLSVAWIDYKKAYDSVPHTWLEKVLELYKVNATLRAFLSSCMEQWTTVLRHPGDRGNLSVLHDPIRIKRGIFQGDSLSPLWFCLALNPLSTLLRESKLGFQLRRGGEIISHLMYMDDVKLFASKKPDLLQLLKITESFSNSISMEFGVDKCAVMHVQRGRVVNSENLQLSENISLKTLSEGETYKYLGMSESLGIPDADVKQAMKDRFFSRLRKVLTSLLSGGNKVRAFNAWVMPALAYSFGILRWTQTELDALDRRVRCLLTTHRMHHPRSSVMRLYIPRKCGGRGFLNTKDLHNREVYNLREYFLKVGETAGMHHDVVSVDKGFTPLSLAKQNWQRPLVMSASDRMDVWKSKELHGRFYQALTGPDVDLPASVNWLRFGDLFGETEGFVCAIMDEVIKTNNYRKYILKDGTLDICRACHRPGESLRHVTSGCSRLANSEYLHRHNLVARIIHQQLALKYGLVLSEVPYYQYKPEPVLDNGQYLLYWDRSIITDRTIVANKPDIVIVDRSARRAIIVDVAIPHDGNLVNAEKDKQIKYIDLAHEVTAMWNLDSTIIVPIVVSVNGLIAKSLDRHLERLSLGIWLKGRMQKAALLDTARIVRRFLCLEP

SEQ ID NO: 27476 - protein, 1112 aa, Dendrolimus punctatus
MRWTQQMNENVMRAYYEATDIGINLTAYRDRMLSLFQILQPDTNVTAQRLSDQVRAIQRRHLLDESTLDRLRTEIRTTRRISETPSSPQHPNITSRVTALLPMETDDTTVGSVSSQDNELMRRALEEAIEDYKEMPILSRPHLPRLPTHKRNLLLMGVLDSLLAPYFKASKDLTETHSILYCGAVAVCRVSGTKFPNLEQRSRRSNGQPAWQKRIECRIGKARTLIAKLLCFRAGNTRPKVMRFVNRAFNGTDINPSDYLSRVTERIDFYKQKICAWANRLRRYKKRADRYNLNRFFQRDQKRVYRGWEQPCVSVDDSHRPDIDSMTAFWSNIWSVPVTHQESDWTRMAEQACEMIPEMEPLALEPVDIGCAIRVAQNWKSPGPDGLHNFWIKWFKSSHACLAIQFQEAINMGSLPSFMTTGVTHLLHKSGSTTEAKNYRPITCLPTIYKLLTSVLRSKLMKHLTNNNILANTQNGCKDGSRGTKELLLIDMTISHQVRRNRKNLSVAWIDYKKAYDSVPHTWLEKVLELYKVNATLRAFLSSCMRQWTTVLRHPGDRGNLSTLHDPIRIKRGIFQGDSLSPLWFCLALNPLSTLLRESKLGFQLRRGGEIISHLMYMDDVKLFASKKPDLLQLLKITESFSNFISMEFGVDKCAVMHVQRGRVVNSENLQLSENISLKTLSEGETYKYLGISESLGIPDADVKQAMKDRFFSRLRKVLTSLLSGGNKVRAFTAWVMPALAYSFGILRWTQTELDALDRRVRCLLTTHRMHHPRSSVMRLYIPRKCGGRGFLNTKDLHNREVYNLREYFLKVGETAGMHHDMVSVDKGFTPLSLAKQNWQKPLVMSASDRMDVWKSKELHGRFYQALTGPDVDLPASVNWLRFGDLFGETEGFVCAIMDEVIKTNNYRRYILKDGTLDICQACHHPGESLRHVTSGCSRLANSEYLHRHNLVARIIHQQLALKYGLVSLEVPYYQYKPEPVLDNGQYMLYWDRSIITDRTIVANKPDIVIVDRSARRAIIVDVAIPHDGNLVKAEKEKQIKYIDLAHEVTAMWNLDSTIIVPIVVSVNGLIAKSLDRHLERLSLGTWVKGRMQKAALLDTTRIVRRFLSLEP

SEQ ID NO: 27477 - protein, 1013 aa, Dendrolimus kikuchii
MPPVEVDDTTVGNVSSQDNELMRRALEEAIEDYKMMPILSRPRLPRLPTHKHNLLIMGVLDSLLAPYFRASKDLAETHSILYCGAVAVCRVSGTKFPNLEQSPRRSDGQPAWQKRIECRIGKARTLIAKLLSFRAGNTRPKVMRFVNRAFTGTDSNPSDYLARVTERIDFYKQKISAWANRLRRYKKRADRYNLNRLFQRDQKRVYRGWERPCVSVDDGHWPDIDSMTAFWSNIWSVPVTHREGDWTRMVEQACETIPEMEPLALEPVDISCAIRMAQNWKSPGPDGLHNFWIKWFKSSHACLAVQFQEAINIGSLPSFMTTGVTHLLHKSGSTTEAKNYRPITCLPTIYKLLTSVLRSKLIEHLTNNNILANTQNGCKNGSRGTKELLLIDMTISHQVRRNRKNLSVAWIDYKKAYDSVPHTWLEKVLELYKVNATLRAFLSSCMEQWTTVLRHPGDRGNLSVLHDPIRIKRGIFQGDSLSPLWFCLALNPLSTLLRESKLGFQLRRGGEIISHLMYMDDVKLFASKKPDLLQLLKITESFSNSISMEFGVDKCAVMHVQRGRVVNSENLQLSENISLKTLSEGETYKYLGMSESLGIPDADVKQAMKDRFFSRLRKVLTSLLSGGNKVRAFNAWVMPALAYSFGILRWTQTELDALDRRVRCLLTTHRMHHPRSSVMRLYIPRKCGGRGFLNTKDLHNREVYNLREYFLKVGETAGMHHDVVSVDKGFTPLSLAKQNWQRPLVMSASDRMDVWKSKELHGRFYQALTGPDVDLPASVNWLRFGDLFGETEGFVCAIMDEVIKTNNYRKYILKDGTLDICRACHRPGESLRHVTSGCSRLANSEYLHRHNLVARIIHQQLALKYGLVLSEVPYYQYKPEPVLDNGQYLLYWDRSIITDRTIVANKPDIVIVDRSARRAIIVDVAIPHDGNLVNAEKDKQIKYIDLAHEVTAMWNLDSTIIVPIVVSVNGLIAKSLDRHLERLSLGIWLKGRMQKAALLDTARIVRRFLCLEP

SEQ ID NO: 27478 - protein, 1145 aa, Dendrolimus kikuchii
MLSIFLGRPPSARLGPAGRIPRPAPATGGAVRRMRWTQQMNENVMRAYYEATDAGIHLTAYRDRMLSLFQILQPDTNVTAQRLSDQVRAIQRRHLLDEPTLDRLRTEIRTTCRIIETPCSPQHPNITSRVTAMPPVEVDDTTVGNVSSQDNELMRRALEEAIEDYKMMPILSRPRLPRLPTHKHNLLIMGVLDSLLAPYFRASKDLAETHSILYCGAVAVCRVSGTKFPNLEQSPRRSDGQPAWQKRIECRIGKARTLIAKLLSFRAGNTRPKVMRFVNRAFTGTDSNPSDYLARVTERIDFYKQKISAWANRLRRYKKRADRYNLNRLFQRDQKRVYRGWERPCVSVDDGHWPDIDSMTAFWSNIWSVPVTHREGDWTRMVEQACETIPEMEPLALEPVDISCAIRMAQNWKSPGPDGLHNFWIKWFKSSHACLAVQFQEAINIGSLPSFMTTGVTHLLHKSGSTTEAKNYRPITCLPTIYKLLTSVLRSKLIEHLTNNNILANTQNGCKNGSRGTKELLLIDMTISHQVRRNRKNLSVAWIDYKKAYDSVPHTWLEKVLELYKVNATLRAFLSSCMEQWTTVLRHPGDRGNLSVLHDPIRIKRGIFQGDSLSPLWFCLALNPLSTLLRESKLGFQLRRGGEIISHLMYMDDVKLFASKKPDLLQLLKITESFSNSISMEFGVDKCAVMHVQRGRVVNSENLQLSENISLKTLSEGETYKYLGMSESLGIPDADVKQAMKDRFFSRLRKVLTSLLSGGNKVRAFNAWVMPALAYSFGILRWTQTELDALDRRVRCLLTTHRMHHPRSSVMRLYIPRKCGGRGFLNTKDLHNREVYNLREYFLKVGETAGMHHDVVSVDKGFTPLSLAKQNWQRPLVMSASDRMDVWKSKELHGRFYQALTGPDVDLPASVNWLRFGDLFGETEGFVCAIMDEVIKTNNYRKYILKDGTLDICRACHRPGESLRHVTSGCSRLANSEYLHRHNLVARIIHQQLALKYGLVLSEVPYYQYKPEPVLDNGQYLLYWDRSIITDRTIVANKPDIVIVDRSARRAIIVDVAIPHDGNLVNAEKDKQIKYIDLAHEVTAMWNLDSTIIVPIVVSVNGLIAKSLDRHLERLSLGIWLKGRMQKAALLDTARIVRRFLCLEP

SEQ ID NO: 27479 - protein, 1198 aa, Dendrolimus kikuchii
MRSRRHAHPPPAGPATPVSTPRSSSTEEDFFTPAATAASSTSEEGPAPSAPRRRSARGRGRPPSARLGPAGRIPRPAPATGGAVRRMRWTQQMNENVMRAYYEATDAGIHLTAYRDRMLSLFQILQPDTNVTAQRLSDQVRAIQRRHLLDEPTLDRLRTEIRTTCRIIETPCSPQHPNITFRVTAMPPVEVDDTTVGNVSSQDNELMRRALEEAIEDYKMMPILSRPRLPRLPTHKHNLLIMGVLDSLLAPYFRASKDLAETHSILYCGAVAVCRVSGTKFPNLEQSPRRSDGQPAWQKRIECRIGKARTLMAKLLSFRAGNTRPKVMRFVNRAFTGTDSNPSDYLARVTERIDFYKQKISAWANRLRRYKKRADRYNLNRLFQRDQKRVYRGWERPCVSVDDGHWPDIDSMTAFWSNIWSVPVTHREGDWTRMVEQACETIPEMEPLALEPVDISCAIRMAQNWKSPGPDGLHNFWIKWFKSSHACLAVQFQEAINIGSLPSFMTTGVTHLLHKSGSTTEAKNYRPITCLPTIYKLLTSVLRSKLIEHLTNNNILANTQNGCKNGSRGTKELLLIDMTISHQVRRNRKNLSVAWIDYKKAYDSVPHTWLEKVLELYKVNATLRAFLSSCMEQWTTVLRHPGDRGNLSVLHDPIRIKRGIFQGDSLSPLWFCLALNPLSTLLRESKLGFQLRRGGEIISHLMYMDDVKLFASKKPDLLQLLKITESFSNSISMEFGVDKCAVMHVQRGRVVNSENLQLSENISLKTLSEGETYKYLGMSESLGIPDADVKQAMKDRFFSRLRKVLTSLLSGGNKVRAFNAWVMPALAYSFGILRWTQTELDALDRRVRCLLTTHRMHHPRSSVMRLYIPRKCGGRGFLNTKDLHNREVYNLREYFLKVGETAGMHHDVVSVDKGFTPLSLAKQNWQRPLVMSASDRMDVWKSKELHGRFYQALTGPDVDLPASVNWLRFGDLFGETEGFVCAIMDEVIKTNKYRKYILKDGTLDICRACHRPGESLRHVTSGCSRLANSEYLHRHNLVARIIHQQLALKYGLVLSEVPYYQYKPEPVLDNGQYLLYWDRSIITDRTIVANKPDIVIVDRSARRAIIVDVAIPHDGNLVNAEKDKQIKYIDLAHEVTAMWNLDSTIIVPIVVSVNGLIAKSLDRHLERLSLGIWLKGRMQKAALLDTARIVRRFLCLEP

SEQ ID NO: 27480 - protein, 978 aa, Dendrolimus punctatus
MPILSRPHLPRLPTHKRNLLLMGILDSLLAPYFKASKDLTETHSILYCGAVAVCRVSGTKFPNLEQRSRRSNGQPAWQKRIECRIGKARTLIAKLLCFRAGNTRPKVMRFVNRAFTGTDINPSDYLSRVTERIDFYKQKICAWANRLRGYKKRADRYNLNRFFQRDQKRVYRGWEQPCVSVDDSHRPDIDSMTAFWSNIWPVPVTHREGDWTRMAEQACEMIPEMEPLALEPVDIGGAIRVAQNWKSPGPDGLHNFWIKWFKSSHACLAVQFQEAINMGSLPSFMTTGVTHLLHKSGSTTEAKNYRPITCLPTIYKLLTSVLRSKLMKHLTNNNILANTQNGCKDGSRGTKELLLIDMTISHQVRRNRKNLSVAWIDYKKAYDSVPHTWLEKVLELYKVNATLRAFLSSCMGQWTTVLRHPGDRGNLSALHDPIRIKRGIFQGDSLSPLWFCLALNLLSTLLRESKLGFQLRRGGEIISHLMYMDDVKLFASKKPDLLRLLKITESFSNSISMEFGVDKCAVMHVQRGRVVNSENLQLSENISLKTLSEGETYKYLGISESLGIPDADVKQAMKDRFFSRLRKVLTSLLSGGNKVRAFNAWVMPALAYSFGILRWTQTELDALDRRVRCLLTTHRMHHPRSSVMRLYIPRKCGGRGFLNTKDLHNREVYNLREYFLKVGETAGMHHDMVSVDKGFTQLSIAKQNWQKPLVMSASDRMDVWKSKELHGRFYQALTGPDVDLPASVNWLRFGDLFGETEGFVCAIMDEVIKTNNYRRYILKDGTLDICRACHHPGESLRHVTSGCSRLANSEYLHRHNLVARIIHQQLALKYGLVSLEVPYYQYKPEPVLDNGQYLLYWNRSIITDRTIVANKPDIVIVDRSARRAIIVDVAIPHDGNLVKAEKEKQIKYIDLAHEVTAMWNLDSTIIVPIVVSVNGLIAKSLDRHLERLSLDTWVKGRMQKAALLDTTRIVRRFLSLEP

SEQ ID NO: 27481 - protein, 1112 aa, Dendrolimus punctatus
MRWTQQMNENVMRAYYEATDIGINLTAYRDRMLSLFQILQPDTNVTAQRLSDQVRAIQRRHLLDESTLDRLRTEIRTTRRISETPSSPQHPNITSRVTALLPMETDDTTVGSVSSQDNELMRRALEEAIEDYKEMPILSRPHLPRLPTHKRNLLLMGVLDSLLAPYFKASKDLTETHSILYCGAVAVCRVSGTKFPNLEQRSRRSNGQPAWQKRIECRIGKARTLIAKLLCFRAGNTRPKVMRFVNRAFTGTDINPSDYLSRVTERIDFYKQKICAWANRLRRYKKRADRYNLNRFFQRDQKRVYRGWEQPCVSVDDSHRPDIDSMTAFWSNIWSVPVTHQEGDWTRMAEQACEMIPEMEPLALEPVDIGCAIRVAQNWKSPGPDGLHNFWIKWFKSSHACLAVQFQEAINMGWLPSFMTTGVTHLLHKSGSTTEAKNYRPITCLPTIYKLLTSVLRSKLMKHLTNNNILANTQNGCKDGSRGTKELLLIDMTISHQVRRNRKNLSVAWIDYKKAYDSVPHTWLEKVLELYKVNATLRAFLSSCMRQWTTVLRHPGDRGNLSALHDPIRIKRGIFQGDSLSPLWFCLALNPLSTLLRESKLGFQLRRGGEIISHLMYMDDVKLFASKKPDLLQLLKITESFSNSISMEFGVDKCAVMHVQRGRVVNSENLQLSENISLKTLSEGETYKYLGISESLGTPDADVKQAMKDRFFSRLRKVLTSLLSGRNKVRAFNAWVMPALAYSFGILRWTQTELDALDRRVRCLLTTHRMHHPRSSVMRLYIPRKCGGRGFLNSKDLHNREVYNLREYFLKVGETAGMHHDMVSVDKGFTPLSLAKQNWQKPLVMSASDRMDVWKSKELHGRFYQALTGPDVDLPASVNWLRFGDLFGETEGFVCAIMDEVIKTNNYRRYILKDGTLDICRACHHPGESLRHVTSGCSRLANSEYLHRHNLVARIIHQQLALKYGLVSLEVPYYQYKPEPVLDNGQYLLYWDRSIITDRTIVANKPDIVIVDRSARRAIIVDVAIPHDGNLVKAEKEKQIKYIDLAHEVTAMWNLDSTIIVPIVVSVNGLIAKSLDRHLERLSLGTWVKGRMQKAALLDTTRIVRRFLSLEP

SEQ ID NO: 27482 - protein, 979 aa, Dendrolimus kikuchii
MMPILSRPRLPRLPTHKHNLLIMGVLDSLLAPYFRASKDLAETHSILYCGAVAVCRVSGTKFPNLEQSPRRSDGQPAWQKRIECRIGKARTLIAKLLSFRAGNTRPKVMRFVNRAFTGTDSNPSDYLARVTERIDFYKQKISAWANRLRRYKKRADRYNLNRLFQRDQKRVYRGWERPCVSVDDGHWPDIDSMTAFWSNIWSVPVTHREGDWTRMVEQACETIPEMEPLALEPVDISCAIRMAQNWKSPGPDGLHNFWIKWFKSSHACLAVQFQEAINIGSLPSFMTTGVTHLLHKSGSTTEAKNYRPITCLPTIYKLLTSVLRSKLIEHLTNNNILANTQNGCKNGSRGTKELLLIDMTISHQVRRNRKNLSVAWIDYKKAYDSVPHTWLEKVLELYKVNATLRAFLSSCMEQWTTVLRHPGDRGNLSVLHDPIRIKRGIFQGDSLSPLWFCLALNPLSTLLRESKLGFQLRRGGEIISHLMYMDDVKLFASKKPDLLQLLKITESFSNSISMEFGVDKCAVMHVQRGRVVNSENLQLSENISLKTLSEGETYKYLGMSESLGIPDADVKQAMKDRFFSRLRKVLTSLLSGGNKVRAFNAWVMPALAYSFGILRWTQTELDALDRRVRCLLTTHRMHHPRSSVMRLYIPRKCGGRGFLNTKDLHNREVYNLREYFLKVGETAGMHHDVVSVDKGFTPLSLAKQNWQRPLVMSASDRMDVWKSKELHGRFYQALTGPDVDLPASVNWLRFGDLFGETEGFVCAIMDEVIKTNNYRKYILKDGTLDICRACHRPGESLRHVTSGCSRLANSEYLHRHNLVARIIHQQLALKYGLVLSEVPYYQYKPEPVLDNGQYLLYWDRSIITDRTIVANKPDIVIVDRSARRAIIVDVAIPHDGNLVNAEKDKQIKYIDLAHEVTAMWNLDSTIIVPIVVSVNGLIAKSLDRHLERLSLGIWLKGRMQKAALLDTARIVRRFLCLEP

SEQ ID NO: 27483 - protein, 1112 aa, Dendrolimus punctatus
MRWTQQMNENVMRAYYEATDIGINLTAYRDRMLSLFQILQPDTNVTAQRLSDQVRAIQRRHLLDESTLDRLRTEIRTTRRISETPSSPQHPNITSRVTALLPMETDDTTVGSVSSQDNELMRRALEEAIEDYKEMPILSRPHLPRLPTHKRNLLLMGVLDSLLAPYFKASKDLTETHSILYCGAVAVCRVSGTKFPNLEQRSRRSNGQPAWQKRIECRIGKARTLIAKLLCFRAGNTRPKVMRFVNRAFTGTDINPSDYLSRVTERIDFYKQKICAWANRLRRYKKRADRYNLNRFFQRDQKRVYRGWEQPCVSVDDSHRPDIDSMTAFWSNIWSVPVTHHEGDWTRMAEQACEMIPEMEPLALEPVDIGCAIRVAQNWKSPGPDGLHNFWIKWFKSSHACLAVQFQEAINMGSLPSFMTTGVTHLLHKSGSTTEAKNYRPITCLPTIYKVLTSVLRSKLMKHLTNNNILANTQNGCKDGSRGTKELLLIDMTISHQVRRNRKNLSVAWIDYKKAYDSVPHTWLEKVLELYKVNATLRAFLSSCMRQWTTVLRHPGDRGNLSALHDPIRIKRGIFQGDSLSPLWFCLALNPLSTLLRESKLGFQLRRGGEIISHLMYMDDVKLFASKTPDLLQLLKITESFSNSISMEFGVDKCAVMHVQRGRVVNSENLQLSENISLKTVSEGETYKYLGISESLGIPDADVKQAMKDRFFSRLRKVLTSLLSGGNKVRAFNAWVMPALAYSFGILRWTQTELDALDRRVRCLLTTHRMHHPRSSVMRLYIPRKCGGRGFLNTKDLHNREVYNLREYFLKVGETAGMHHDMVSVDKGFTPLSLAKQNWQKPLVMSASDRMDVWKSKELYGRFYQALTGPDVDLPASVNWLRFGDLFGETEGFVCAIMDEVIKTNNYRRYILKDGTLDICRACHHPGESLRHVTSGCSRLANSEYLHRHNLVARIIHQQLALKYGLVSLEVPYYQYKPEPVLDNGQYLLYWDRSIITDRTIVANKPDIVIVDRSARRAIIVDVAIPHDGNLVKAEKEKQIKYIDLAHEVTAMWNLDSTIIVPIVVSVNGLIAKSLDRHLERLSLGTWVKGRMQKAALLDTTRIVRRFLSLEP

SEQ ID NO: 27484 - protein, 1171 aa, Dendrolimus kikuchii
MRSRRHAHPPPAGPATPVSTPRSSSTEEDFFTPAATAASSTSEEGPAPSAPRRRSARGRGRPPSARLGPAGRIPRPAPATGGAVRRMRWTQQMNENVMRAYYEATDAGIHLTAYRDRMLSLFQILQPDTNVTAQRLSDQVRAIQRRHLLDEPTLDRLRTEIRTTCRIIETPCSPQHPNITSRVTAMPPVEVDDTTVGNVSSQDNELMRRALEEAIEDYKMMPILSRPRLPRLPTHKHNLLIMGVLDSLLAPYFRASKDLAETHSILYCGAVAVCRVSGTKFPNLEQSPRRSDGQPAWQKRIECRIGKARTLIAKLLSFRAGNTRPKVMRFVNRAFTGTDSNPSDYLARVTERIDFYKQKISAWANRLRRYKKRADRYNLNRLFQRDQKRVYRGWERPCVSVDDGHWPDIDSMTAFWSNIWSVPVTHREGDWTRMVEQACETIPEMEPLALEPVDISCAIRMAQNWKSPGPDGLHNFWIKWFKSSHACLAVQFQEAINIGSLPSFMTTGVTHLLHKSGSTTEAKNYRPITCLPTIYKLLTSVLRSKLIEHLTNNNILANTQNGCKNGSRGTKELLLIDMTISHQVRRNRKNLSVAWIDYKKAYDSVPHTWLEKVLELYKVNATLRAFLSSCMEQWTTVLRHPGDRGNLSVLHDPIRIKRGIFQGDSLSPLWFCLALNPLSTLLRESKLGFQLRRGGEIISHLMYMDDVKLFASKKPDLLQLLKITESFSNSISMEFGVDKCAVMHVQRGRVVNSENLQLSENISLKTLSEGETYKYLGMSESLGIPDADVKQAMKDRFFSRLRKVLTSLLSGGNKVRAFNAWVMPALAYSFGILRWTQTELDALDRRVRCLLTTHRMHHPRSSVMRLYIPRKCGGRGFLNTKDLHNREVYNLREYFLKVGETAGMHHDVVSVDKGFTPLSLAKQNWQRPLVMSASDRMDVWKSKELHGRFYQALTGPDVDLPASVNWLRFGDLFGETEGFVCAIMDEVIKTNNYRKYILKDGTLDICRACHRPGESLRHVTSGCSRLANSEYLHRHNLVARIIHQQLALKYGLVLSEVPYYQYKPEPVLDNGQYLLYWDRSIITDRTIVANKPDIVIVDRSARRAIIVDVAIPHDGNLVNAEKDKQIKYIDLAHEVTAMWNLDSTIIVPIVVSVNGLIAKSLDRHLEIHSTL

SEQ ID NO: 27485 - protein, 1111 aa, Dendrolimus kikuchii
MVNICSTGNVMRAYYEATDAGIHLTAYRDRMLSLFQILQPDTNVTAQRLSDQVRAIQRRHLLDEPTLDRLRTEIRTTCRIIETPCSPQHPNITSRVTAMPPVEVDDTTVGNVSSQDNELMRRALEEAIEDYKMMPILSRPRLPRLPTHKHNLLIMGVLDSLLAPYFRASKDLAETHSILYCGAVAVCRVSGTKFPNLEQSPRRSDGQPAWQKRIECRIGKARTLIAKLLSFRAGNTRPKVMRFVNRAFTGTDSNPSDYLARVTERIDFYKQKISAWANRLRRYKKRADRYNLNRLFQRDQKRVYRGWERPCVSVDDGHWPDIDSMTAFWSNIWSVPVTHREGDWTRMVEQACETIPEMEPLALEPVDISCAIRMAQNWKSPGPDGLHNFWIKWFKSSHACLAVQFQEAINIGSLPSFMTTGVTHLLHKSGSTTEAKNYRPITCLPTIYKLLTSVLRSKLIEHLTNNNILANTQNGCKNGSRGTKELLLIDMTISHQVRRNRKNLSVAWIDYKKAYDSVPHTWLEKVLELYKVNATLRAFLSSCMEQWTTVLRHPGDRGNLSVLHDPIRIKRGIFQGDSLSPLWFCLALNPLSTLLRESKLGFQLRRGGEIISHLMYMDDVKLFASKKPDLLQLLKITESFSNSISMEFGVDKCAVMHVQRGRVVNSENLQLSENISLKTLSEGETYKYLGMSESLGIPDADVKQAMKDRFFSRLRKVLTSLLSGGNKVRAFNAWVMPALAYSFGILRWTQTELDALDRRVRCLLTTHRMHHPRSSVMRLYIPRKCGGRGFLNTKDLHNREVYNLREYFLKVGETAGMHHDVVSVDKGFTPLSLAKQNWQRPLVMSASDRMDVWKSKELHGRFYQALTGPDVDLPASVNWLRFGDLFGETEGFVCAIMDEVIKTNNYRKYILKDGTLDICRACHRPGESLRHVTSGCSRLANSEYLHRHNLVARIIHQQLALKYGLVLSEVPYYQYKPEPVLDNGQYLLYWDRSIITDRTIVANKPDIVIVDRSARRAIIVDVAIPHDGNLVNAEKDKQIKYIDLAHEVTAMWNLDSTIIVPIVVSVNGLIAKSLDRHLERLSLGIWLKGRMQKAALLDTARIVRRFLCLEP

SEQ ID NO: 27486 - protein, 1112 aa, Dendrolimus punctatus
MRWTQQMNENVMRAYYEATDIGINLTAYRDRMLSLFQILQPDTNVTAQRLSDQVRAIQRRHLLDESTLDRLRTEIRTTRRISETPSSPQHPNITSRVTALLPMETDDTTVGSVSSQDNELMRRALEEAIEDYKEMPILSRPHLPRLPTHKRNLLLMGVLDSLLAPYFKASKDLTETHSILYCGAVAVCRVSGTKIPNLEQRSRRSNGQPAWQKRIECRIGKARTLIAKLLCFRAGNTRPKVMRFVNRAFTGTDINPSDYLSRVTERIDFYKQKICAWANRLRRYKKRADRYNLNRFFQRDQKRVYRGWEQPCVSVDDSHRPDIDSMTAFWSNIWSVPVTHQEGDWTRMAEQACEMIPEMEPLALEPVDIGCAIRVAQNWKSPGPDGLHNFWIKWFKSSHACLAVQFQEAINMGSLPSFMTTGVTHLLHKSGSTTEAKNYRPITCLPTIYKLLTSVLRSKLMKHLTNNNILANTQNGCKDGSRGTKELLLIDMTISHQVRRNRKNLSVAWIDYKKAYDSVPHTWLEKVLELYKVNATLRAFLSSCMRQWTTVLRHPGDRGNLSALHNPIRIKRGIFQGDSLSPLWFCLALNPLSTLLRESKLGFQLRRGGEIISHLMYMDDVKLFASKKPDLLQLLKITESFSNSISMEFGVDKCAVMHVQRGRVVNSENLQLSENISLKTLSEGETYKYLGISESLGIPDADVKQAMKDRFFSRLRKVLTSLLSGGNKVRAFNAWVMPALAYSFGILRWTQTELDALDRRVRCLLTTHRMHHPRSSVMRLYIPRKCGGRGFLNTKDLHNREVYNLREYFLKVGETAGMHHDMVSVDKGFTPLSLAKQNWQKPLVMSASDRMDVWKSKELHGRFYQALTGPDVDLPASVNWLRFGDLFGETEGFVCAIMDEVIKTNNYRRYILKDGTLDICRACHHPGESLRHVTSGCSRLANSEYLHRHNLVARIIHQQLALKYGLVSLEVPYYQYKPEPVLDNGQYLLYWDRSIITDRTIVANKPDIVIVDRSARRAIIVDVAIPHDGNLVKAEKEKQIKYIDLAHEVAAMWNLDSTIIVPIVVSVNGLIAKSLDRHLERLSLGTWVKGRMQKAALLDTTRIVRRFLSLEP

SEQ ID NO: 27487 - protein, 1145 aa, Dendrolimus kikuchii
MRSRRHAHPPPAGPATPVSTPRSSSTEEDFFTPAATAASSTSEEGPAPSAPRRRSARGRGRPPSARLGPAGRIPRPAPATGGAVRRMRWTQQMNENVMRAYYEATDAGIHLTAYRDRMLSLFQILQPDTNVTAQRLSDQVRAIQRRHLLDEPTLDRLRTEIRTTCRIIETPCSPQHPNITSRVTAMPPVEVDDTTVGNVSSQDNELMRRALEEAIEDYKMMPILSRPRLPRLPTHKHNLLIMGVLDSLLAPYFRASKDLAETHSILYCGAVAVCRVSGTKFPNLEQSPRRSDGQPAWQKRIECRIGKARTLIAKLLSFRAGNTRPKVMRFVNRAFTGTDSNPSDYLARVTERIDFYKQKISAWANRLRRYKKRADRYNLNRLFQRDQKRVYRGWERPCVSVDDGHWPDIDSMTAFWSNIWSVPVTHREGDWTRMVEQACETIPEMEPLALEPVDISCAIRMAQNWKSPGPDGLHNFWIKWFKSSHACLAVQFQEAINIGSLPSFMTTGVTHLLHKSGSTTEAKNYRPITCLPTIYKLLTSVLRSKLIEHLTNNNILANTQNGCKNGSRGTKELLLIDMTISHQVRRNRKNLSVAWIDYKKAYDSVPHTWLEKVLELYKVNATLRAFLSSCMEQWTTVLRHPGDRGNLSVLHDPIRIKRGIFQGDSLSPLWFCLALNPLSTLLRESKLGFQLRRGGEIISHLMYMDDVKLFASKKPDLLQLLKITESFSNSISMEFGVDKCAVMHVQRGRVVNSENLQLSENISLKTLSEGETYKYLGMSESLGIPDADVKQAMKDRFFSRLRKVLTSLLSGGNKVRAFNAWVMPALAYSFGILRWTQTELDALDRRVRCLLTTHRMHHPRSSVMRLYIPRKCGGRGFLNTKDLHNREVYNLREYFLKVGETAGMHHDVVSVDKGFTPLSLAKQNWQRPLVMSASDRMDVWKSKELHGRFYQALTGPDVDLPASVNWLRFGDLFGETEGFVCAIMDEVIKTNNYRKYILKDGTLDICRACHRPGESLRHVTSGCSRLANSEYLHRHNLVARIIHQQLALKYGLVLSEVPYYQYKPEPVLDNGQYLLYWDRSIITDRTIVANKPDIVIVDRSARRAIIVDVAIPHDGNLVNAEKDKQIKYIDLVSSFCVQRNTNQLD

SEQ ID NO: 27488 - protein, 1010 aa, Dendrolimus punctatus
MEINDTTVGNVSSQDNELMRRALEEAIQDYKEIPILSRPRLPRLPTYKRNLLLMGVLDSLLAPYFKASKDLTETHSILYCGAVAVCRVSGTKFPNLEQGSRRSNGQPAWQKRIECRIGKARTLIAKLLCFRTGNTRPKVMRFVNRAFTGTDINPSDYLSRVTERIDFYKQKICAWANRLRRYKKRADRYNLNRFFQRDQKRVYRGWEQPCVSVDDSHRPDIDSMTAFWSNIWSVPVTHQEGDWTRMTEQACEMIPEMEPLALEPVDIGCAIRVAQNWKSPGPDGLHNFWIKWFKSSHACLAVQFQEAINMGSLPSFMTTGVTHLLHKSGSTTEAKNYRPITCLPTIYKLLTSVLRSKLMKHLTNNNILANTQNGCKDGSRGTKELLLIDMTISHQVRRNRKNLSVAWIDYKKAYDSVPHTWLEKVLELYKVNATLRAFLSSCMGQWTTVLRHPGDRGNLSALHDPIRIKRGIFQGDSLSPLWFCLALNPLSTLLRESKLGFQLRRGGEIISHLMYMDDVKLFASKKPDLLQLLKITESFSNSISMEFGVDKCAVMHVQRGRVVNSENLQLSENISLKTLSEGETYKYLGISESLGIPDADVKQAMKDRFFSRLRKVLTSLLSGGNKVRAFNAWVMPALAYSFGILRWTQTELDALDRRVRCLLTTHRMHHPRSSVMRLYIPRKCGGRGFLNTKDLHNREVYNLREYFLKVGETAGMHHDMVSVDKGFTPLSLAKQNWQKPLVMSASDRMDVWKSKELHGRFYQALTGPDVDLPASVNWLRFGDLFGETEGFVCAIMDEVIKTNNYRRYILKDGTLDICRACHHPGESLRHVTSGCSRLANSEYLHRHNLVARIIHQQLALKYGLVSLEVPYYQYNPEPVLDNGQYLLYWDRSIITDRTIVANKPDIVIVDRSARRAIIVDVAIPHDGNLVKAEKEKQIKYIDLAHEVTAMWNLDSTIIVPIVVSVNGLIAKSLDRHLERLSLGTWVKGRMQKAALLDTTRIVRRFLSLEP

SEQ ID NO: 27489 - protein, 976 aa, Dendrolimus kikuchii
MNLGVILFCIIQRTRRKKERRVLDSLLAPYFRASKDLAETHSILYCGAVAVCRVSGTKFPNLEQSPRRSDGQPAWQKRIECRIGKARTLIAKLLSFRAGNTRPKVMRFVNRAFTGTDSNPSDYLARVTERIDFYKQKISAWANRLRRYKKRADRYNLNRLFQRDQKRVYRGWERPCVSVDDGHWPDIDSMTAFWSNIWSVPVTHREGDWTRMVEQACETIPEMEPLALEPVDISCAIRMAQNWKSPGPDGLHNFWIKWFKSSHACLAVQFQEAINIGSLPSFMTTGVTHLLHKSGSTTEAKNYRPITCLPTIYKLLTSVLRSKLIEHLTNNNILANTQNGCKNGSRGTKELLLIDMTISHQVRRNRKNLSVAWIDYKKAYDSVPHTWLEKVLELYKVNATLRAFLSSCMEQWTTVLRHPGDRGNLSVLHDPIRIKRGIFQGDSLSPLWFCLALNPLSTLLRESKLGFQLRRGGEIISHLMYMDDVKLFASKKPDLLQLLKITESFSNSISMEFGVDKCAVMHVQRGRVVNSENLQLSENISLKTLSEGETYKYLGMSESLGIPDADVKQAMKDRFFSRLRKVLTSLLSGGNKVRAFNAWVMPALAYSFGILRWTQTELDALDRRVRCLLTTHRMHHPRSSVMRLYIPRKCGGRGFLNTKDLHNREVYNLREYFLKVGETAGMHHDVVSVDKGFTPLSLAKQNWQRPLVMSASDRMDVWKSKELHGRFYQALTGPDVDLPASVNWLRFGDLFGETEGFVCAIMDEVIKTNNYRKYILKDGTLDICRACHRPGESLRHVTSGCSRLANSEYLHRHNLVARIIHQQLALKYGLVLSEVPYYQYKPEPVLDNGQYLLYWDRSIITDRTIVANKPDIVIVDRSARRAIIVDVAIPHDGNLVNAEKDKQIKYIDLAHEVTAMWNLDSTIIVPIVVSVNGLIAKSLDRHLERLSLGIWLKGRMQKAALLDTARIVRRFLCLEP

SEQ ID NO: 27490 - protein, 1238 aa, Phalera bucephala
MAEPSRRNPVRLCRQRDARSPSARPTPLPGSPASPQPSEDEDFFTPPTSGASSDDAGISATPPTLTSARRGRPPLPARLGPAGHCAPPTAPATGGVVRRMRWTPELNLSVMRAYYGATEGGTILTAYSPKLLSLFQGLHPTVAVTAQRLSDQVRAIQRCKLLDDTVLERLRREALPARTDSNVRGVEEPISLNNFARLEEVNSEQVSVSDQLQEQVRRALEDAFAEYRSAPISLRPCLPRLPMHRRNISLVSALDNVLKPHWETSVDLCDTHSILYCGAVAVCRVAGVRFPNLHRATQPTNTKPFWQCRIERRINMARTLIAKLLCFQAGNNRPRVMRFVAQAFAGTGVAPVDYVAGVAERIDYWKQKVYAWAKRIRRYKARADRYHVNRTFQTNQRSVYQAWERPQERVSDVHLPNAAVMAEFWRKIWSVPVSHSEGEWFDVVGRSCGPIQEMEPVVISREDLACAVRAAPNWKSPGPDGLHAFWLKRLQGSHSRLATQFQEALQLGSLPSFMTSGVTHLIYKSGSTSEPKNYRPITCLPTVYKLLTSILRIKINNHLKAQHILSPTQNGCKGESRGTKDLLLIDMVICQQVRRSRKNVSMAWIDYKKAYDSVPHTWLGRVLELYRVHPALCSFLGSCMGQWTTVLRHPGCGGLSGSSDLIKISRGIFQGDSLSPLWFCLALNPLSAILKDSKLGYHLRRESEPISHLLYMDDLKLYASKKTDLMELLKITGNFSNDIGMEFGVDKCAVIHVQRGRVEDSFNLQLSEDISLRSLSEMDSYKYLGMSQALSIAEQDMKQSLKDRFFARLIKVLKSLLSGGNKVRAFNGWVMSVLTYSFGILRWTQSELDALDRKVRRLLTAYRMHHPRSSVMRLYIPRKCGGRGFLNAKTLHNREVCNLRQYFLSVSVVMYRDVAAIDRGLTPLSLANENWRRPQVLSILDRTAIWKGKELHGRFYRALTGPDVDQLASVNWLRFSNLFGETEGFVFAIMDEVIMTNNYRKHILKDGTVDICRACHRPGESIRHVVSGCSRLANGEYLHRHNQVARIIHQQLALKYGLVDSEVPYYQYQPLPVLESGHITLYWDRSIITDRTIVANKPDIVIIDRSMRRVMLVDVTIPHDENLVKAEKEKLSKYLDLAHEVTAMWNVDSTIIIPMVVSVNGLIAKSFDKHLEKLSLGSWVKGLIFLYLYFIFLYIFYKKLYLINIYIIIMFIYFSQHKGLHSNWWIHSLISKYTCTPL

SEQ ID NO: 27491 - protein, 1197 aa, Bombyx mori
MSTTTALRKNPSRQCRQVTCGARRTSPCIPSCSSDGSPSPTRIENLSSDETQPSPAPPRPVRRGRPPLARLGSTRRNAPSTVPATSGVVRSRMRWNENINMNVMRAYYEATEGETNLSAYRSKMFSVFQTLCPTVNVSTQRLSDQVRAIQRLRLLDQSLLDRLRYEALPVPIEPQENQVVTDTVAPIIQHDEEIQEQVCASNQDYERLSSALEDSIQEYRLVSSCSRPRLPRLPMHRRNVSLVGALDSILKPYLESSTDLIDTHSLLYCGAVAVCRVAEVKSPNLTQTAYRPPTKPQWQCRIEKRIDRARILIAKLMCFQKGNTHPRVMCFVDQAFAGTGLSSNEYMTCIIERIDFWKQKVYAWASRIRRYRLRSERYHLNRVFQRDQRSVYRNWESSQSQVTNEPYNVNEEDMSTFWKNIWSIPIGHSEGEWIQTVRRECESYKEMDPIKISAIDVSRAVRSMPNWKSPGPDGLHSYWIKWIRSSHERLAALFQQALEMGSLPDFMTSGITYLIYKSGNTSDPKNYRPITCLPTIYKLLTSILRIKIQNHIFNNNILSPNQNGCKAGSRGTKDLLLIDMTITQQVRRGKRNVHMAWIDYKKAYDSVPHTWLMRVLELYKINPILCSFLSSCMGQWSTFLSQPGQMTSSAAPNLIRIKRGIFQGDSLSPLWFCLALNPLSTLLKDSTLGYRLRRGAEAISHLLFMDDLKLFASKKPDLMSLLKITDSFSKAIGMEFGVDKCAFIDVQRGKVVSSDCLLLNHSVVLKSLCESETYKYLGMFEVLNIVDADMKQSFRDRFFGRLIKVLKSHLSGGNKIRAFNGWVMPMLTYSFGILRWTQSELDVLDRKVRRLLTAYRMHHPRSSVMRLYIPRKCGGRGILNAKDLHNREIYNLREYFLKMNVNMYRDVVAVDKGLTPLSLANGNWKRLKVEGISDRITVWRSKELHGRFYRALTGPDVDQLASVAWLRFSNLFGETEGFIFAIMDEVIMTNNYRKYILKDGTVDICRACHRPGESIRHIVSGCSRFANGEYLHRHNQVARIIHQQLALKYGFLDSAVPYYQYQPQPVLDNGHVTLYWDRSIITDRYIVANKPDIVIIDRSARRAVLVDVTIPHDENLVKAEKDKLIKYLDLAHETTAMWHVDSTIIVPIVVSVHGLMAKSFDQHLKKLSLSSWVKGLIQKAVILDTARIVRRFLTLES

SEQ ID NO: 27492 - protein, 962 aa, Phalera bucephala
MHRRNISLVSALDNVLKLHWETSVDLCDTHSILYCGAVAVCRVAGVRFPNLHRATEPTNTKPFWQCRIERRINMARTLIAKLLCFQAGNNRPRVMRFVAQAFAGTGVAPVDYVAGVAERIDYWKQKVYAWAKRIRRYKARADRYHVNRTFQTNQRSVYQAWERPQERVTDVHLPNAAVMAEFWRKIWSVPVSHSEGEWFDVVGRSCGPIQEMEPVVISREDLACAVRAAPNWKSPGPDGLHAFWLKRLQGSHSRLATQFQEALQLGSLPSFMTSGVTHLIYKSGSTSEPKNYRPITCLPTVYKLLTSILRIKINNHLKAQHILSPTQNGCKGGSRGTKDLLLIDMAICQQVRRSRKNVSMAWIDYKKAYDSVPHTWLGRVLELYRVHPALCSFLGSCMRQWTTVLRHPGCGGLSGSSDLIKISRGIFQGDSLSPLWFCLALNPLSAILKDSKLGYHLRRESEPISNLLYMDDLKLYASKKTDLMELLKITGNFSNDIGMEFGVDKCAVIHVQRGRVEDSFNLQLSEDISLRSLSEMDSYKYLGMSQALSIAEQDMKQSLKDRFFARLIKVLKSLLSGGNKVRAFNGWVMPVLTYSFGILSWTQSELDALDRKVRRLLTAYRMHHPRSSVMRLYIPRKCGGRGFLNAKTLHNREVCNLRQYFLSVSVVMYRDVAAIDRGLTPLSLANENWRRPQVLSISDRTAIWKGKELHGRFYRALTGPNVDQLASVNWLRFSNLFGETEGFVFAIMDEVIMTNNYRKHILKDGTVDICRACHRPGESIRHVVSGCSRLANGEYLHRHNQVARIIHQQLALKYGLVDSEVPYYQYQPLPVLESGHITLYWDRSIITDRTIVANKPDIVIIDRSMRRVMLVDVTIPHDENLVKAEKEKLSKYLDLAHEVTAMWNVNSTIIIPMVVSVNGLIAKSFDKHLEKLSLGSWVKGLIQKAVMLDTARIVRRFLSLEP

SEQ ID NO: 27493 - protein, 1207 aa, Phalera bucephala
MAEPSRRNPVRLCRQRDARSPSARPTPLPGSPASPQPSKDEDFFTPPTSGAPSDDAGISATRPTLTSARRGRPPLPVRLGPAGHCAPPTAPATGGVVRRMRWTPELNLSVMRAYYGATEGGTILTAYRPKLLSLFQGLHPTFAVTAQRLSDQVRAIQRCKLLDDTVLERLRREALPARTDFNVRSVEEPISLNNFARSEEVNSEQVSVSDQLQEQVRRALEDAFAEYRSAPISLRPCLPRLPMHRRNISLVSALDNVLKPHWETSVDLCDTHSILYCGAVAVCRVAGVRFPNLHRATQPTNTKPFWQCRIERRINMARTLIAKLLCFQAGNNRPRVMRFVAQAFAGTGVAPVDYVAGVAERIDYWKQKVYAWAKRIRRYKARADRYHVNRTFQTNQRSVYQAWERPQERVTDVHLPNAAVMAEFWRKIWSVPVSHSEGEWFDVVGRSCGPIQEMEPVVISREDLACAVRAAPNWKSPGPDGLHAFWLKRLQGSHSRLATQFQEALQLGSLPSFMTSGVTHLIYKSGSTSEPKNYRPISCLPTVYKLLTSILRIKINSHLKAQHILSPTQNGCKGGSRGTKDLLLIDMAICQQVRRSRKNVSMAWIDYKKAYDSVPHTWLGRVLELYRVHPALCSFLGSCMRQWTTVLRHPGCGGLSGSSDLIKISRGIFQGDSLSPLWFCLALNPLSAILKDSKLGYHLRRESEPISHLLYMDDLKLYASKKTDLMELLKITGNFSNDIGMEFGVDKCAVIHVQRGRVEDSFNLQLSEDISLRSLSEMDSYKYLGMSQALSIAEQDMKQSLKDRFFARLIKVLKSLLSGGNKVRAFNGWVMPVLTYSFGILRWTQSELDALDRKVRRLLTAYRMHHPRSSVMRLYIPRKCGGRGFLNAKTLHNREVCNLRQYFLSVSVVMYRDVAAIDRGLTPLSLANENWRRPQVLSISDRTAIWKGKELHGRFYRALTGPDVDQLASVNWLRFSNLFGETEGFVFAIMDEVIMTNNYRKHILKDGTVDICRACHRPGESIRHVVSGCSRLANGEYLHRHNQVARIIHQQLALKYGLVDSEVPYYQYQPLPVLESGHITLYWDRSIRSIITDRTIVANKPDIVIIDRSMRRVMLVDVTIPHDENLVKAAKEKLSKYLDLAHEVTAMWNVDSTIIIPMVVSVNGLIAKSFDKHLEKLSLGSWVKGLIQKAVMLDTARIVRRFLSLEP

SEQ ID NO: 27494 - protein, 1090 aa, Phalera bucephala
MVLQREEPSSPLTVRNCCLCFRGFTRLSPLLRNDYRIKYEPSSGASCWMTQCLSDCAAKHFLLVLTPNVRGVEEPISLNNFARSEEVNSEQVSVSDQLQEQVRRALEDAFAEYRSAPISLRPCLPRLPMHRRNISLVSALDNVLKPHWETSVDLCDTHSILYCGAVAVCRVAGVRFPNLHRATQPTNTKPFWQCRIERRINMARTLIAKLLCFQAGNNRPRVVRFVAQAFAGTGVAPVDYVAGVAERIDYWKQKVYAWAKRIRRYKARADRYHVNRTFQTNQRSVYQAWERPQERVSDVHLPNAAVMAEFWRKIWSVPVSHSEGEWFDVVGRSCGPIQEMEPVVISREDLACAVRAAPNWKSPGPDGLHAFWLKRLQGSHSRLATQFQEALQLGSLPSFMTSGVTHLIYKSGSTSEPKNYRPITCLPTVYKLLTSILRIKINNHLKAQHILSPTQNGCKGGSRGTKDLLLIDMAICQQVRRSRKNVSMAWIDYKKAYDSVPHTWLGRVLELYRVHPALCSFLGSCMRQWTTVLRHPGCGGLSGSSHLIKISRGIFQGDSLTPLWFCLALNPLSAILKDSKLGYHLRRESEPISHLLYMDDLKLYASKKTDLMELLKITGNFSNDIGMEFGVDKCAVIHVQRGRVEDSFNLQLSEDISLRSLSEMDSYKYLGMSQALSIAEQDMKQSLKDRFFARLIKVLKSLLSGGNKVRAFNGWVMLVLIYSFGILRWTQSELDALDRKVRRLLTAYRMHHPRSSVMRLYIPRKCGGRGFLNAKTLHNREVCNLRQYFLSVSVVMYRDVAAIDRGLTPLSVANENWRRPQVLSISDRTAVWKGKELHGRFYRALTGPDVDQLASVNWLRFSNLFGETEGFVFAIMDEVIMTNNYRKHILKDGTVDICRACHRPGESIRHVVSGCSRLANGEYLHRHNQVARIIHQQLALKYGLVDSEVPYYQYQPLPVLESGHITLYWDRSIITDRTIVANKPDIVIIDRSMRRVMLVDVTIPHDENLVKAEKEKLSKYLDLAHEVTAMWNVDSTIIIPMVVSVNGLIAKSFDKHLEKLSLGSWVKGLIQKAVMLDTARIVRRFLSLEP

SEQ ID NO: 27495 - protein, 1204 aa, Phalera bucephala
MAEPSRRNPVRLCRQRDSRSPSARPTPLPGSPASPQPSEDEDFFTPPTSGASSDDAGISASPPTLKSARRGRPPLPARLGPAGHCAPPTAPATGGVVRRMRWTPELNLSVMRAYYGATEGGTILTAYRPKLLSLFQGLHPTVAVTAQRLSDQVRAIQRCKLLDDTVLERLHREALPARTESNVRSVEDPISLNNFARSEEVNSEQVSVSDQLQEQVRRALEDAFAEYRSAPISLRPCLPRLPMHRRNISLVSALDNVLKPHWETSVDLCDTHSILYCGAVAVCRVAGVRFPNLHRATQPTNAKPLWQCRIERRINMARTLIAKLLCFQAGNNRPRVVRFVTQAFAGTRVAPVDYVAGVAERIDYWKQKVYAWAKRIRRYKARADRYHVNRTFQTNQRSVYQAWERPQERVTDVHLPNAAVMAEFWRKIWSVPVTHSEGEWFDVVGRSCGPIQEMEAVVISREDLACAVRAAPNWKSPGPDGLHAFWLKRLQGSHSRLATQFQEALQLGSLPSFMTSGVTHLIHKSGSTSEPKNYRPITCLPTVYKLLTSILRIKINNHLKAQHILSPTQNGCKGGSRGTKDLLLIDITICQQVQRSRKNVSMAWIDYKKAYDSVPHTWLGRVLELYRVHPALCSFLGSCMRQWTTVLRHPGCGGLSGSSDLIKISRGIFQGDSLSPLWFCLALNPLSAILKDSKLGYHLRRESEPISHLLYMDDLKLYASKKTDLMELLKITGNFSNDIGMEFGVDKCAVIHVQRGRVEDSFNLQLSEDISLRSLSEMDSYKYLGMSQALSIAEQDMKQSLRDRFFARLIKVLKSLLSGGNRVRAFNGWVMPVLTYSFGILRWTQSELDALDRKVRRLLTAYRMHHPRSSVMRLYIPRKCGGRGFLNAKTLHNRAVCNFRQYFLSVSVVMYRDAAAIDRGLTPLSLANGNWRRPQVLSTSDRTAIWKGKELHGRFYRALTGPDVDQLASVTWLRFSNLFGETEGLVFAIMDEVIMTNNYRKYILKDGTVDICRACHRPGESIRHVVSGCSRLANGEYLHRHNQVARIIHQQLALKYGLVDSEVPYYQYQPLPVLESGHITLYWDRSVITDRTIVANKPDIVIIDRSMRRVMLVDVTIPHDENLVKAEKEKLSKYLDLAHEVTAMWNVDSTIIIPMVVSVNGLIAKSFDKHLEKLSLGSWVKGLIQKAVMLETARIVRRFLSLEP

SEQ ID NO: 27496 - protein, 1197 aa, Bombyx mori
MSTTTALRKNPSRQCRQVTCGAQRTSPCIPSCSSDGSPSPTRIESLSSDETQPSPAPPRPVRRGRPPLARLGSTRRNAPSTVPATSGVVRSRMRWNENININVMRAYYEATEGETNLSAYRSKMFSVFQTLCPTVNVSTQRLSDQVRAIQRLRLLDQSLLDRLRYEALPVPIEPQENQVVTDTVAPIIQHDEEIQEQVCASNQDYERLSSALEDSIQEYRLVSACSRPRLPRLPIHRRNVSLVGALDSILKPYLESSTDLIDTHSLLYCGAVAVCRVAEVKSPNLTQTAYRPPTKPQWQCRIEKRIDRARILIAKLMCFQKGNTRPRVMCFVDQAFAGTGISSNEYMTCIIERIDFWKQKVYAWASRIRRYRLRSERCHLNRVFQRDQRSVYRNWESSQSQVTDEPYNVNEEDMSTFWNNIWSIPIGHSEGEWIQTVRRECESYKEMDSITISAVDVSRAVRSMPNWKSPGPDGLHSYWIKWIRSSHERLAAQFQQALELGSLPDFMTSGITYLIYKSGNTSDPKNYRPIACLPTIYKLLTSILRIKIQNHIFNNNILSPNQNGCKAGSRGTKDLLLIDMTITQQVRRSKRNVHMAWIDYKKAYDSVPHTWLMRVLELYKINPILCSFLSSCMGQWSTFLSQPGQMTSSAAPNLIRIKRGIFQGDSLSPLWFCLALNPLSTLLKDSTLGYRLRRGAEAISHLLFMDDLKLFASKKPDLMSLLKITDNFSKAIGMEFGVDKCAFIEVQRGKVVSSDCLLLNHSVVLKSLCESETYKYLGMFEVLNIVDADMKQSFRDRFFGRLIKVLKSHLSGGNKIRAFNGWVMPMLTYSFGILRWTQSELDVLDRKVRRLLTAYRMHHPRSSVMRLYIPRKCGGRGILNAKDLHNREIYNLREYFLKMNVNMYRDVVAVDKGLTPLSLANGNWKRLKVESISDRITVWRSKELHGRFYRALTGPDVDQLASVAWLRFSNLFGETEGFIFAIMDEVIMTNNYRKYILKDGTVDICRACHRPGESIRHIVSGCSRFANGEYLHRHNQVARIIHQQLALKYGFLDSAVPYYQYQPQPVLDNGHVTLYWDRSIITDRYIVANKPDIVIIDRSARRAVLVDVTIPHDENLVKAEKDKLIKYLDLAHETTAMWHVDSTIIVPIVVSVHGLIAKSFDQHLKKLSLSSWVKGLIQKAVILDTARIVRRFLTLES

SEQ ID NO: 27497 - protein, 1204 aa, Phalera bucephala
MAEPSRRNPVRLCRQRDARSPSARPTPLPGSPTSPQPSEDEDFFTPPTSGASSDDAGISASPPTLTSARRGRPPLPARLGPAGHCAPPTAPATGGVVRRMRWTPELNLSVMRAYYGATEGGTILTAYRPKLLSLFQGLHPTVAVTAQRLSDQVRAIQRCKLLDDTVLERLHREALPARTESNVRSVEDPISLNNFARSEEVNSEQVSVSDQLQEQVRRALEDAFAEYRSAPISLRPCLPRLPMHRRNISLVSALDNVLKPHWETSVDLCDTHSILYCGAVAVCRVAGVRFPNLHRATQPTNTKPFWQCRIERRINMARTLIAKLLCFQAGNNRPRVVRFVTQAFAGTRVAPVDYVAGVAERIDYWKQKVYAWAKRIRRYKARADRYHVNRTFQMNQRSVYQAWERPQERVTDVHLPNAAVMAEFWRKIWSVPVTHSEGEWFDVVGRSCGPIQEMEPVVISREDLACAVRAAPNWKSPGPDGLHAFWLKRLQGSHSRLATQFQEALQLGSLPSFMTSGVTHLIHKSGSTSEPKNYRPITCLPTVYKLLTSILRIKINNHLKAQHILSPTQNGCKGGSRGTKDLLLIDIAICQQVRRSRKNVSMAWIDYKKAYDSVPHTWLGRVLELYRVHPALCSFLGSCMRQWTTVLRHPGCGGLSGSSDLIKISRGIFQGDSLSPLWFCLALNPLSAILKDPKLGYHLRRESEPISHLLYMEDLKLYASKKTDLMELLKITGNFSNDIGMEFGVDKCAVIHVQRGRVEDSFNLQLSEDISLRSLSEMDSYKYLGMSQALSIAEQDMKQSLRDRFFARLIKVLKSLLSGGNRVRAFNGWVMPVLTYSFGILRWTQSELDALDRKVRRLLTAYRMHHPRSSVMRLYIPRKCGGRGFLNAKTLHNREVCNLRQYFLSVSVVMYRDVAAIDRGLTPLSLANGNWRRPQVLSTSDRTAIWKGKELHGRFYRALTGPDVDQLASVTWLRFSNLFGETEGFVFAIMDEVIMTNNYRKYILKDGTVDICRACHRPGESIRHVVSGCSRLANGEYLHRHNQVARIIHQQLALKYGLVDSEVPYYQYQPLPVLESGHITLYWDRSVITDRTIVANKPDIVIIDRSMRRVMLVDVTIPHDENLVKAEKEKLSKYLDLAHEVTAMWNVDSTIIIPMVVSVNGLIAKSFDKHLEKLSLGRWVKGLIQKAVMLDTARIVRRFLSLEP

SEQ ID NO: 27498 - protein, 1204 aa, Phalera bucephala
MAEPSRRNPVRLCRQRDARSLSARPTPLPGSPTSPQPSEDEDFFTPPTSGASSDDAGISASPPTLTSARRGRPPLPARLGPAGHCAPPTAPATGGIVRRMRWTPELNLSVMRAYYGATEGGTILTAYRPKLLSLFQGLHPTVAVTAQRLSDQVRAIQRCKLLDDTVLERLHREALPARTESNVRSVEDPISLNNFARSEEVNSEQVSVSDQLQEQVRRALEAAFAEYRSAPISLRPCLPRLPMHRRNISLVSALDNVLKPHWETSVDLCDTHSILYCGAVAVCRVAGVRFPNLHRATQPTNAKPLWQCRIERRINMARTLIAKLLCFQAGNNRPRVVRFVTQAFAGTRVAPVDYVAGVAERIDYWKQKVYAWAKRIRGYKARADRYHVNRTFQTNQRSVYQAWERPQERVTDVHLPNAAVMAEFWRKIWSVPVTHSEGEWFDFVGRSCGPIQEMEPVVISREDLACAVRAAPNWKSPGPDGLHAFWLKRLQGSHSRLATQFQEALQLGSLPSFMTSGVTHLIHKSGSTSEPKNYRPITCLPTVYKLLTSILRIKINNHLKAQHILSPTQTGCKGGSRGTKDLLLIDIAICQQVRRSRKNVSMAWIDYKKAYDSVPHTWLGRVLELYREHPALCSFLGSCMRQWTTVLRHPGCGGLSGSSDLIKISRGIFQGDSLSPLWFCLALNPLSAILKDSKLGYHLRRESEPISHLLYMDDLKLYASKKTDLMELLKITGNFSNDIGMEFGVDKCAVIHVQRGRVEDSFNLQLSEDISLRSLSEMDSYKYLGMSQALSIAEQDMKQSLRDRFFARLIKVLKSLLSGGNKVRAFNGWVMPVLTYSFGILRWTQSELDALDRKVRRLLTAYRMHHPRSSVMRLYIPRKCGGRGFLNAKTLHNREVCNLRQYFLSVSVVMYRDVAAIDRGLTPLSLANGNWRRPQVLSTSDRTAIWKGKELHGRFYRALTGPDVDQLASVTWLRFSNLFGETEGFVFAIMDEVIMTNNYRKHILKDGTVDICRACHRPGESIRHVVSGCSRLANGEYLHRHNQVARIIHQQLALKYGLVDSEVPYYQYQPLPVLESGHITLYWDRSVITDRTIVANKPDIVIIDRSMRRVMLVDVTIPHDENLVKAEKEKLSKYLDLAHEVTTMWNVDSTIIIPMVVSVNGLIAKSFDKHLEKLSLGSWVRGLIQKAVMLDTARIVRRFLSLEP

SEQ ID NO: 27499 - protein, 962 aa, Phalera bucephala
MHRRNISLVSALDNVLKPHWETSVDLCDTHSILYCGAVAVCRVAGVRFPNLHRATQPTNAKPLWQCRIERRINMARTLIAKLLCFQAGNNRPRVMRFVTQAFAGTRVAPVDYVTGVAERIDYWKQKVYAWAKRIRRYKARADRYHVNRTFQTNQRSVYQAWERPQERVTDVHLPNAAVMAEFWRKIWSVPVTHSEGEWFDVVGRSCGPIQEMEPVVISREDLACAVRAAPNWKSPGPDGLHAFWLKRLQGSHSRLATQFQEALQLGSLPSFMTSGVTHLIHKSGSTSEPKNYRPITCLPTVYKLLTSILRIKINNHLKAQHILSPTQNGCKGGSQGTKDLLLIGIAICQQVRRSRKNVSMAWIDYKKAYDSVPHTWLGRVLELYRVHPALCSFLGSCMGQWTTILRHPGCGGLSGSSNLIKISRGIFQGDSLSPLWFCLALNPLSAILKDSKLGYHLRRESEPISHLLYMDDLKLYASKKTDLMELLKITGNFSNDIGMEFGVDKCAVIHVQRGRVEDSFNLQLSEDISLRSLSEMDSYKYLGMSQALSIAEQDMKQSLRDRFFARLIKVLKSLLSGGNRVRAFNGWVMPVLTYSFGILRWTQSELDALDRKVRRLLTAYRMHHPRSSVMRLYIPRKCGGRGFLNAKTLHNREVCNLRQYFLSVSVVMYRDVAAIDRGLTPLSLANGNWRRPQVLSTSDRTAIWKGKELHGRFYRALTGPDVDQLASVTWLRFSNLFGETEGFVFAIMDEVIMTNNYRKYILKDGTVDICRACHRPGESIRHVVYGCSRLANGEYLHRHNQVARIIHQQLALKYGLVDSEVPYYQYQPLPVLESGHITLYWDRSVITDRTIVANKPDIVIIDRSMRRVMLVDVTIPHDENLVKAEKEKLSKYLDLAHEVTAMWNVDSTIIIPMVVSVNGLIAKSFDKHLEKLSLGRWVKGLIQKAVMLDTARIVRRFLSLEP

SEQ ID NO: 27500 - protein, 1204 aa, Phalera bucephala
MAEPSRRNPVRLCRQRDARSPSARPTPLPGSPTSPQPSEDEDFFTPPTSGASSDDAGISASPPTLTSARRGRPPLPARLGPAGHCAPPTAPATGGVVRRMRWTPELNLSVMRAYYGATEGGTILTAYRPKLLSLFQGLHPTVAVTAQRLSDQVRAIQRCKLLDDTVLERLHREALPARTESNVRSVEDPISLNNFARSEEVNSEQASVSDQLQEQVRRALEDAFAEYRSAPISLRPCLPRLPMHRRNISLMSALDNVLKPHWETSVDLCDTHSILYCGAVAVCRVAGVRFPNLHRATQPTNAKPLWQCRIERRINMARTLIAKLLCFQAGNNRPRVMRFVTQAFAGTRVAPVDYVAGVAERIDYWKQKVYAWAKRIRRYKARADRYHVNRTFQTNQRSVYQAWERPQERVTDVHLPNAAVMAEFWRKIWSVPVTHSEGEWFDVVGRSCGPIQEMEPVVISREDLACAVRAAPNWKSPGPDGLHAFWLKRLQGSHSRLATQFQEALQLGSLPSFMTSGVTHLIHKSGSTSEPKNYRPITCLPTVYKLLTSILRIKINNHLKAQHILSPTQNGCKGGSRGTKDLLLIDIAICQQVRRSRKNVSMAWIDYKKAYDSVPHTWLGRVLELYRVHPALCSFLGSCMRQWTTVLRHPGCGGLSGSSDLIKISRGIFQGDSLSPLWFCLALNPLSAILKDSKLGYHLRRESEPISHLLYMDDLKLYASKKTDLMELLKITGNFSNDIGMEFGVDKCAVIHVQRGRVEDSFNLQLSEDISLRSLSEMDSYKYLGMSQALSIAEQDMKQSLRDRFFARLIKVLKSLLSGGNRVRAFNGWVMPVLTYSFGILRWTQSELDALDRKVRRLLTAYRMHHPRSSVMRLYIPRKCGGRGFLNAKTLHNREVCNLRQYFLSVSVVMYRDVAAIDRGLTPLSLANGNWRRPQVLSTSDRTAIWKGKELHGRFYRALTGPDVDQLASVTWLRFSNLFGETEGFVFAIMDEVIMTNNYRKYILKDGTVDICRACHRPGESIRHVVSGCSRLANGEYLHRHNQVARIIHQQLALKYGLVDSEVPYYQYQPLPVLESGHITLYWDRSVITDRTIVANKPDIVIIDRSMRRVMLVDVTIPHDENLVKAEKEKLSKYLDLAHEVTAMWNVDSTIIIPMVVSVNGLIAKSFDKHLEKLSLGRWVKGLIQKAVMLDTARIVRRFLSLEP

SEQ ID NO: 27501 - protein, 1204 aa, Phalera bucephala
MAEPSRRNPVRLCRQRDARSPSARPTPLPGSPASPQPSEDEDFFTPPTSGASSDDAGISATPPTLTSARRGRPPLPACLGPAGHCAPPTAPATGGVVRRMRWTPELNLSVMRAYYGATEGGTILTAYRPKLLSLFQGLHPTVAVTAQRLSDQVRAIQRCKLLDDTVLERLRREALPARTDSNVRGVEEPISLNNFARSEEVNSEQVSVSDQLQEQVRRALEDAFAEYRSAPISLRPCLPRLPMHRRNISLVSALDNVLKPHWETSVDLCDTHSILYCGAVAVCRVAGVRFPNLHRATQPTNTKPFWQCRIERRINMARTLIAKLLCFQAGNNRPRVMRFVAQAFAGTGVAPVDYVAGVAERIDYWKQKVYAWAKRIRRYKARADRYHVNRTFQTNQRSVYQAWERPQERVSDVHLPNAAVMAEFWRKIWSVPVSHSEGEWFDVVGRSCGPIQEMEPVVISREDLACAVRAAPNWKSPGPDGLHAFWLKRLQGSHSRLATQFQEALQLGSLPSFMTSGVTHLIYKSGSTSEPKNYRPITCLPTVYKLLTSILRIKINNHLKAQHILSPTQNGCKGGSWGTKDLLLIDMAICQQVRRSRKNVSMAWIDYKKAYDSVPHTWLGRVLELYRVHPALCSFLGSCMGQWTTVLRHPGCGGLSGSSDLIKISRGIFQGDSLSPLWFCLALNPLSAILKDSKLGYHLWRESEPISHLLYMDDLKLYASKKTDLMELLKITGNFSNDIGMEFGVDKCAVIHVQRGRVEDSFNLQLSEDISLRSLSEMDSYKYLGMSQALSIAEQDMKQSLKDRFFARLIKVLKSLLSGGNKVRAFNGWVMPVLTYSFGILRWTQSELDALDRKVRRLLTAYRMHHPRSSVMRLYIPRKCGGRGLLNAKTLHNREVCNLRQYFLSVSVVMYRDVAAIDRGLTPLSLANENWRRPQVLSISDRTAIWKGKELHGRFYRALTGPDVDQLASVNWLRFSNLFGETEGFVFAIMDEVIMTNNYRKHILKDGTVDICRACHRPGESIRHVVSGCSRLANGEYLHRHNQVARIIHQQLALKYGLVDSEVPYYQYQPLPVLESGHITLYWDRSIITDRTIVANKPDIVIIDRSMRRVMLVDVTIPHDENLVKAEKEKLSKYLDLAHEVTAMWNVDSTIIIPMVVSVNGLIAKSFDKHLEKLSLGSWVKGLIQKAVMLDTARIVRRFLSLEP

SEQ ID NO: 27502 - protein, 1088 aa, Phalera bucephala
MVLQREEPSSPLTVRNCCLCFRGFTRLSPLLRNDYRIKYVPSSGASCWMTQCLSDCTAKYFLLVLNPTCEVLKISLNNFARSEEVNSEQVSVSDQLQEQVRRALEDAFAEYRSAPISLRPCLPRLPMHRRNISLVSALDNVLKPHWETSVDLCDTHSILYCGAVAVCRVAGVRFPNLHRATQPTNAKPLWQCRIERRINMARTLIAKLLCFQAGNNRPRVVRFVTQAFAGTRVAPVDYVAGVAERIDYWKQKVYAWAKRIRRYKARADRYHVNRTFQTNQRSVYQAWERPQERVTDVHLPNAAVMAEFWRNIWSVPVSHSEGEWFDVVGRSCGPIQEMEPVVISREDLACAVRAAPNWKSPGPDGLHAFWLKRLQGSHSRLATQFQEALQLGSLPSFMTSGVTHLIYKSGSTSEPKNYIPITCLPTVYKLLTSILRIKINNHLKAQHILSPTQNGCKGGSRGTKDLLLIDMAICQQVRRSRKNVSMAWIDYKKAYDSVPHTWLGRVLELYRVHPALCSFLGSCMRQWTTVLRHPGCGGLSGSSDLIKISRGIFQGDSLSPLWFCLALNPLSAILKDSKLGYHLRRESEPISHLLYMDDLKLYASKKTDLMELLKITGNFSNDIGMEFGVDKCAVIHVQRGRVEDSFNLQLSEDISLRSLSEMDSYKYLGMSQALSIAEQDMKQSLGDRFFARLIKVLKSLLSGGNRVRAFNGWVMPVLTYSFGILRWTQSELDALDRKVRRLLTAYRMHHPRSSVMRLYIPRKCGGRGFLNAKTLHNREVCNLRQYFLSVSVVMYRDVAAIDRGLTPLSLANGNWRRPQVLSTSDRTAIWKGKELHGRFYRALTGPDVDQLASVTWLRFSNLFGETEGFVFAIMDEVIMTNNYRKYILKDGTVDICRACHRPGESIRHVVSGCSRLANGEYLHRHNQVARIIHQQLALKYGLVDSEVPYYQYQPLPVLESGHITLYWDRSVITDRTIVANKPDIVIIDRSMRRVMLVDVTIPHDENLVKAEKEKLSKYLDLAHEVTAMWNVDSTIIIPMVVSVNGLKAKSFDKHLEKLSLGSWVKGLIQKAVMLDTARIVRRFLSLEP

SEQ ID NO: 27503 - protein, 889 aa, Phalera bucephala
MARTLIAKLLCFQAGNNRPRVMRFVAQAFAGTGVAPVDYVAGVAERIDYWKQKVYAWAKRIRRYKARADRYHVNRTFQTNQRSVYQAWTRPQERVTDVHLPNAAVMAEFWRKIWSVPVSHSEGEWFDVVGRSCRPIQEMEPVVISREDLACAVRAAPNWKSPGPDGLHAFWLKRLQGSHSRLATQFQEALQLGSLPSFMTSGVTHLIYKSGSTSEPKNYRPITCLPTVYKLLTSILRIKINNHLKAQHILSPTQNGCKRGSRGTKDLLLIDMAICQQVRRSRKNVSMAWIDYKKAYDSVPHTWLGRVLELYRVHPALCSFLGSCMRQWTTVLRHPGCGGLSGSSDLIKISRGIFQGDSLSPLWFCLALNPLSAILKDSKLDYHLRRESEPISHLLYMDDLKLYASKKTDLMELLKITGNFSNDIGMEFGVDKCAVIHVQRGRVEDSFNLQLSEDISLRSLSEMDSYKYLGMSQALSIAEQDMKQSLKDRFFARLIKVLKSLLSGGNRVRAFNGWVMPVLTYSFGILRWTQSELDALDRKVRRLLTAYRMHHPRSSVMRLYIPRKCGGRGFLNAKTLHNREVCNLRQYFLSVSVVMYRDVAAIDRGLTPLSLANENWRRPQVLSISDRTAIWKGKELHGRFYRALTGPDVDQLASVNWLRFSNLFGETEGFVFAIMDEVIMTNNYRKHILKDGTVDICRACHRPGESIRHVVSGCSRLANGEYLHRHNQVARIIHQQLALKYGLVDSEVPYYQYQPLPVLESGHITLYWDRSIITDRTIVANKPDIVIIDRSMRRVMLVDVTIPHDENLVKAEKEKLSKYLDLAPEVTAMWNVDLTIIIPMVVSVNGLIAKSFDKHLEKLSLGSWVKGLIQKAVMLDTARIVRRFLSLEP

SEQ ID NO: 27504 - protein, 1204 aa, Phalera bucephala
MAEPSRRNPVRLCRQRDARSPSARPTPLPGSPTTPQPSEDEDFFTPPTSGASSDDAGISASPPTLTSARRGRPPLPARLGPAGHCAPPTAPATGGVVRRMRWTPELNLSVMRAYYGATEGGTILTAYRPKLLSLFQGLHPTVAVTAQRLSDQVRAIQRCKLLDDTVLERLHREALPARTESNVRSVEDPISLNNFTRSEEVNSEQVSVSDQLQEQVRRALEDAFAEYRSAPISLRPCLPRLPMHRRNISLVGALDNVLKPHWETSVDLCDTHSILYCGAVAVCRVAGVRFPNLHRATQPTNAKPLWQCRIERRINMARTLIAKLLCFQAGNNRPRVVRFVTQAFAGTRVAPVDYVAGVAERIDYWKQKVYAWAKRIRRYKARADRYHVNRTFQTNQRSVYQAWERLQERVTDVHLPNAAVMAEFWRKIWSVPVSHSEGEWFDVVGRSCGPIQEMEPVVISREDLACAVRAAPNWKSPGPDGLHAFWLKRLQGSHSRLATQFQEALQLGSLPSFMTWGVTHLIHKSGSTSEPKNYRPITCLPTVYKLLTSILRIKINNHLKAQHILSPTQTGCKGGSRGTKDLLLIDIAICQQVRRSRKNVSMAWIDYKKAYDSVPHTWLERVLELYRVHPALCSFLGSCMRQWTTVLRHPGCGGLSGSSDLIKISRGIFQGDSLSPLWFCLALNPLSAILKDSKLGYHLRRESEPISHLLYMDDLKLYASKKTDLMELLKITGNFSNDIGMEFGVDKCAVIHVQRGRVEDSFNLQLSEDISLRSLSEMDSYKYLGMSQALSIAEQDMKQSLRDRFFARLIKVLKSLLSGGNKVRAFNGWVMPVLTYSFGILRWTQSELDALDRKVRRLLTAYRMHHPRSSVMRLYIPRKCGGRGFLNAKTLHNREVCNLRQYFLSVSVVMYRDVAAIDRGLTPLSLANGNWRRPQVLSTSDRTAIWKGKELHGRFYRALTGPDVDQLASVTWLRFSNLFGETEGFVFAIMDEVIMTNNYRKHILKDGTVDICRACHRPGESIRHVVSGCSRLANGEYLHRHNQVARIIHQQLALKYGLVDSKVPYYQYQPLPVLESGHITLYWDRSIITDRTIVANKPDIVIIDRSMRRVMLVDVTIPHDENLVKAEKEKLSKYLDLAHEVTTMWNVDSTIIIPMVVSVNGLIAKSFDKHLEKLSLGSWVKGLIQKAVMLDTARIVRRFLSLEP

SEQ ID NO: 27505 - protein, 889 aa, Phalera bucephala
MARTLIAKLLCFQAGNNRPRVVRFVAQAFAGTGVAPVDCMARVTERIDYWKQKVYAWANRIRRYRERADRYHVNRTFEVNQKSLYQAWERPQERVTDVHLPDAATMAEFWRKIWSVPVSHSEGEWFDVVGRSCEPIQEMEPVVITRDDVACAVRAAPNWKSPGPDGLHAFWLKRLQGSHARLATQFQEALELGSLPSLLTTGVTHLIHKSGSTLEPKNYRPITCLPTVYKLLTSILRTKINNHLKAQHILSPTQNGCKGGSRGTKDLLLIDMAICQQVRRSRKNVSMAWIDYKKAYDSVPHTWLRRVLELYKVHPALCSFLGLCMGQWTTVLRHPGYGGLSGSSDLIKISRGIFQGDSLSPLWFCLALNPLSAILKNSKLGYHLRRGSEPISHLLYMDDLKLYASKKTDLMELLKITGNFSNDIGMEFGVDKCAVIHVQRGRVEDSFNLQLSEDISLRSLSEMDSYKYLGMSQALSIAEQDMKQSLKDRFFARLMKVLKSLLSGGNKVRAFNGWVMPVLTYSFGILRWTQSELDALDRKVRRLLTAYRMHHPRSSVMRLYIPRRCGGRGFLNAKTLHNREVCNLRQYFLSVSVVMYRDVAAIDRGLTPLSLANGNWRRPQVLSISDRTAIWKGKELHGRFYRALTGPDVDQLASVTWLRFSNLFGETEGFVFAIMDEVIMTNNYRKHILKDGTVDICRACHRPGESIRHVVSGCSRLANGEYLHRHNQVAKIIHQQLALKYDLVDSEVPYYQYQPLPVLESGHITLYWDRSIITDRTIVANKPDIVIIDRSMRRVMLVDVTIPHDENLVKAEKEKISKYLDLAHEVTAMWNVDSTIIIPMVVSVNGLIAKSFDKHLEKLSLGSWVKGLIQKVVVLDTARIVRRFLSLEP

SEQ ID NO: 27506 - protein, 1204 aa, Phalera bucephala
MAEPSRRNPVRLCRQRDARSPSARPTPLPGSPTSPQPSEDEDFFTPPTSGASSDDAGISASPPTLTSARRGRPPLPARLGPAGHCAPPTAPATGGVVRRMRWTPELNLSVMRAYYGATKGGTILTAYRPKLLSLFQGLHPTVAVTAQRLSDQVRAIQRCKLLDDTVLERLHREALPARTESNVRSVEDPISLNNFARSEEVNSEQVSVSDQLQEQVRRALEDAFAEYRSAPISLRPCLPRLPMHRRNISLVSALDNVLKPHWETSVDLCDTHSILYCGAVAVCRVAGVRFPNLHRATQPTNAKPLWQCRIERRINMARTLIAKLLCFQAGNNRPRVVRFVTQAFAGTRVAPVDYVAGVAERIDYWKQKVYAWAKRIRRYKARADRYHVNRTFQTNQRSVYQAWERPQERVTDVHLPNAAVMAEFWRKIWSVPVTHSEGEWFDVVGRSCGPIQEMEPVVISREDLACAVRAAPNWKSPGPDGLHAFWLKRLQGSHSRLATQFQEALQLGSLPSFMTSGVTHLIHKSGSTSEPKNYRPITCLPTVYKLLTSILRIKINNHLKAQHILSPTQNGCKGGSRGTKDLLLIDIAICQQVRRSRKNVSMAWIDYKKAYDSVPHTWLGRVLELYRVHPALCSFLGSCMRQWTTVLRHPGCGGLSGSSDLIKISRGIFQGDSLSPLWFCLALNPLSAILKDSKLGYHLRRESEPISHLLYMDDLKLYASKKTDLMELLKITGNFSNDIGMEFGVDKCAVIHVQRGRVEDSFNLQLSEDISLRPLSEMDSYKYLGMSQALSIADQDMKQSLRDRFFARLIKVLKSLLSGGNRVRAFNGWVMPVLTYSFGILRWTQSELDALDRKVRRLLTAYRMHHPRSSVMRLYIPRKCGGRGFLNAKTLHNREVCNLRQYFLSVSVVMYRDVAAIDRGLTPLSLANGNWRRPQVLSTSDRTAIWKGKELHGRFYRALTGPDVDQLASVTWLRFSNLFGETEGFVFAIMDEVIMTNNYRKYILKDGTVDICRACHRPGESIRHVVSGCSRLANGEYLHRHNQVARIIHQQLALKYGLVDSEVPYYQYQPLPVLESGHITLYWDRSVITDRTIVANKPDIVIIDRSMRRVMLVDVTIPHDENLVKAEKEKLSKYLDLAHEVTAMWNVDSTIIIPMVVSVNGLIAKSFDKHLEKLSLGRWVKGLIQKAVMLDTARIVRRFLSLEP

SEQ ID NO: 27507 - protein, 1096 aa, Phalera bucephala
MAEYPRRNPVRRCRQRIAQGHSARPSPLRGSPNSPQSSENELYFTPPTSGASSDETEPPASSHPLRPERRGRPPLPACIGPAEHCAPPTAPATGGVVRRMRWTSELNMSVMRAYYGATKGETILTAYRPKLLSLFQELHPTVAVTAQRLSDQVRAIQRCKLLDDTVLERLRSETCPARTESDLRSFEEPISLDSFARSEEVNSGQVSVGDQLQEQVRRALKDAFAEYRSAPISLRPCLPHLPMHRHNISLVGALDNVLKSHWETSVDLCDTHSILYCGAMAVCRVAGVRFPNLHRATQPTNAKPFWQCRIERRINMARTLIAKLLCFQAGNNRPRVVRFVAQAFAGTGVAPVDYMARVTERIDYWKQKVYAWANRIRRYRERADRYHVNRTFEVNQRSVYQAWERPQERVTDVHLPDAATMAEFWRKIWSVPVSHSEGEWFDVVGRSCEPIQEMEPVVITRDDVACAVSAAPNWKSPGPDGLHAFWLKRLQGSHARLATQFQEALELGSLPSLLTTGVTHLIHKSGSTLEPKNYRPITCLPTVYKLLTSILRTKINNHLKAQHILSPTQNGCKGGSRGTKDLLLIDMAICQQVRRSRKNVSMAWIDYKKAYDSVPHTWLRRVLELYKVHPALCSFLGLCMGQWTTVLRHPGYGGLSGSSDLIKISRGIFQGDSLSPLWFCLALNPLSAILKNSKLGYHLRRGSEPISHLLYMDDLKLYASKKTDLMELLKITGNFSNDIGMEFGVDKCAVIHVQRGRVEDSFNLQLSEDISLRSLSEMDSYKYLGMSQALSIAEQDMKQSLKDRFFARLMKVLKSLLSGGNRVRAFNGWVMPVLTYSFGILRWTQSELDALDRKVRRLLTAYRMHHPRSSVMRLYIPRRCGGRGFLNAKTLHNREVCNLRQYFLSVSVVMYRDVAAIDRGLTPLSLANGNWRRPQVLSISDRTAIWKGKELHGRFYRALTGPDVDQLASVTWLRFSNLFGETEGFVFAIMDEVIMTNNYRKHILKDGTVDICRACHRPGESIRHVVSGCSRLANGEYLHRHNQVAKIIHQQLALKYDLVDSEVPYYQYQPLPVLESGHITLYWDRSIITDRTIVAN

SEQ ID NO: 27508 - protein, 1209 aa, Phalera bucephala
MAEPSRRNPVRLCRQRDARSPSARPTPLPGSPTSPQPSEDEDFFTPPTSGASSDNAGISASPPTLTSARRGRPPLPARLGPAGHCAPPTAPATGGVVRRMRWTPELNLSVMRAYYGATEGGTILTAYRPKLLSLFQGLHPTVAVTAQRLSDQVRAIQRCKLLDDIVLERLRSETRPARTESDLRSFEEPISLDNFARSEEVNSEQVSVSDQLQEQVRRALEDAFAEYRSAPISLRPCLPCLPMHRRNISLVSALDNVLKPHWETSVDLCDTHSILYCGAVAVCRVAGVRFPNLHRATQPTNTKPFWQCRIERRINMARTLIAKLLCFQAGNNRPRVVRFVTQAFAGTRVAPVDYVAGVAERIDYWKQKVYAWAKRIRRYKARADRYHVNRTFRTNQRSVYQAWERPQERVTDVHLPNAAVMAEFWRKIWSVPVTHSEGEWFDVVGRSCGPIQEMEPVVISREDLACAVRAAPNWKSPGPDGLHAFWLKRLQGSHSRLATQFQEALQLGSLPSFMTSGVTHLIHKSGSTSEPKNYRPITCLPTVYKLLTSILRIKINNHLKAQHILSPTQNGCKGGSRGTKDLLLIDIAICQQVRRSRKNVSMAWIDYKKAYDSVPHTWLGRVLELYRVHPALCSFLGSCMGQWTTVLRHPGCGGLSGSSDLIKISRGIFQGDSLSPLWFCLALNPLSAILKDSKLGYHLRRESEPISHLLYMDDLKLYASKKTDLMELLKITGNFSNDIGMEFGVDKCAVIHVQRGRVEDSFNLQLSEDISLRSLSEMDSYKYLGMSQALSIAEQDMKQSLKDRFFARLIKVLKSLLSGGNKVRAFNGWVMPVLTYSFGILRWTQSELDALDRKVRRLLTAYRMHHPRSSVMRLYIPRKCGGRGFLNAKTLHNREVCNLRQYFLSVSVVMYRDVAAIDRGLTPLSLANGNWRRPQVLSTSDRTAIWKGRELHGRFYRALTGPDVDQLASVTWLRFSNLFGETEGFVFAIMDEVIMTNNYRKHILKDGTVDICRACHRPGESIRHVVSGCSRLANGLSVSKTRTTGHNQVARIIHQQLALKYGLVDSEVPYYQYQPLPVLESGHITLYWDRSVITDRTIVANKPDIVIIDRSMRRVMLVDVTIPHDENLVKAEKEKLSKYLDLAHEVTTMWNVNSTIIIPMVVSVNGLIAKSFDKHLEKLSLGSWVKGLIQKAVMLDTARIVRRFLSLEP

SEQ ID NO: 27509 - protein, 1204 aa, Phalera bucephala
MAEYPRRNPVRRCRQRIAQGHSARPSPLRGSPKSPQSSENELYFTPPTSGASSDETEPPASSHPLRPERRGRPPLPACIGPAEHCAPPTAPATGGVVRRMRWTSELNMSVMRAYYGATKGETILTAYRPKLLSLFQELHPTVAVTAQRLSDQVRAIQRCKLLDDTVLERLRSETCPARTESDLRSFEEPISLDNFARSEEVNSGQVSVGDQIQEQVRRALKDAFAEYRSAPISLRPCLPRLPMHRHNISLVGALDNVLKSHWETSVDLCDTHSILYCGAVAVCRVAGVRFPNLHRATQPTNAKPFWQCRIERRINMARTLIAKLLCFQAGNNRPRVVRFVAQAFAGTGVAPVDYMARVTERIDYWKQKVYAWANRIRRYRERADRYHVNRTFEVNQRSVYQAWERPQERVTDVHLPDAATMAEFWRKIWSVPVSHSEGEWFDVVGRSCEPIQEMEPVVITRDDVACAVRAAPNWKSPGPDGLHAFWLKRLQGSHARLATQFQEALELGSLPSLLTTGVTHLIHKSGSTLEPKNYRPITCLPTVYKLLTSILRTKINNHLKAQHILSPTQNGCKGGSRGTKDLLLIDMAICQQVRRSRKNVSMAWIDYKKAYDSVPHTWLGRVLELYKVHPALCSFLGLCMGQWTTVLRHPGYGGLSGSSDLIKISRGIFQGDSLSPLWFCLALNPLSAILKNSKLGYHLRRGSEPISHLLYMDDLKLYASKKTDLMELLKITGNFSNDIGMEFGVDKCAVIHVQRGRVEDSFNLQLSEDISLRSLSEMDSYKYLGMSQALSIAEQDMKQSLKDRFFARLMKVLKSLLSGGNRVRAFNGWVMPVLTYSFGILRWTQSELDALDRKVRRLLTAYRTHHPRSSVMRLYIPRRCGGRGFLNAKTLHNREVCNLRQYFLSVSVVMYRDVAAIDRGLTPLSLANGNWRRPQVLSISDRTAIWKGKELHGRFYRALTGPDVDQLASVTWLRFSNLFGETEGFVFAIMDEVIMTNNYRKHILKDGTVDICRACHRPGESIRHVVSGCSRLANGEYLHRHNQVAKIIHQQLALKYDLVDSEVPYYQYQPLPVLESGHITFYWDRSIITDRTIVANKPDIVIIDRSMRRVMLVDVTIPHDENLVKAEKEKISKYLDLAHEVTAMWNVDSTIIIPMVVSVNGLIAKSFDKHLEKLSLGSWVKGLIQKVVVLDTARIVRRFLSLEP

SEQ ID NO: 27510 - protein, 1204 aa, Phalera bucephala
MAEPSRRNPVRLCRQRDARSPSARPTPLPGSPASPQPSEDEDFFTPPTSGASSDDTGISATPPTLTSARRGRPPLPARLGPAGHCAPPTAPATGGVVRRMRWTPELNLSVMRAYYGATEGGTILTAYRPKLLSLFQGLHPTVAVTAQRLSDQVRAIQRRKLLDDTVLERLRCEALPARTDFNVRSVEEPISLNNFARSEEVNSEQVSVSDQLQEQVRRALEDAFAEYRSAPISLRPCLPRLPMHRRNISLVSALDNVLKPHWETSVDLCDTHSILYCGAVAVCRVAGVRFPNLHRATQPTNTKPFWQCRIERRINMARTLIAKLLCFQAGNNRPRVMRLVAQAFAGTGVAPVDYVAGVAERIDYWKQKVYAWAKRIRRYKARADRYHVNRTFQTNQRSVYQAWERPQERMTDVHLPNAAVMAEFWRKIWSVPVSHSEGEWFDVVGRSCGPIQEIEPVVISREDLACAVRAAPNWKSPGPDGLHAFWLKRLQGSHSRLATQFQEALQLGSLPSFMTSGVTHLIYKSGSTSEPKNYRPITCLPTVYKLLTSILRIKINNHLKAQHILSPTQNGCKGGSRGTKDLLLIDMAICQQVRRSRKNVSMAWIDYKKAYDSVPHTWLGRVLELYRVHPALCSFLGSCMRQWTTVLRHPGCGGLSGSSDLIKISRGIFQGDSLSPLWFCLALNPLSAILKDSKLGYHLRRESEPISHLLYMDDLKLYASKKTDLMELLKITGNFSNDIGMEFGVDKCAVIHVQRGRVEDSFNLQLSEDISLRSLSEMDSYKYLGMSQALSIAEQDMKQSLKDRFFARLIKVLKSLLSGGNKVRAFNGWVMPVLTYSFGILRWTQSELDALDRKVRRLLTAYRMHHPRSSVMRLNIPRKCGGRGFLNAKTLHNREVCNLRQYFLSVSVVMYRDVAAIDRGLTPLSLANENWRRPQVLSISDRTAIWKGKELHGRFYRALTGPDVDQLASVNWLRFSNLFGETEGFVFAIMDEVIMTNNYRKHILKDGTVDICRACHRPGESIRHVVSGCSRLATGEYLHRHNQVARIIHQQLALKYGLVDSEVPYYQYQPLPVLESGNITLYWDRSIITDRTIVANKPNIVIIDRSMRHVMLVDVTIPHDENLVKAEKEKLSKYLDLAHEVTAMWNVDSTIIIPMVVSVNGLIAKSFDKHLEKLSLGSWVKGLIQKAVMLDTARIVRRFLSLEP

SEQ ID NO: 27511 - protein, 1204 aa, Phalera bucephala
MAEPSRRNPVRLCRQRDARSPSARPTPLPGSPASPQPSEDEDFFTPPTSGASSDDAGISATPPTLTSARRGRPPLPARLGPAGHCAPPTAPATGGVVRRMRWTLELNLSVMRAYYGATEGGTILTAYRPKLLSLFQGLHPTVAFTAQRLSDQVRAIQRCKLLDDTVLERLRREALPARTDFNVRSVEDPISLNNFARSEEVNSEQVSVSDQLQEQVRRALEDAFAEYRSAPISLRPCLPRLPMHRRNISLVSALDNVLKPHWETSVDLCDTHSILYCGAVAVCRVAGVRFPNLHRATQPTNTKPFWQCRIERCINMARTLIAKLLCFQAGNNRPRVMRFVAQAFAGTGVAPVDYVAGVAERIDYWKQKVYAWAKRIRRYKARADRYHVNRTFQTNQRSVYQAWERPQERVTDVHLPNAAVMAEFWRNIWSVPVSHSEGEWFDVVGRSCGPIQEMEPVVISREDLACAVRAAPNWKSPGPDGLHAFWLKRLLGSHSRLATQFQEALQLGSLPSFMTSGVTHLIYKSGSTSEPKNYIPITCLPTVYKLLTSILRIKINNHLKAQHILSPTQNGCKGGSRGTKDLLLIDMAICQQVRRSRKNVSMAWIDYKKAYDSVPHTWLGRVLELYRVHPALCSFLGSCMRQWTTVLRHPGCGGLSGSSDLIKISRGIFQGDSLSPLWFCLALNPLSAILKDSKLGYHLRRESEPISHLLYMDDLKLYASKKTDLMELLKITGNFSNDIGMEFGVDKCAVIHVQRGRVEDSFNLQLSEDISLRSLSEMDSYKYLGMSQALSIAEQDMKQSLKDRFFARLIKVLKSLLSGGNKVRAFNGWVMPVLTYSFGILRWTQSELDALDRKVRRLLTAYRMHHPRSSVMRLYIPRKCGGRGFLNAKTLHNREVCNLRQYFLSVSVVMYRDVAAIDRGLTPLSLANENWRRPQVLSISDRTAIWKGKELHGRFYRALTGPDVDQLASVNWLRFSNLFGETEGFVFAIMDEVIMTNNYRKHILKDGTVDICRACHRPGESIRHVVSGCSRLANGEYLHRHNQVARIIHQQLALKYGLVDSEVPYYQYQPLPVLESGHITLYWDRSIITDRTIVANKPDIVIIDRSMRRVMLVDVTIPHDENLVKAEKEKLSKYLDLAHEVTAMWNVDSTIIIPMVVSVNGLIAKSFDKHLEKLSLGSWVKGLIQKAVMLDTARIVRRFLSLEL

SEQ ID NO: 27512 - protein, 962 aa, Phalera bucephala
MHRRNISLVSALDNVLKPHWETSVDLCDTHSILYCGAVAVCRVAGVRFPNLHRATQPTNAKPLWQCRIERRINMARTLIAKLLCFQAGNNRPRVVRFVTQAFAGTRVAPVDYVAGVAERIDYWKQKVYAWAKRIRRYKARADRYHVNRTFQTNQRSVYQAWERPQERVTDVHLPNAAVMAEFWRKIWSVPVTHSEGEWFDVVGRSCGPIQEMEPVVISREDLACAVRAAPNWKSPGPDGLHAFWLKRLQGSHSRLATQFQEALQLGSLPSFMTSGVTHLIHKSGSTSEPKNYRPITCLPTVYKLLTSILRIKINNHLKAQHILSPTQNGCKGGSRGTKDLLLIDIAICQQVRRSRKNVSMAWIDYKKAYDSVPHTWLGRVLELYRVHPALCSFLGSCMRQWTTVLRHPGCGGLSGSSDLIKISRGIFQGDSLSPLWFCLALNPLSAILKDSKLGYHLRRESEPISHLLYMDDLKLYASKKTDLMELLKITGNFSNDIGMEFGVDKCAVIHVQRGRVEDSFNLQLSEDISLRSLSEMNSYKYLGMSQALSIAEQDMKQSLRDRFFARLIKVLKSLLSGGNRVRAFNGWVMPVLTYSFGILRWTQSELDALDRKVRRLLTAYRMHHPRSSVMRLYIPRKCGGRGFLNAKTLHNREVCNLRQYFLSVSVVMYRDVAAIDRGLTPLSLANGNWRRPQVLSTSDRTAIWKGKELHGRFYRALTGPDVDQLASVTWLRFSNLFGETEGFVFAIMDEVIMTNNYRKYILKDGTVDICRACHRPGESIRHVVSGCSRLANGEYLHRHNQVARIIHQQLALKYGLVDSEVPYYQYQPLPVLESGHITLYWDRSVITDRTIVANKPDIVIIDRSMRRVMLVDVTIPHDENLVKAEKEKLSKYLDLAHEVTAMWNVDSTIIIPMVVSVNGLIAKSFDKHLEKLSLGRWVKGLIQKAVMLDTARIVRRFLSLEP

SEQ ID NO: 27513 - protein, 1203 aa, Clostera curtula
MERRINPRRQCREPYEANARITSAAVSSNRVQSSDEEYFTPPGTASSSEDEPTPSPSLSRRPARRGRPPLPASLGSTGHRALPKAPATGGVVRRMRWTNNLNESVMRAYYGATDGGTNLTAYRSRLLALFQELHPDVTVTAQRLSDQVRAIQRLNLLEQPVLERLRLETLPPQPVSSVQVTKPTAACLLPPTSVEQLDLGQIEEVSLNDQYNEQLRRILEETIEEYRLIPMTSRPRIPRLPMHKRNMALVSALDSLLMDKLNSVGDLTELHFILYCGAVAVCRVAGVTFPKNSTASRHPECKPAWQYRIEKRITAARTLIAKLYCFMTGNTRPRVMRYVIQAFAGTGVRQCDYAACVTERIDYFKQKVYAWAKRIRRYRERADRFNQNRLFQNDQKIIYRNWERPQPPTADLSTPDADTMLAFWRNIWSRPVDHLEGQWIGVVGRACEQITQMEPVHIELDDVISAIRSAPNWKSPGPDGLHNFWIKKVCSCHARLATLFQAALEAGSLPDFMTTGVTHLIHKSGRISEPTNYRPITCLPTIYKLLTSIIKFKIVNHILANNILASNQNGCNAGSRGTKDLLLIDMAICQQVRRSKKNISMAWIDYKKAYDSVPHSWLMRVLDLYKVDANLCLFLSSCMRQWSTVLYHPGHRHFFEASERIWIKRGIFQGDSLSPLWFCLALNPLSILLNDSMPGYRLHRGGKTISHLLYMDDLKLYAPKQSDLMALLKVTETFSSAISMEFGVDKCAVINVQKGRVVNSENLQLSENVILRSLCESDTYKYLGMSEALGIADSDVKQQLKTRFLGRLTKVLKSLLSGGNKVRAFNCWVIPVIAYSFGILRWTQSELDALDRMVRRQLTAFRMHHPRSSVMRLYIPRRCGGRGFLNVKSLHNREVCNLRDYFLRVDDEMHRDVVKVDSGLTALSMAKQNWRRPQVLSISERKAIWKGKELHGRFYSALTGPEIDQLASVSWLRFGNLFGETEGFVFAIMDEVVKTNNYRKYIIKDGTVDICRACHCPGESIRHVVSGCSRLANGEYLHRHNQVAGIIHQQLALRYGIVESEVPYYQYKPEPVLSNNHVTLYWDRSIVTDRTIMANKPDIVVIDRSTRRAMLIDITIPHDVNLVKAEHEKISKYLDLSHEVGAMWNMDSTIIVPIVISVHGLMAKSFDQHLQKLSLGSWVKSLIQKAVLLDTARIVRRFLTLDP

SEQ ID NO: 27514 - protein, 1204 aa, Phalera bucephala
MAEPSRRNPVRLCRQRDARSPSARPTPLPGSPTSPQPSEDEDFFTPPTSGASSDDAGISASPPTLTSARRGRPPLPARLGPAGHCAPPTAPATGGVVRRMRWTPELNLSVMRAYYGATEGGTILTAYRPKLLSLFRGLHPTVAVTPQRLSDQVRAIQRCKLLDDTVLERLHREALPARTESNVRSVEDPISLNNFARSEEVNSEQVSVSDQLQEQVRRALEDAFAEYRSAPISLRPCLPRLPMHRRNISLVSALDNVLKPHWETSVDLCDTHSILYCGAVAVCRVAGVRFPNLHRATQPTNAKPLWQCRIERRINMARTLIAKLLCFQAGNNRPRVVRFVTQAFAGTRVAPVDYVAGVAERIDYWKQKVYAWAKRIRRYKARADRYHVNRTFQTNQRSVYQAWERPQERVTDVHLPNAAVMAEFWRKIWSVPVTHSEGEWFDVVGRSCGPIQEMEPVVISREDLACAVRAAPNWKSPGPDGLHAFWLKRLQGSHSRLATQFQEALQLGSLPSFMTSGVTHLIHKSGSTSEPKNYRPITCLPTVYKLLTSILRIKINNHLKAQHILSPTQNGCKGGSRGTKDLLLIDIAICQQVRRSRKNVSMAWIDYKKAYDSVPHTWLGRVLELYRVHPALCSFLGSCMRQWTTVLRHPGCGGLSGSSDLIKISRGIFQGDSLSPLWFCLALNPLSAILKDSKLGYHLRRESEPISHLLYMDDLKLYASKKTDLMELLKITGNFSNDIGMEFGVDKCAVIHVQRGRVEDSFNLQLSEDISLRSLSKMDSYKYLGMSQALSIAEQDMKQSLRDRFFARLIKVLKSLLSGGNRVRAFNGWVIPVLTYSFGILRWTQSELDALDRKVRRLLTAYRMHHPRSSVMRLYIPRKCGGRGFLNAKTLHNREVCNLRQYFLSVSVVMYRDVAAIDRGLTPLSLANGNWRRPQVLSTSDRTAIWKGKELHGRFYRALTGPDVDQLASVTWLRFSNLFGETEGFVFAIMDEVIITNNYRKYILKDGTVDICRACHRPGESIRHVVSGCSRLANGEYLHRHNQVARIIHQQLALKYGLVDSEVPYYQYQPLPVLESDHITLYWDRSVITDRTIVANKPDIVIIDRSMRRVMLVDVTIPHDENLVKAEKEKLSKYLDLAHEVTAMWNVDSTIIIPMVVSVNGLIAKSFDKHLEKLSLGSWVKGLIQKAVMLDTARIVRRFLSLEP

SEQ ID NO: 27515 - protein, 1204 aa, Phalera bucephala
MAEPSRRNPVRLCRQRDARSPSARPTPLPGSPASPQPSEDEDFFTPPTSGASSDDAGISATPPTLTSARRGRPPLPARLGPAGHCAPPTAPATGGVVRRMRWTPELNLSVMWAYYGATEGGTILTAYRPKLLSLFQGLHPTVAVTAQRLSDQVRAIQRCKLLDDTVLERLRREALPARTDSNVRGVEEPISLNNFARSEEVNSEQVSVSDQLQEQVRRALEDAFAEYRSAPISLRPCLPRLPMHRRNISLVSALDNVLKPHWETSVDLCDTHSILYCGAVAVCRVAGVRFPNLHRATQPTNTKPFWQCRIERRINMARTLIAKLLCFQAGNNRPRVVRFVAQAFAGTGVAPVDYVAGVAERIDYWKQKVYAWAKRIRRYKARADRYHVNRTFQTNQRSVYQAWERPQERVSGVHLPNAAVMAEFWRKIWSVPVSHSEGEWFDVVGRSCGPIQEMEPVVISREDLACAVRAAPNWKSPGPDGLHAFWLKRLQGSHSRLATQFQEALQLGSLPSFMTSGVTHLIYKSGSTSEPKNYRPITCLPTVYKLLTSILRIKINNHLKAQHILSPTQNGCKGGSRGTKDLLLIDMAICQQVRRSRKNVSMAWIDYKKAYDSVPHTWLGRVLELYRVHPALCSFLGSCMGQWTTVLRHPGCGGLSGSSDLIKISRGIFQGDSLSPLWFCLALNPLSAILKDSKLGYHLRRESEPISHLLYMDDLKLYASKKTDLMELLKITGNFSNDIGMEFGVDKCAVIHVQRGRVEDSFNLQLSEDISLRSLSEMDSYKYLGMSQALSIAEQDMKQSLKDRFFARLIKVLKSLLSGGNKVRAFNGWVMPVLTYSFGILRWTQSELDALDRKVRRLLTAYLMHHPRSSVMRLYIPRKCGGRGFLNAKTLHNREVCNLRQYFLSVSVVMYRDVAAIDRGLTPLSLANENWRRPQVLSISDRTAIWKGKELHGRFYRALTGPDVDQLASVNWLRFSNLFGETEGFVFAIMDEVIMTNNYRKHILKDGTVDICRACHRPGESIRHVVSGCSRLANGEYLHRHNQVARIIHQQLALKYGLVDSEVPYYQYQPLPVLESGHITLYWDRSIITDRTIVANKPDIVIIDRSMRRVMLVDVTIPHDENLVKAEKEKLSKYLDLAHEVTAMWNVDSTIIIPMVVSVNGLIAKSFDKHLEKLSLGSWVKGLIQKAVMLDTARIVRRFLSLEP

SEQ ID NO: 27516 - protein, 891 aa, Phalera bucephala
MARTLIAKLLCFQAGNNRPRVMRFVAQAFAGTGVAPVDYVAGVAERIDYWKQKVYAWAKRIRRYKARADRYHVNRTFQTNQRSVYQAWERPQERVTDVHLPNAAVMAEFWRKIWSVPVSHSEGEWFDVVGRSCGPIHEMEPVVISREDLACAVRAAPNWKSPGPNGLHAFWLKRLQGSHSRLATQFQEALQLGSLPSFMTSGVTHLIYKSGSTSEPKNYRPITCLPTVYKLLTSILRIKINNHLKAQHILSPTQNGCKGGSRGTKDLLLIDMAICQQVRRSRKNVSMAWIDYKKAYDSVPHTWLGRVLELYRVQPALCSFLGSCMGQWTTVLRHPGCGGLSGSSDLIKISRGIFQGDSLSPLWFCLALNPLSAILKDSKLGYHLRRESEPISHLLYMDDLKLYASKKTDLMELLKITGNFSNDIGMEFGVDKCAVIHVQRGRVEDSFNLQLSEDISLRSLFEMDSYKYLGMSQALSIAEQDMKQSLRDRFFARLIKVLKSLLSGANRVRAFNGWVMPVLTYSFGILRWTQSELDALDRKVRRLLTAYRMHHPRSSVMRLYIPRKCGGRGFLNAKTLHNREVCNLRHYFLSVSVVMYRDVAAIDRGLTPLSLANENWRRPQVLSISDRTAIWKGKELHGRFYRALTGPDVDQLASVNWLRFSNLFGETEGFVFAIMDEVIMTNNYRKHILKDGTVDICRACHRPGESIRHVVSGCSRLANGEYLHRHNQVARIIHQQLALKYGLVDSEVPYYQYQYQPLPVLESGHITLYWDRSIITDRTIVANKPDIVIIDRSMRRVMLVDVTIPHDENLVKAEKEKLSKYLDLAHEVTAMWNVDSTIIISMVVSVNGLIAKSFDKHLEKLSLGSWVKGLIQKAVMLDTARIVRRFLSLEP

SEQ ID NO: 27517 - protein, 1204 aa, Phalera bucephala
MAEYPRRNPVRRCRQRIAQGHSARPSPLRGSPNSPQSSENELYFTPPTSGASSDETEPPASSHPLRPERRGRPPLPACIGPAEHCAPPTAPATGGVVRRMRWTSELNMSVMRAYYGATKGETILTAYRPKLLSLFQELHPTVAVTAQRLSDQVRAIQRCKLLDDTVLERLRSETCPARTESDLRSFEEPISLDNFARSEEVNSGQVSVGDQLQEQVRRALKDAFAEYRSAPISLRPCLPRLPMHRHNISLVGALDNVLKSHWETSVDLCDTHSILYCGAVAVCRVAGVRFPNLHRATQPTNAKPFWQCRIERRINMARTLIAKLLCFQAGNNRPRVVRFVAQAFAGTGVAPVDYMARVTERIDYWKQKVYAWANRIRRYRERAGRYHVNRTFEVNQRSVYQAWERPQERVTDVHLPDAATMAEFWRKIWSVPVSHSEGEWFDVVGRSCEPIQEMEPVVITRDDVACAVRAAPNWKSPGPDGLHAFWLKRLQGSHARLATQFQEALELGSLPSLLTTGVTHLIHKSGSTLEPKNYRPITCLPTVYKLLTSILRTKINNHLKAQHILSPTQNGCKGGSRGTKDLLLIDMAICQQVRRSRKNVSMAWIDYKKAYDSVPHAWLRRVLELYKVHPALCSFLGLCMGQWTTVLRHPGYGGLSGSSDLIKISRGIFQGDSLSPLWFCLALNPLSAILKNSKLGYHLRRGSEPISHLLYMDDLKLYASKKTDLMELLKITGNFSNDIGMEFGVDKCAVIHVQRGRVEDSFNLQLSEDISLRSLSEMDSYKYLGMSQALSIAEQDMKQSLKDQFFARLMKVLKSLLSGGNRVRAFNGWVMPVLTYSFGILRWTQSELDALDRKVRRLLTAYRMHHPRSSVMRLYIPRRCGGRGFLNAKTLHNREVCNLRQYFLSVSVVMYRDVAAIDRGLTPLSLANGNWRRPQVLSISDRTAIWKGKELHGRFYRALTGPDVDQLASVTWLRFSNLFGETEGFVFAIMDEVIMTNNYRKHILKDGTVDICRACHRPGESIRHVVSGCSRLANGEYLHRHNQVAKIIHQQLALKYDLVDSEVPYYQYQPLPVLESGHITLYWDRSIITDRTIVANKPDIVIIDRSMRRVVLVDVTIPHDENLVKAEKEKISKYLDLAHEVTAMWNVDSTIIIPMVVSVNGLIAKSFDKHLEKLSLGSWVKGLIQKVVVLDTARIVRRFLSLEP

SEQ ID NO: 27518 - protein, 1203 aa, Phalera bucephala
MAEPSRRNLVRLCRQRDARSPSARPTPLPGSPTSPQPSEDEDFCTPPTSGASSDDAGISASPPTSTSARRGRPPLPARLGPAGHCAPPTAPATGGVVRRMRWTPELNQSVMRAYYGATEGGTILTAYRPKLLSLFQGLHPTVAVTAQRLSDQVRAIQRCKLLDDTVLERLHREAPARTESNVRSVEEPISLNNFARSEEVNSEQVSVSDQLQEQVRRALEDAFAEYRSAPISLRPCLPRLPMHRRNISLVSALDNVLKPHWETSVDLCDTHSILYCGAVAVCRVAGVRFPNLHRATQPTNTKPFWQCRIERRINMARTLIAKLLCFQVGNNRPRVMRFVAQAFAGTGVASVDYVAEVAERIDYWKQKVYAWAKRIRRYKARADRYHVNRTFQTNQRSVYQAWERPQERVTDVHLPNAAVMAEFWRKIWSVPVSHSEGEWFDVVGRSCEPIQEMEPVVISREDLACAVRAAPNWKSPGPDGLHAFWLKRLQGSHSRLVTQFQEALQLGSLPSFMTSGVTHLIYKSGSTSEPKNYRPITCLPTVYKLLTSILRIKINNHLKAQHILSPTQNGCKGGSRGTKDLLLIDMAICQQVRRSRKNVSMAWIDYKKAYDSVPHTWLGRVPELYRVHPALCSFLGSCMGQWTTVLRHPGCGGLSGSSDLIKISRGIFQGDSLSPLWFCLALNPLSAILKDSKLGYHLRRESEPISHLLYMDDLKLYASKKTDLMELLKITGNFSNDIGMEFGVDKCAVIHVQRGRVEDSFNLQLSEDISLRSLSEMDSYKYLGMSQALSIAEQDMKQSLKDRFFARLIKVLKSLLSGGNKVRAFNGWVMPVLTYSFGILRWTQSELDALDRKVRRLLTAYRMHHPRSSVMRLYIPRKCGGRGFLNAKTLHNREVCNLRQYFLSVSVVMYRDVAAIDRGLTPLSLANENWRRPQVLSISDRTAIWKGKELHGRFYRALTGPDVDQLASVNWLRFSNLFGETEGFVFAIMDEVIMTNNYRKHILKDGTVDICRACHRPGESIRHVVSGCSRLANGEYLHRHNQVARIIHQQLALKYGLVDSEVPYYQYQPLPVLESGHITLYWDRSIITDRTIVANKPDIVIIDRSMRRVMLVDVTIPHDENLVKAEKEKLSKYLDLAHEVTAMWNVDSTIIIPMVVSVNGLIAKSFDKLLEKLSLGSWVKGLIQKAVMLDTARIVRRFLSLEP

SEQ ID NO: 27519 - protein, 1204 aa, Phalera bucephala
MAEYPRRNPVRRCRQRIAQGHSARPSPLRGSPNSPQSSENELYFTPPTSGASSDETEPPASSHPLRPERRGRPPLPACIGPAEHCAPPTAPATGGVVRRMRWTSELNMSVMRAYYGATKGETILTAYRPKLLSLFQELHPTVAVTAQRLSDQVRAIQRCKLLDDTVLERLRSETCPARTESDLRSFEEPISLDNFARSEEVNSGQVSVGDQLQEQVRRALKDAFAEYRSAPISLRPCLPRLPMHRHNISLVGALDSVLKSHWETSVDLCDTHSILYCGAVAVCRVAGVRFPNLHRATQPTNAKPFWQCRIERRINMARTLIAKLLCFQAGNNRPRVVRFVAQAFAGTGVAPVDYMARVTERIDYWKQKVYAWANRIRRYRERADRYHVNRTFEVNQRSVYQAWERPQERVTDVHLPDAATMAEFWRKIWSVPVSHSEGEWFDVVGRSCEPIQEMEPVVITRDDVACAVRAAPNWKSPGPDGLHAFWLKRLQGSHARLATQFQEALELGSLPSLLTTGVTHLIHKSGSTLEPKNYRPITCLPTVYKLLTSILRTKINNHLKAQHILSPTQNGCKGGSRGTKDLLLIDMAICQQVRRSRKNVSMAWIDYKKAYDSVPHTWLRRVLELYKVHPALCSFLGLCMGQWTTVLRHPGYGGLSGSSDLIKISRGIFQGDSLSPLWFCLALNPLSAILKNSKLGYHLRRGSEPISHLLYMDDLKLYASKKTDLMELLKITGNFSNDIGMEFGVDKCAVIHVQRGRVEDSFNLQLSEDISLRSLSEMDSYKYLGMSQALSIAEQDMKQSLKDRFFARLMKVLKSLLSGGNRVRAFNGWVMPVLTYSFGILRWTQSELDALDRKVRRLLTAYRMHHPRSSVMRLYIPRRCGGRGFLNAKTLHNREVCNLRQYFLSVSVVMYRDVAAIDRGLTPLSLANGNWRRPQVLSISDRTAIWKGKELHGRFYRALTGPDVDQLASVTWLRFSNLFGETEGFVFAIMDEVIMTNNYRKHILKDGTVDICRACHRPGESIRHVVSGCSRLANGEYLHRHNQVAKIIHQQLALKYDLVDSEVPYYQYQPLPVLESGHITLYWDRSIITDRTIVANKPDIVIIDRSMRRVMLVDVTIPHDENLVKAEKEKMSKYLDLAHEVTAMWNVDSTFIIPMVVSVNGLIAKSFDKHLEKLSLGSWVKGLIQKVVVLDTARIVRRFLSLEP

SEQ ID NO: 27520 - protein, 1197 aa, Bombyx mori
MSTTTALRKNPSRQCRQVTCGAQRTSPCIPSCSSDGSPSPTRIESLSSDETQPSPAPPRPVRRGRPPLARLGSTRRNAPSTVPATSGVVRSRMRWNENINMNVMRAYYEATEGETNLSAYRSKMFSVFQTLCPTVNVSTQRLSDQVRAIQRLRLLDQSLLDRLRYEALPVPIEPQENQVVTDTVAPIIQHDEEIQEQVCASNQDYERLSSALEDSIQEYRLVSACSRPRLPRLPMHRRNVSLVGALDSILKPYLESSTDLIDTHSLLYCGAVAVCRVAEVKSPNLTQTAYRPPTKPQWQCRIEKRIDRARILIAKLMCFQKGNTRPRVMCFVDQAFAGTGISSNEYMTCIIERIDFWKQKVYAWASRIRRYRLRSERYHLNRVFQRDQRSVYRNWESSQSQVTDEPYNVNEEDMSTFWNNIWSIPIGHSEGEWIQTVRRECESYKEMDSITISAVDVSRAVRSMPNWKSPGPDGLHSYWIKWIRSSHERLAAQFQQALELGSLPDFMTSGITYLIYKSGNTSDPKNYRPITCLPTIYKLLTSILRIKIQNHIFNNNILSPNQNGCKAGSRGTKDLLLIDMTITQQVRRSKRNVHMAWIDYKKAYDSVPHTWLMRVLELYKINPILCSFLSSCMGQWSTFLSQPGQMTSSAAPNLIRIKRGIFQGDSLSPLWFCLALNPLSTLLKDSTLGYRLRRGAEAISHLLFMDDLKLFASKKPDLMSLLKITDNFSKAIGMEFGVDKCAFIDVQRGKVVSSDCLLLNHSVVLKSLCESETYKYLGMFEVLNIVDADMKQSFRDRFFGRLIKVLKSHLSGGNKIRAFNGWVMPMLTYSFGILRWTQSELDVLDRKVRRLLTAYRMHHPRSSVMRLYIPRKCGGRGILNAKDLHNREIYNLREYFLKMNVNMYRDVVAVDKGLTPLSLANGNWKRLKVESISDRITVWRSKELHGRFYRALTGPDVDQLASVAWLRFSNLFGETEGFIFAIMDEVIMTNNYRKYILKDGTVDICRACHRPGESIRHIVSGCSRFANGEYLHRHNQVARIIHQQLALKYGYLDSAVPYYQYQPQPVLDNGHVTLYWDRSIITDRYIVANKPDIVIIDRSARRAVLVDVTIPHDENLVKAEKDKLIKYLDLAHETTAMWHVDSTIIVPIVVSVHGLIAKSFDQHLKKLSLSSWVKGLIQKAVILDTARIVRRFLNLES

SEQ ID NO: 27521 - protein, 962 aa, Phalera bucephala
MHRRNISLVSALDNVLKPHWETSVDLCDTHSILYCGAVAVCRVAGVRFPNLHRATQPTNAKPLWQCRIERRINMARTLIAKLLCFQAGNNRPRVVRSVTQAFAGTRVAPVDYVAGVAERIDYWKQKVYAWAKRIRRYKARADRYHVNRTFQTNQRSVYQAWERPQERVTDVHLPNAAVMAEFWRKIWSVPVTHSEGEWFDVVGRSCGPIQEMEPVVISREDLACAVRAAPNWKSPGPDGLHAFWLKRLQGSHSRLATQFQEALQLGSLPSFMTSGVTHLIHKSGSTSEPKNYRPITCLPTVYKLLTSILRIKINNHLKAQHILSPTQNGCKGGSRGTKDLPLIDIAICQQVRRSRKNVSMAWIDYKKAYDSVPHTWLGRVLELYRVHPALCSFLGSCMRQWTTVLRHPGCGGLSGSSDLIKISRGIFQGDSLSPLWFCLALNPLSAILKDSKLGYHLRRESEPISHLLYMDDLKLYASKKTDLMELLKITGNFSNDIGMEFGVDKCAVIHVQRGRVEDSFNLQLSEDISLRSLSEMDSYKYLGMSQALSIAEQDMKQSLRDRFFARLIKVLKSLLSGGNRVRAFNGWVMPVLTYSFGILRWTQSELDALDRKVRRLLTAYRMHHPRSSVMRWYIPRKCGGRGFLNAKTLHNREVCNLRQYFLSVSVVMYRDVAAIDRGLTPLSLANGNWRRPQVLSTSDRTAIWKGKELHGRFYRALTGPDVDKLASVTWLRFSNLFGETEGFVFAIMDEVIMTNNYRKYILKDGTVDICRACHRPGESIRHVVSGCSRLANGEYLHRHNQVARIIHQQLALKYGLVDSEVPYYQYQPLPVLESGHITLYWDRSVITDRTIVANKPDIVIIDRSMRRVMLVDVTIPHDENLVKAEKEKLSKYLDLAHEVTAMWNVDSTIIIPMVVSVNGLIAKSFDKHLEKLSLGSWVKGLIQKAVMLETARIVRRFLSLEP

SEQ ID NO: 27522 - protein, 1204 aa, Phalera bucephala
MAEPSRRNPVRLCRQRDARSPSARPTPLPGSPASPQPSEDEDFFTPPTSGASSDDAGISATPPTLTSARRGRPPLLARLGPAGHCAPPTAPATGGVVRRMRWTPELNLSVMRAYYGATEGGTILTAYCPKLLSLFQGLHPTVAVTAQRLSDQVRAIQRCKLLDDTVLERLRREALPARTDSNVRSVEEPISLNNFARSEEVNSEQVSVSDQLQEQVRRALEDAFAEYRPAPISLRPCLPRLPMHRRNISLVSALDNVLKPHWETSVDLCDTHSILYCGAVAVCRVAGVRFPNLHRATQPTNTKPFWQCRIERRINMARTLIAKLLCFQAGNNRPRVMRFVAQAFAGTGVAPVDYVAGVAERIDYWKQKVYAWAKRIRRYKARVDRYHVNRTFQTNQRSVYQAWERPQERVTDVHLPNAAVMAEFWRKIWSVPVSHSEGEWFDVVGRSCGPIQEMEPVVISREDLACAVRAAPNWKSPGPDGLHAFWLKRLQGSHSRLATQFQEALQLGSLPSFMTSGVTHLIYKSGSTSEPKNYRPITCLPTVYKLLTSILRIKINNHLKAQHILSPTQNGCKGGSRGTKDLLLIDMAICQQVRRSRKNVSMAWIDYKKAYDSVPHTWLGRVLELYRVHPALCSFLGSCMRQWTTVLRHPGCGGLSGSSDLIKISRGIFQGDSLSPLWFCLALNPLSAILKDSKLGYHLRRESEPISHLLYMDDLKLYASKKTALMELLKITGNFSNDIGMEFGVDKCAVIHVQRGRVEDSFNLQLSEDISLRSLSEMDSYKYLGMSQALSIAEQDMKQSLKDRFFARLIKVLKSLLSGGNKVRTFNGWVMPVLTYSFGILRWTQSELDALDRKVRRLLTAYRMHHPRSSVMRLYIPRKCGGRGFLNAKTLHNREVCNLRQYFLSVSVVMYRDVAAIDRGLTPLSLANENWRRPQVLSISDRTAIWKGKELHGRFYRALTGPDVDQLASVNWLRFSNLFGETEGFVFAIMDEVIMTNNYRKHILKDGTVDICRACHRPGESIRHVVSSCSRLANGEYLHRHNQVARITHQQLAPKYGLVDSEVPYYQYQPLPVPESGHITLYWDRSIITDRTIVANKPDIVIIDRSMRRVMLVDVTIPHDENLVKAEKEKLSKYLDLAHEVTAMWNVDSTIIIPMVVSVNGLIAKSFDNHLEKLSLGSWVKGLIQKAVMLDTARIVRRFLSLEP

SEQ ID NO: 27523 - protein, 1204 aa, Phalera bucephala
MAEYPRRNPVRRCRQRIAQGHSARPSPLRGSPNSPQSSENELYFTPPTSGASSDETEPPASSHPLRPERRGRPPLPACIGPAEHCAPPTAPATGGVVRRMRWTSELNMSVMRAYYGATKGETILTAYRPKLLSLFQELHPTVAVTAQRLSDQVRAIQRCKLLDDTVLERLRSETCPARTESDLRSFEEPISLDNFARSEEVNSGQVSVGDQLQEQVRRALKDAFAEYRSAPISLRPCLPRLPMHRHNISLVGALDNVLKSHWETSVDLCDTHSILYCGAVAVCRVAGVRFPNLHRATQPTNAKPFWQCRIERRINMARTLIAKLLCFQAGNNRPRVVRFVAQAFAGTGVAPVDYMARVTERIDYWKQKVYAWANRIRRYRERADRYHVNRTFEVNQRSVYQAWERPQERVTDVHLPDAATMAEFWRKIWSVPVSHSEGEWFDVVGRSCEPIQEMEPVVITRDDVACAVRAAPNWKSPGPDGLHAFWLKRLQGSHARLATQFQEALELGSLPSLLTTGVTHLIHKSGSTLEPKNYRPITCLPTVYKLLTSILRTKINNHLKAQHILSPTQNGCKGGSRGTKDLLLIDMAICQQVRRSRKNVSMAWIDYKKAYDSVPHAWLRRVLELYKVHPALCSFLGLCMGQWTTVLRHPGYGGLSGSSDLIKISRGIFQGDSLSPLWFCLALNPLSAILKNSKLGYHLRRGSEPISHLLYMDDLKLYASKKTDLMELLKITGNFSNDIGMEFGVDKCAVIHVQRGRVEDSFNLQLSEDISLRSLSEMDSYKYLGMSQALSIAEQDMKQSLKDRFFARLMKVLKSLLSGGNRVRAFNGWVMPVLTYSFGILRWTQSELDALDRKVRRLLTAYRMHHPRSSVMRLYIPRRCGGRGFLNAKTLHNREVCNLRQYFLSVSVVMYRDVAAIDRGLTPLSLANGNWRRPQVLSISDRTAIWKGKELHGRFYRALTGPDVDQLASVTWLRFSNLFGETEGFVFAIMDEVIMTNNYRKHILKDGTVDICRACHRPGESIRHVVSGFSRLANGEYLHRHNQVAKIIHQQLALKYDLVDSEVPYYQYQPLPVLESGHITLYWDRSIITDRTIVANKPDIVIIDRSMRRVMLVDVTIPHDENLVKAEKEKISKYLDLAHEVTAMWNVDSTIIIPMVVSVNGLIAKSFDKHLEKLSLGSWVKGLIQKVVVLDTARIVRRFLSLEP

SEQ ID NO: 27524 - protein, 1205 aa, Phalera bucephala
MAEPSRRNPVRLCRQRDARSPSARPTPLPGSPTSPQPSEDEDFFTPPTSGASSDDAGISASPPTLTSARRGRPPLPARLGPAGHCAPPTAPATGGVVRRMRWTPELNLSVMRAYYGATEGGTILTAYRPKLLSLFQGLHPTVAVTAQRLSDQVRAIQRCKLLDDTVLERLHREALPARTESNVRSVEDPISLNNFARSEEVNSEQVSVSDQLQEQVRRALEDAFAEYRSAPISLRPCLPRLPMHRRNISLVSALDNVLKPHWETSVDLCDTHSILYCGAVAVCRVAGVRFPNLHRATQPTNAKPLWQCRIERRINMARTLIAKLLCFQAGNNRPRVVRFVTQAFACTRVAPVDYVAGVAERIDYWKQKVYAWAKRIRRYKARADRYHVNRTFQTNQRSVYQAWERPQERVTDVHLPNAAVMAEFWRKIWSVPVTHSEGEWFDVVGRSCGPIQEMEPVVISREDLACAVRAAPNWKSPGPDGLHAFWLKRLQGSHSRLATQFQEALQLGSLPSFMTSGVTHLIHKSGSTSEPKNYRPITCLPTVYPPDLTSILRIKINNHLKAQNILSPTQNGCKGGSRGTKDLLLIDIAICQQVRRSRKNVSMAWIDYKKAYDSVPHTWLGRVLELYRVHPALCSFLGSCMRQWTTVLRHPGCGGLSGSSDLIKISRGIFQGDSLSPLWFCLALNPLSAILKDSKLGYHLRRESEPISHLLYMDDLKLYASKKTDLMELLKITGNFSNDIGMEYGVDKCAVIHVQRGRVEDSFNLQLSEDISLRSLSEMDSYKYLGMSQALSIAEQDMKQSLRDRFFARLIKVLKSLLSGGNRVRAFNGWVMPVLTYSFGILRWTQSELDALDRKVRRLLTAYRMHHPRSSVMRLYIPRKCGGRGFLNAKTLHNREVCNLRQYFLSVSVVMYRDVAAIDRGLTPLSLANGNWRRPQVLSTSDRTAIWKGKELHGRFYRALTGPDVDQLASVTWLRFSNLFGETEGFVFAIMDEVIMTNNYRKYILKDGTVYICRACHRPGESIRHVVSGCSRLANGEYLHRHNQVARIIHQQLALKYGLVDSEVPYYQYQPLPVLESGHITLYWDRSVITDRTIVANKPDIVIIDRSMRRVMLVDVTIPHDENLVKAEKEKLSKYLDLAHEVTAMWNVDSTIIIPMVVSVNGLIAKSFDKHLEKLSLGTWVKGLIQKAVMLDTARIVRRFLSLEP

SEQ ID NO: 27525 - protein, 1204 aa, Phalera bucephala
MAEPSRRNPVRLCRQRDARSPSARPTPLPGSPTTPQPSEDEDFFTPPTSGASSDDAGISASPPTSTSARRGRPPLPARLGPAGHCAPPTAPATGGVVRRMRWTTELNLSVMRAYYGATEGGTILTAFRPKLLSLFQGLHPTVAVTAQRLSDQVRAIQRCKLLDDTVLEGLHREALPARTESNVRSVEDPISLNNFARSEEVNSEQVSVSDQLQEQVRRALEDAFAEYRSAPISLRPCLPRLPMHRRNISLVSALDNVLKPHWETSVDLCDTHSILYCGAVAVCRVAGVRFPNLHRATQPTNAKPLWQCRIERRINMARTLIAKLLCFQAGNNRPRVVRFVTQAFAGTRVAPVDYVAGVAERIVYWKQKVYAWAKRIRRYKARADRYHVNRTFQTNQRSVYQAWERPQERVTDVHLPNAAVMAEFWRKIWSVPVTHSEGEWFDVVGRSCGPIQEMEPVVISREDLACAVRAAPNWKSPGPDGLHAFWLKRLQGSHSRLATQFQEALQLGSLPSFMTSGVTHLIHKSGSTSEPKNYRPITCLPTVYKLLTSILRIKINNHLKAQHILSPTQTGCRGGSRGTKDLLLIDIAICQQVRRSRKNVSMAWIDYKKAYDSVPHTWLGRVLELYRVHPALCSFLGSCMRQWTTVLRHPGCGGLSGSSDLIKISRGIFQGDSLSPLWFCLALNPLSAILKDSKLGYHLRRESEPISHLLYMDDLKLYASKKTDLMELLKITGNFSNDIGMEFGVDKCAIIHVQRGRVEDSFNLQLSEDISLRSLSEMDSYKYLGMSQALSIAEQDMKQSLSDRFFARLIKVLKNLLSGGNKVRAFNGWVMPVLTYSFGILRWTQSELDALDRKVRRLLTAYRMHHPRSSVMRLYIPRKCGGRGFLNAKTLHNREVCNLRQYFLSVSVVMYRDVAAIDRGLTPLSLANGNWRRPQVLSTSDRTAIWKGKELHGRFYRALTGPDVDQLASVTWLRFSNLFGETEGFVFAIMDEVIMTNNYRKHILKDGTVDICRACHRPGESIRHVVSGCSRLANGEYLHRHNQVARIIHQQLALKYGLVDSEVPYYQYQPLPVLESGHITLYWDRSVITDRTIVANKPDIVIIDRSMRRVMLVDVTIPHDENLVKAEKEKLSKYLDLAHEVTTMWNVDSTIIIPMVVSVNGLVAKSFDKHLEKLSLGSWVKGLIQKAVMLDTARIVRRFLSLEP

SEQ ID NO: 27526 - protein, 1204 aa, Phalera bucephala
MAEYPRRNPVRRCRQRIAQGHSARPSPLRGSPNSPQSSENELYFTPPTSGASSDETEPPASSHPLRPERRGRPPLPACIGPAEHCAPPTAPATGGVVRRMRWTSELNMSVMRAYYGATKGETILTAYRPKLLSLFQELHPTVAVTAQRLSDQVRAIQRCKLLDDTVLERLRSETCPARTESDLRSFEEPISLDNFARSEEVNSGQVSVGDQLQEQVRRALKDAFAEYRSAPISLRPCLPRLPMHRHNISLVGALDNVLKSHWETSVDLCDTHSILYCGAVAVCRVAGVRFPNLHRATQPTNAKPFWQCRIERRINMARTLIAKLLCFQAGNNRPRVVRFVAQAFAGTGVAPVDYMARVTERIDYWKQKVYAWANRIRRYRERADRYHVNRTFEVNQRSVYQAWERPQERVTDVHLPDAATMAEFWRKIWSVPVSHSEGEWFDVVGRSCEPIQEMEPVVITRDDVACAVRAAPNWKSPGPDGLHAFWLKRLQGSHARLATQFQEALELGSLPSLLTTGVTHLIHKSGSTLEPKNYRPITCLPTVYKLLTSILRTKINNHLKAQHILSPTQNGCKGGSRGTKDLLLIDMAICQQVRRSRKNVSMAWIDYKKAYDSVPHTWLGRVLELYKVHPALCSFLGLCMGQWTTVLRHPGYGGLSGSSDLIKISRGIFQGDSLSPLWFCLALNPLSAILKNSKLGYHLRRGSEPISHLLYMDDLKLYASKKTDLMELLKITGNFSNDIGMEFGVDKCAVIHVQRGRVEDSFNLQLSEDISLRSLSEMDSYKYLGMSQALSIAEQDMKQSLKDRFFARLMKVLKSLLSGGNRVRAFNSWVMPVLTYSFGILRWTQSELDALDRKVRRLLTAYRMHHPRSSVMRLYIPRRCGGRGFLNAKTLHNREVCNLRQYFLSVSVVMYRDVAAIDRGLTPLSLANGNWRRPQVLSISDRTAIWKGKELHGRFYRALTGPDVDQLASVTWLRFSNLFGETEGFVFAIMDEVIMTNNYRKHILKDGTVDICRACHRPGESIRHVVSGCSRLANGEYLHRHNQVAKIIHQQLALKYDLVDSEVPYYQYQPLPVLESGHITLYWDRSIITDRTIVANKPDIVIIDRSMRRVMLVDVTIPHDENLVKAEKEKISKYLDLAHEVTAMWNVDSTIIIPMVVSVNGLIAKSFDKHLEKLSLGSWVKGLIQKVVVLDTARIVRRFLSLEP

SEQ ID NO: 27527 - protein, 1197 aa, Bombyx mori
MSTTTALRKNPSRQCRQVTCGAQRTSPCIPSCSSDGSPSPTRIESLSSDETQPSPAPPRPVRRGRPPLARLGSTRRNAPSTVPATSGVVRSRMRWNENINMNVMRAYYEATEGETNLSAYRSKMFSVFQTLCPTVNVSTQRLSDQVRAIQRLRLLDQSLLDRLRYEALPVPIEPQENQVVTDTVAPIIQHDEEIQEQVCASNQDYERLSSALEDSIQEYRLVSACSRPRLPRLPMHRRNVSLVGALDSILKPYLESSTDLIDTHSLLYCGAVAVCRVAEVKSPNLTQTAYRPPTKPQWQCRIEKRIDRARILIAKLMCFQKGNTRPRVMCFVDQAFAGTGISSNEYMTCIIERIDFWKQKVYAWASRIRRYRLRSERYHLNRVFQRDQRSVYRNWESSQSQVTDEPYNVNEEDMSTFWNNIWSIPIGHSEGEWIQTVRRECESYKEMDSITISAVDVSRAVRSMLNWKSPGPDGLHSYWIKWIRSSHERLAAQFQQALELGSLPDFMTSGITYLIYKSGNTSDPKNYRPITCLPTIYKLLTSILRIKIQNHIFNNNILSPNQNGCKAGSRGTKDLLLIDMTITQQVRRSKRNVHMAWIDYKKAYDSVPHTWLMRVLELYKINPILCSFLSSCMGQWSTFLSQPGQMTSSAAPNLIRIKRGIFQGDSLSPLWFCLALNPLSTLLKDSTLGYRLRRGAEAISHLLFMDDLKLFASKKPDLMSLLKITDNFSKAIGMEFGVDKCAFIDVQRGKVVSSDCLLLNHSVVLKSLCESETYKYLGMFEVLNIVDADMKQSFRDRFFGRLIKVLKSHLSGGNKIRAFNGWVMPMLTYSFGILRWTQSELDVLDRKVRRLLTAYRMHHPRSSVMRLYIPRKCGGRGILNTKDLHNREIYNLREYFLKMNVNMYRDVVAVDKGLTPLSLANGNWKRLKVESISDRITVWRSKELHGRFYRALTGPDVDQLASVAWLRFSNLFGETEGFIFAIMDEVIMTNNYRKYILKDGTVDICRACHRPGESIRHIVSGCSRFANGEYLHRHNQVARIIHQQLALKYGFLDSAVPYYQYQPQPVLDNGHVTLYWDRSIITDRYIVANKPDIVIIDRSARRAVLVDVTIPHDENLVKAEKDKLIKYLDLVHETTAMWHVDSTIIVPIVVSVHGLIAKSFDQHLKKLSLSSWVKGLIQKAVILDTARIVRRFLTLES

SEQ ID NO: 27528 - protein, 1204 aa, Phalera bucephala
MAEYPRRNPVRRCRQRIAQGHSARPSPLRGSPNSPQSSENELYFTPPTSGASSDETEPPASSHPLRPERRGRPPLPACIGPAEHCAPPTAPATGGVVRRMRWTSELNMSVMRAYYGTTKGETILTAYRPKLLSLFQGLHPTVAVTAQRLSDQVRAIQRCKLLDDTVLERLRSETCPARTESDLRSFEEPISLDNFARSEEVNSGQVSVGDQLQEQVRRALKDAFAEYRSAPISLRPCLPRLPMHRHNISLVGALDNVLKSHWETSVDLCDTHSILYCGAVAVCRVAGVRFPNLHRATQPTNAKPFWQCRIERRINMARTLIAELLCFQAGNNRPRVVRFVAQAFAGTGVAPVDCMARVTERIDYWKQKVYAWANRIRRYRERADRYHVNRTFEVNQKSLYQAWERPQERVTDVHLPDAATMAEFWRKIWSVPVSHSEGEWFDVVGRSCEPIQEMEPVVITRDDVACAVRAAPNWKSPGPDGLHAFWLKRLQGSHARLATQFQEALELGSLPSLLTSGVTHLIHKSGSTLEPKNYRPITCLPTVYKLLTSILRTKINNHLKAQHILSPTQNGCKGGSRGTKDLLLIDMAICQQVRRSRKNVSMAWIDYKNAYDSVPHTWLRRVLELYKVHPALCSFLGLCMGQWTTVLRHPGYGGLSGSSNLIKISRGIFQGDSLSPLWFCLALNPLSAILKNSKLGYHLRRGSEPISHLLYMDDLKLYASKKTDLMELLKITGNFSNDIGMEFGVDKCAVIHVQRGRVEDSFNLQLSEDISLRSLSEMDSYKYLGMSQALSIAEQDMKQSLKDRFFARLMKVLKSLLSGGNKVRAFNGWVMPVLTYSFGILRWTQSELDALDRKVRRLLTAYRMHHPRSSVMRLYIPRRCGGRGFLNAKTLHNREVCNLRQYFLSVSVVMYRDVAAIDRGLTPLSLANENWRRPQVLSISDRTAIWKGKELHGRFYRALTGPDVDQLASVTWLRFSNLFGETEGFVFAIMDEVIMTNNYRRHILKDGTVDICRACHRPGESIRHVVSGCSRLANGEYLHRHNQVAKIIHQQLALKYDLVDSEVPYYQYQPLPVLESGHITLYWDRSIITDRTIVANKPDIVIIDRSMRRVMLVDVTIPHDENLVKAEKEKISKYLDLAHEVTAMWNVDSTIIIPMVVSVNGLIAKSFDKHLEKLSLGSWVKGLIQKVVVLDTARIVRRFLSLEP

SEQ ID NO: 27529 - protein, 1204 aa, Phalera bucephala
MAEPSRRNPVRLCRQRDARSPSARPTPLPGSPTSPQPSEDEDFFTPPTSGASSDDAGISASPPTITSARRGRPPLPARLGPAGHCAPPTAPATGGVVRRMRWTPELNLSVMRAYYGATEGGTILTAYRPKLLSLFQGLHPTVAVTAQRLSDQVRAIQRCKLLDDTVLERLHREALPARTESNVRSVEDPISLNNFARSEEVNSEQVSVSDQLQEQVRRALEDAFAEYRSAPISLRPCLPRLPMHRRNISLVSALDNVLKPHWETSVDLCDTHSILYCGAVAVCRVAGVRFPNLHRATQPTNAKPLWQCRIERRINMARTLIAKLLCFQAGNNRPRVVRFVTQAFAGTRVAPVDYVAGVAERIDYWKQKVYAWAKRIRRYKARADRYHVNRTFQTNQRSVYQAWERPQERVTDVHLPNAAVMAEFWRKIWSVPVTHSEGEWFDVVGRSCGPIQEMEPVVISREDLACAVRAAPNWKSPGPDGLHAFWLKRLQGSHSRLATQFQEALQLGSLPSFMTSGVTHLIHKSGSTSEPKNYRPITCLPTVYKLLTSILRIKINNHLKAQHILSPTQNGCKGGSRGTKDLLLIDIAICQQVRRSRKNVSMAWIDYKKAYDSVPHTWLGRVLELYRVHPALCSFLGSCMRQWTTVLRHPGCGGLSGSSDLIKISRGIFQGDSLSPLWFCLALNPLSAILKDSKLGYHLRRESEPISHLLYMDDLKLYASKKTDLMELLKITGNFSNDIGMEFGVDKCAVIHVQRGRVEDSFNLQLSEDISLRSLSEMDSYKYLGMSQALSIAEQDMKQSLRDRFFARLIKVLKSLLSGGNRVRAFNGWVMPVLTYSFGILRWTQSELDALDRKVRRLLTAYRMHHPRSSVMRLYIPRKCGGRGFLNAKTLHNREVCNLRQYFLSVSVVMYRDVAAIDRGLTPLSLANGNWRRPQVLSTSDRTAIWKGKELHGRFYRALTGPDVDQLASVTWLRFSNLFGETEGFVFAIMDEVIMTNNYRKYILKDGTVDICRACHRPGESIRHVVSGCSRLANGEYLHRHNQVARIIHQQLALKYGLVDSEVPYYQYQPLPVLESGHITLYWDRSVITDRTIVANKPDIVIIDRSMRRVMLVDVTIPHDENLVKAEKEKLSKYLDLAHEVTAMWNVDSTIIIPMVVSVNGLIAKSFDKHLEKLSLGSWVKGLIQKAVMLDTARIVRRFLSLEP

SEQ ID NO: 27530 - protein, 1204 aa, Phalera bucephala
MAEPSRRNPVRLCRQRDARSPSARPTPLPGSPTSPQPSEDEDFFTPPTSGASSDDAGISASPPTSTSARRGRPPLPARLGPAGHCAPPTTPATGGVVRRMRWTTELNLSVMRAYYGATEGGTILTAYRPKLLSLFQGLHPTVAVTAQRLSDQVRAIQRCKLLDDTVLERLHREALPARTESNVRSVEDPISLNNFARSEEVNSEQVSVSDQLQEQVRRALEDAFAEYRSAPISLRPCLPRLPMHRRNISLVSALDNVLKPHWETSVDLCDTHSILYCGAVAVCRVAGVRFPNLHRATQPTNAKPLWQCRIERRINMARTLIAKLLCFQAGNNRPRVVRFVTQAFAGTRVAPVDYVAGVAERIDYWKQKVYAWAKRIRRYKARADRYHVNRTFQTNQRSVYQAWERPQERVTDVHLPNAAVMAEFWRKIWSVPVTHSEGEWFDVVGRSCGPIQEMEPVVISREDLACAVRAAPNWKSPGPDGLHAFWLKRLQGSHSRLATQFQEALQLGSLPSFMTSGVTHLIHKSGSTSEPKNYRPITCLPTVYKLLTSILRIKINNHLKAQHILSPTQTGCRGGSRGTKDLLLIDIAICQQVRRSRKNVSMAWIDYKKAYDSVPHTWLGRVLELYRVHPALCSFLGSCMRQWTTVLRHPGCGGLSGSSDLIKISRGIFQGDSLSPLWFCLALNPLSAILKDSKLGYHLRRESEPISYLLYMDDLKLYASKKTDLMELLKITGNLSNDIGMEFGVDKCAIIHVQRGRVEDSFNLQLSEDISLRSLSEMDSYKYLGMSQALSIAEQDMKQSLSDRFFARLIKVLKSLLSGGNKVRAFNGWVMPVLTYSFGILRWTQSELDALDRKVRRLLTAYRMHHPRSSVMRLYIPRKCGGRGFLNAKTLHNREVCNLRQYFLSVSVVMYRDVAAIDRGLTPLSLANRNWRRPQVLSTSDRTAIWKGKELHGRFYRALTGPDVDQLASVTWLRFSNLFGETEGFVFAIMDEVIMTNNYRKHILKDGTVDICRACHRPGESIRHVVSGCSRLANGEYLHRHNQVARIIHQQLALKYGLVDSEVPYYQYQPLPVLESGHITLYWDRSVITDRTIVANKPDIVIIDRSMRRVMLVDVTIPHDENLVKAEKEKLSKYLDLGHEVTTMWNVDSTIIIPMVVSVNGLIAKSFDKHLKKLSLGSWVKGLIQKAVMLDTARIVRRFLSLEP

SEQ ID NO: 27531 - protein, 889 aa, Phalera bucephala
MARTLIAKLLCFQAGNNHPRVMRFVTQAFAGTGVAPVDYVAGVAERIDYWKQKVYAWAKRIRRYKARADRYHVNRTFQTNQRSVYQAWERPQERVTDVHLPNAAVMAEFWRKIWSVPVSHSEGEWFDVVGRSCGPIQEMEPVVISREDLACAARAAPNWKSPGPDGLHTFWPKRLQGSHSRLATQFQEALQLGSLPSFMTSGVTHLIHKSASTSEPKSYRPITCLPTVYKLLTSILRIKINNHLKAQHILSPTQNGCKGGSRGTKDLLLTDMAICQQVRRSRKNVSMAWIDYKKAYDSVPHTRLGRVLELYRVHPALCSFLGSCMRQWTTVLRHPSCGGFSGSSDLIKISRGIFQGDSLSPLWFCLALNPLSAILKDSKLGYHLRRESEPISHLLYMDDLKLYASKKTDLMELLKITGNFSNDIGMEFGVDKCAVIHVQRGRVEDSFNLQLSEDISLRSLSEMDSYKYLGMSQALSIAEQDMKQSLKDRFFARLIKVLKSLLSGGNKVRAFNGWVMPVLTYSFGILRWTQSELDALDRKVRRLLTAYRMHHPRSSVMRLYMPRKCGGRGFLNAKTLHNREVCNLRQYFLSVSVVMYRDVAAIDRGLTPLSLANENWRRPQVLSISDRTAIWKGKELHGRFYRALTGPDVDQLASVNWLRFSNLFGETEGFVFAIMDEVIMTNNYRKHLLKDGTVEICRACHRPGESIRHVVSGCSRLANGEYFHRHNQVARIIHQQLALKYDLVDSEVPYYQYQPLPVLESGHITLYWDRSIITDRTIVANKPDIVIIDRSMRRLMLVDVTIPHDENLVKAEKEKLSKYLDLAHEVTAMWNVDSTIIIPMVVSVNGLIAKSFDKHLEKLSLGSWVKGLIQKAVMLDTARIVRRFLSLEP

SEQ ID NO: 27532 - protein, 1204 aa, Phalera bucephala
MAEPSRRNPVRLCRQRDARSPSARPTPLPGSPTSPQPSEDEDFFTPPTSGASSDDAGISASPPTLTSARRGRPPLPARLGPAGHCAPPTAPATGGVVRRMRWTPELNLSVMRAYYGATEGGTILTAYRPKLLSLFQGLHPTVAITAQRLSDQVRAIQRCKLLDDTVLERLHREALPARTESNVRSVEDPISLNNFARSEEVNSEQVSVSDQLQEQVRRALEDAFAEYRSAPISLRPCLPRLPMHRRNISLVSALDNVLKPHWETSVDLCDTHSILYCGAVAVCRVAGVRFPNLHRATQPTNAKPLWQCRIERRINMARTLIAKLLCFQAGNNRPRVVRFVTQAFAGTGVAPVDYVAGVAERIDYWKQKVYAWAKRIRRYKARADRYHVNRTFQTNQRSVYQAWERPQERVTDVHLPNAAVMAEFWRKIWSVPVSHSEGEWFDVVGRSCGPIQEMEPVVISREDLACAVRAAPNWKRPGPDGLHAFWLKRLQGSHSRLATQFQEALQLGSLPSFMTSGVTHLIHKSGSTSEPKNYRPITCLPTVYKLLTSILRIKINNHLKAQHILSPTQNGCKGGSRGTKDLLLIDIAICQQVRRSRKNVSMAWIDYKKAYDSVPHTWLGRVLELYRVHPALCSFLGSCMRQWTTVLRHPGCGGLSGSSDLIKISRGIVQGDSLSPLWFCLALNPLSAILKDSKLGYHLRRESEPISHLLYMDDLKLYASKKTDLMELLKITGNFSNNIGMEFGVDKCAVIHVQRGRVEDSFNLQLSEDISLRSLSEMDSYKYLGMSQALSIAEQDMKQSLRDRFFARLIKVLKSLLSGGNRVRAFNGWVMPVLTYSFGILRWTQSELDALDRKVRRLLTAYRMHHPRSSVMRLYIPRKCGGRGFLNAKTLHNREVCNLRQYFLSVSVVMYRDVAAIDRGLTPLSLANGNWRRPQVLSTSDRTAIWKGKELHGRFYRALTGPDVDQLASVTWLRFSNLFGETEGFVFAIMDEVIMTNNYRKYILKDGTVDICRTCHRPGESIRHVVSGCSRLANGEYLHRHNQVARIIHQQLALKYGLVDSEVPYYQYQPLPVLESGHITLYWDRSVITDRTIVANKPDIVIIDRSMRRVMLVDVTIPHDENLVKAEKEKLSKYLDLAHEVTAMWNVDSTIIIPVVVSVNGLIAKSFDKHLEKLSLGSWVKGLIQKAVMLDTARIVRRFLSLEP

SEQ ID NO: 27533 - protein, 889 aa, Phalera bucephala
MARTLIAKLLCFQAGNNRPRVVRFVTQAFAGTRVASVDYVAGVAERIHYWKQKVYAWAKRIRRYKARADRYHVNRTFQTNQRSVYQAWERPQERVTDVHLPNAAVMAEFWRKIWSVPVTHSEGEWFDVVGRSCGPIQEMEPVVISREDLACAVRAAPNWKSPGPDGLHAFWLKRLQGSHSRLATQFQEALQLGSLPSFMTSGVTHLIHKSGSTSEPKNYRPITCLPTVYKLLTSILRIKINNHLKAQHILSPTQNGCKGGSRGTKDLLLINIAICQQVRRSRKNVSMAWIHYKKAYDSVPHTWLGRVLELYRVHPALCSFLGSCMRQWSTVLRHPGCGGFSGSSDLIKISRGIFQGDSLSPLWFCLALNPLSAILKDSKLGYHLRRESEPISHLLYMDDLKLYASKKTDLMELLKITGNFSNDIGMEFGVDKCAVIHVQRGRVEDSFNLQLSEDISLRSLSEMDSYKYLGMSQALSIAEQDMKQSLRDRFFARLIKVLKSLLSGGNKVRAFNGWVMPVLTYSFGILRWTQSELDALDRKVRRLLIAYRVHHPRSSVMRLYIPRKCGGRGFLNAKTLHNREVCNLRQYFLSVSVVMYRDVAAIDRGLTPLSLANGNWRRPQVLSTSDRTAIWKGKELHGRFYRTLTGPDVDQLASVTWLRFSNLFGETEGFVFAIMDEVIMTNNYRKHILKDGTVDICRACHRPSESIRHVVSGCFRLASGEDLHRHNQVARIIHQQLALKYGLVDSEVPYYQYQPLPVLESGHITLYWDRSVITDRTIVANKPDIVIIDRSMRRVMLVDVTIPHDENLVKAEKEKLSKYLDLAHEVTAMWNVDSTIIIPMVVSVNGLIAKSFDKHLEKLSLGSWVKGLIQKAVMLDTARIVRRFLSLEP

SEQ ID NO: 27534 - protein, 1163 aa, Phalera bucephala
MAEPSRRNPVRLCRQRDARSPSARPTPLPGSPTSPQPSEDEDFFTPPTSGASSDDAGISASPPTLTSARSGRPPLPARLGPAGHCAPPTAPATGGVVRRMRWTPELNLSVMRAYYGATEGGTILTAYRPKLLSLFQGLHPTVAVTAQRLSDQVRAIQRCKLLDDTVLERLHREALPARTESNVRSVEDPISLNNFARSEEVNSEQASVSDQLQEQVRRALEDAFAEYRSAPISLRPCLPRLPMHRRNISLVSALDNVLKPHWETSVDLCDTHSILYCGAVAVCRVAGVRFPNLHRATQPTNAKPLWQCRIERRINMARTLIAKLLCFQAGNNRPRVVRFVTQAFAGTRVAPVDYVAGVAERIDYWKQKVYAWAKRIRRYKARADRYHVNRTFQTNQRSVYQAWERPQERVTDVHLPNAAVMAEFWRKIWSVPVTHSEGEWFDVVGRSCGSIQEMEPVVISREDLACAVRAAPNWKSPGPDGLHAFWLKRLQGSHSRLATQFQEALQLGSLPSFMTSGVTHLIHKSGSTSEPKNYRPITCLPTVYKLLTSILRIKINNHLKAQHILSPTQNGCKGGSRGTKDLLLIDIAICQQVRRSRKNVSMAWIDYKKAYDSVPHTWLGRVLELYRVHPALCSFLGSCMRQWTTVLRHPGCGGLSGSSDLIKISRGIFQGDSLSPLWFCLALNPFSAILKDSKLGYHLRRESEPISHLLYMDDLKLYASKKTDLMELLKITGNFSNDIGMEFGVDKCAVIHVQRGRVEDSFNLQLSEDISLRSLSEMDSYKYLGMSQALSIAEQDMKQSLRDRFFARLIKVLKSLLSGGNRVRAFNGWVMPVLTYSFGILRWTQSELDALDRKVRRLLTAYRMHHPRSSVMRLYIPRKCGGRGFLNAKTLHNREVFNLRQYFLSVSVVMYRDVAAIDRGLTPLSLANGNWRRPQVLSTSDRTAIWKGKELHGRFYRALTGPDVDQLASVTWLRFSNLFGETEGFVFAIMDEVIMTNNYRKYILKDGTVDICRACHRPGESIRHVVSGCSRLANGEYLHRHNQVARIIHQQLALKYGLVDSEVPYYQYQPLPVLESGHITLYWDRSVITDRTIVANKPDIVIIDRSMRRVMLVDVTIPHDENLVKAEKEKLSKYSDLASWRLPPCGMLIQLSLFRWSFQSTAL

SEQ ID NO: 27535 - protein, 889 aa, Phalera bucephala
MARTLIAKLLCFQAGNNRPRVVRFVAQAFAGTGVAPVDYMARVTERIDYWKQKVYAWANRIRRYRERADRYHVNRTFEVNQRSVYQAWERPQERVTDVHLPDAATMAEFWRKIWSVPVSHSEGEWFDVVGRSCEPIQEMEPVVITRDDVACAVSAAPNWKSPGPDGLHAFWLKRLQGSHARLATQFQEALELGSLPSLLTTGVTHLIHKSGSTLEPKNYRPITCLPTVYKLLTSILRTKINNHLKAQHILSPTQNGCKGGSRGTKDLLLIDMAICQQVRRSRKNVSMAWIDYKKAYDSVPHTWLRRVLELYKVHPALCSFLGLCMGQWTTVLRHPGYGGLSGSSDLIKISRGIFQGDSLSPLWFCLALNPLSAILKNSKLGYHLRRGSEPISHLLYMDDLKLYASKKTDLMELLKITGNFSNDIGMEYGVDKCAVIHVQRGRVEDSFNLQLSEDISLRSLSEMDSYKYLGMSQALSIAEQDMKQSLKDRFFARLMKVLKSLLSGGNRVRAFNGWVMPVLTYSFGILRWTQSELDALDRKVRRLLTAYRMHHPRSSVMRLYIPRRCGGRGFLNAKTLHNREVCNLRQYFLSVSVVMYRDVAAIDRGLTPLSLANGNWRRPQVLSISDRTAIWKGKELHGRFYRALTGPDVDQLASVTWLRFSNLFGETEGFVFAIMDEVIMTNNYRKHILKDGTVDICRACHRPGESIRHVVSGCSRLANGEYLHRHNQVAKIIHQQLALKYDLVDSEVPYYQYQPLPVLESGHITLYWDRSIITDRTIVANKPDIVIIDRSMRRVMLVDVTIPHDENLVKAEKEKISKYLDLAHEVTAMWNVDSTIIIPMVVSVNGLIAKSFDKHLEKLSLGSWVKGLIQKVVVLDTARIVRRFLSLEP

SEQ ID NO: 27536 - protein, 1204 aa, Phalera bucephala
MAEYPRRNPVRRCRQRIAQGHSARPSPLRGSPNSPQSSENELYFTPPTSGASSDETEPPASSHPLRPERRGRPPLPACIGPAEHCAPPTAPATGGVVRRMRWTSELNMSVMRAYYGATKGETILTAYRPKLLSLFQELHPTVAVTAQRLSDQVRAIQRCKLLDDTVLERLRSETCPARTESDLRSFEEPISLDNFARSEEVNSGQVSVGDQLQEQVRRALKDAFAEYRSAPISLRPCLPRLPMHRHNISLVGALDNVLKSHWETSVDLCDTHSILYCGAVAVCRVAGVRFPNLHRATQPTNAKPFWQCRIERRINMARTLIAKLLCFQAGNNRPRVVRFVAQAFAGTGVAPVDYMARVTERIDYWKQKVYAWANRIRRYRERADRYHVNRTFEVNQRSVYQAWERPQERVTDVHLPDAATMAEFWRKIWSVPVSHSEGEWFDVVGRSCEPIQEMEPVVITRDDVACAVRAAPNWKSPGPDGLHAFWLKRLQGSHARLATQFQEALELGSLPSLLTTGVTHLIHKSGSTLEPKNYRPITCLPTVYKLLTSILRTKINNHLKAQHILSPTQNGCKGGSRGTKDLLLIDMAICQQVRRSRKNVSMAWIDYKKAYDSVPHTWLRRVLELYKVHPALCSFLGLCMGQWTTVLRHPGYGGLSGSSDLIKISRGIFQGDSLSPLWFCLALNPLSAILKNSKLGYHLRRGSEPISHLLYMDDLKLYASKKTDLMELLKITGNFSNDIGMEFGVDKCAVIHVQRGRVEDSFNLQLSEDISLRSLSEMDSYKYLGMSQALSIAEQDMKQSLKDRFFARLMKVLKSLLSGGNRVRAFNGWVMPVLTYSFGILRWTQSELDALDRKVRRLLTAYRMHHPRSSVMRLYIPRRCGGRGFLNAKTLHNREVCNLRQYFLSVSVVMYRDVAAIDRGLTPLSLANGNWRRPQVLSISDRTAIWKGKELHGRFYRALTGPDVDQLASVAWLRFSNLFGETEGFVFAIMDEVIMTNNYRKHILKDGTVDICRACHRPGESIRHVVSGCSRLANGEYLHRHNQVAKIIHQQLALKYDLVDSEVPYYQYQPLPVLESGHITLYWDRSIITDRTIVANKPDIVIIDRSMRRVMLVDVTIPHDENLVKAEKEKISKYLDLAHEVTAMWNVDSTIIIPMVVSVNGLIAKSFDKHLEKLSLGSWVKGLIQKVVVLDTARIVRRFLSLEP

SEQ ID NO: 27537 - protein, 1197 aa, Bombyx mori
MSTTTALRKNPSRHCRQVTCGARRTSPCIPSCSSDGSPSPTRIENLSSDETQPSPAPPRPVRRGRPPLARLGSTRRNAPSTVPATSGVVRSRMRWNENINMNVMRAYYEATEGETNLSAYRSKMFSVFQTLCPTVNVSTQRLSDQVRAIQRLRLLDQSLLDRLRYEALPVPIEPQENQVVTDTVAPIIQHDEEIQEQVCASNQDYERLSSALEDSIQEYRLVSSCSRPRLPRLPMHRRNVSLVGALDSILKPYLESSTDLIDTHSLLYCGAVAVCRVAEVKSPNLTQTAYRPPTKPQWQCRIEKRIDRARILIAKLMCFQKGNTRPRVMCFVDQAFAGTGISSNEYMTCIIERIDFWKQKVYAWASRIRRYRLRSERYHLNRVFQRDQRSVYRNWELSQSQVTNDPYNVNEEDMSTFWKNIWSIPIGHSEGEWIQTVRRECESYKEMDPITISAIDVSRAVRSMPNWKSPGPDGLHSYWIKWIRSSHERLAAQFQQALEMGSLPDFMTSGITYLIYKSGNTSDPKNYRPITCLPTIYKLLTSILRIKIQNHIFNNNILSPNQNGCKAGSRGTKDLLLIDMTITQQVRRGKRNVHMAWIDYKKAYDSVPHTWLMRVLELYKINPILCSFLSSCMGQWSTFLSQPGQMTSSAAPNLIRIKRGIFQGDSLSPLWFCLALNPLSTLLKDSTLGYRLRRGAEAISHLLFMDDLKLFASKKPDLMSLLKITDSFSKAIGMEFGVDKCAFIDVQRGKVVSSDCLLLNHSVVLKSLCESETYKYLGMFEVLNIVDADMKQSFRDRFFGRLIKVLKSHLSGGNKIRAFNGWVMPMLTYSFGILRWTQSELDVLDRKVRRLLTAYRMHHPRSSVMRLYIPRKCGGRGILNAKDLHNREIYNLREYFLKMNVNMYRDVVAVDKGLTPLSLANGNWKRLKVEGISDRITVWRSKELHGRFYRALTGPDVDQLASVAWLRFSNLFGETEGFIFAIMDEVIMTNNYRKYILKDGTVDICRACHRPGESIRHIVSGCSRFANGEYLHRHNQVARIIHQQLALKYGFLDSAVPYYQYQPQPVLDNGHVTLYWDRSIITDRYIVANKPDIVIIDRSARRAVLVDVTIPHDENLVKAEKDKLIKYLDLAHETTAMWHVDSTIIVPIVVSVHGLIAKSFDQHLKKLSLSSWVKGLIQKAVILDTARIVRRFLTLES

SEQ ID NO: 27538 - protein, 1197 aa, Bombyx mori
MSTTTALRKNPSRQCRQVTCGARRTSPCIPSCSSDGSPSPTRIENLSSDETQPSPAPPRPVRRGRPPLARLGSTRRNAPSTVPATSGVVRSRMRWNENINMNVMRAYYEATEGETNLSAYRSKMFSVFQTLCPTVNVSTQRLSDQVRAIQRLRLLDQSLLDRLRYEALPVPIEPQENQVVTDTVAPIIQHDEEIQEQVCASNQDYERLSSALEDSIQEYRLVSACSRPRLPRLPMHRRNVSLVGALDSILKPYLESSTDLIDTHSLLYCGAVAVCRVAEVKSPNLTQTAYRPPTKPQWQCRIEKRIDRARILIAKLMCFQKGNTRPRVMCFVDQAFAGTGISSNEYMTCIIERIDFWKQKVYAWASRIRRYRLRSERYHLNRVFQRDQRSVYRNWESSQSQVTNEPYNVNEEDMSTFWKNIWSIPIGHSEGEWIQTVRRECESYKEMDPITISAIDVSRAVRSMPNWKSPGPDGLHSYWIKWIRSSHERLAAQFQQALEMGSLPDFMTSGITYLIYKSGNTSDPKNYRPITCLPTIYKLLTSILRIKIQNHIFNNNILSPNQNGCKAGSRGTKDLLLIDMTITQQVRRGKRNVHMAWIDYKKAYDSVPHTWLMRVLELYKINPILCSFLSSCMGQWSTFLSQPGQMTSSAAPNLIRIKRGIFQGDSLSPLWFCLALNPLSTLLKDSTLGYRLRRGAEAISHLLFMDDLKLFASKKPDLMSLLKITDSFSKAIGMEFGVDKCAFIDVQRGKVVSSDCLLLNHSVVLKSLCESETYKYLGMFEVLNIVDADMKQSFRDRFFGRLIKVLKSHLSGGNKIRAFNGWVMPMLTYSFGILRWTQSELDVLDRKVRRLLTAYRMHHPRSSVMRLYIPRKCGGRGILNAKDLHNREIYNLREYFLKMNVNMYRDVVAVDKGLTPLSLANGNWKRLKVEGISDRITVWRSKELHGRFYRALTGPDVDQLASVAWLRFSNLFGETEGFIFAIMDEVIMTNNYRKYILKDGTVDICRACHRPGESIRHIVSGCSRFANGEYLHRHNQVARIIHQQLALKYGFLDSAVPYYQYQPQPVLDNGHVTLYWDRSIITDRYIVANKPDIVIIDRSARRAVLVDVTIPHDENLVKAEKDKLIKYLDLAHETTAMWHVDSTIIVPIVVSVHGLIAKSFDQHLKKLSLSSWVKGLIQKAVILDTARIVRRFLTLES

SEQ ID NO: 27539 - protein, 1197 aa, Clostera curtula
MTTRRNPSRRCKQAAPLGARPPSPCLSSRSSNDEYFTPTPGPSSDESEVPTTSAPRRPVRRGRPPLPARLGPSDQAGPSTAPATGSAVRTRMRWSHQLNEDVMRAYYGATKGGTALTSYRSKMLSLFQAVHPTVTVTAQRLADQVRAIQRLGLLDAPVLEQLRDEIQPALSEPALGDVTAVPRDTRTISEPDINMPEPVCINDQDIERLRRTLENVIGEYRVMPIFDRPKLPRLPLNAHNVSIVNAYDNILQTYLDSSTDLTDTYSILYCGAVAACREAGIGVLAPNQNIRPAAAAPRWKLRIERRITAARTIIAKLYCFQAGNVRPRIMRFVNQAFAGTGISSNNYSSHILDRIDFWKQKVYAWAKRIKRYSTTTERYSINKIFQSDQRSVYRKWQNPKSQIPDINLPNIDHMSTFWENIWSNPINYSENEWFDVVRRACEIIPEMAPVSITANDVKSAISWAPNWKSPGPDRLHAYWIKSYRSSHERLATQYQQALESGNIPEFMTTGLTHLIHKSGSTSDPKNFRPITCLPIIYKILTSILRTKINAHVTANDILSPTQNGCKAKSRGTKDLLLIDMAISQQVRRNKRNVFMAWIDYKKAYDSVPHSWLKRVLKLYKIHPTLCAFLSSCMEQWSTILLHPGHINSFDSSNLVKIKRGIFQGDSLSPLWFCLALNPLSTLLKCSGLGYRLRKENEAISHLLYMDDLKLYASKKPDLMELLKITDNFSKSIGMEFGVDKCAVLNIQRGRIVNSECMQVSRNVSLRCLSESETYKYLGMSEALGVADADMKQVLKERFYSRLTKVLKSLLSGGNKVRAFNSWVMPVLTYSFGILRWTQTELDAVDRKVRRLLIAYRMHHPRSSVMRMYIPRKCGGRGFLNAKDLHNREIYNLREYFLKVNVDMYQNVVAIDKGLTPLSLATANWMKPKVMSISDRTAIWKDKELHGRFYRALTGSDVDQLASVDWLRFGNLFGETEGFVFAIMDEVMMTNNYRKHILKDGTVDICRACHRPGESIRHIVSGCSRLANGEYLHRHNQVAKIIHQQLAFKYGLVSTEVPYYQYQPQPVLENDHVTLYWDRSIITDRYIAANKPDIVVIDRSTRHVRLVDITIPHDENLVKAEKEKMIKYLDLAHEVTAMWSAESTSIIPIVISVHGLISKSFDGHLNQLSISGWVKRLMQKAVLLETARIVRRFLSLQH

SEQ ID NO: 27540 - protein, 1204 aa, Phalera bucephala
MAEPSRRNPVRLCRQRDARSPRARPTPLPGSPASPQPSEDEDFFTPPTSGASSDDAGISATPPTLTSARRGRPPLPARLGPAGHCALPTAPATGGVVRRMRWTPELNLSVMRAYYGATERGTILTAYRPKLLSLFQGLHPTVAVTAQRLSDQVRAIQRCKLLDDTVLERLRREALPARTDFNVRSVEEPISLNNFALSEEVNSEQVSVSDQLQEQVRRALEDAFAEYRSAPIFLRPCLPRLPMHRRNISLVSALDNVLKPHWETSVDLCDTHSILYCGAVAVCRVAGVRFPNLHRATQPTNTKPFWQCRIERRINMARTLIAKLLCFQAGNNRPRVMRFVAQAFAGTGVAPVDYVAGVAERIDYWKQKVYTWAKRIRRYKARADRYHVNRTFQTNQRSVYQAWERPQKRVTDVHLPNAAVMAEFWRKIWSVPVSHSEGEWFDVVGRSCGPIQEMEPVVISREDLACAVRAAPNWKSPGPDGLHAFWLKRLQGSHSRLATQFQEALQLGSLPSFMTSGVTHLIYKSGITSEPKNYRPITCLPTVYKLLTSILRMKINNHLKAQHILSPTQNGCKGGSRGTKDLLLIDMAICQQVRRSRKNVSMAWIDYKKAYDSVPHTWLGRVLELYRVHPALCSFLGSCMRQWTTVLRHPGCGGLSGSSDLIKISRGIFQGDSLSPLWFCLALNPLSAILKDSKLGYHLRRESEPISHLLYMDDLKLYASKKTDLMELLKITGNFSNDIGMEFGVDKCAVIHVQRGRVEDSFNLQLSEDISLRSLSEMDSYKYLGMSQALSIAEQDMKQSLKDRFFARLIKVLKSLLSGRNKVRAFNGWVMPVLTYSFGILRWTQSELDALDRKVRRLLTAYRMHHPRSSVMRLYIPRKCGGRGFLNAKTLHNREVCNLRQYFLSVSVVMYRDVAAIDRGLTPLSLANENWRRPQVLSISDRTAIWKGKELHGRFYRALTGPDVDQLASVNWLRFSNLFGETEGFVFAIMDEVIMTNNYRKHILKDGTVDICRACHRPGESIRHVVSGCSRLANGEYLHRHNQVARIIHQQLALKYGLVDSEVPYYQYQPLPVLESGHITLYWDRSIITDRTIVANKPDIVIIDRSMRRVMLVDVTIPHDENLVKAEKEKLSKYLDLAHEVTAMWNVDSTIIIPMVVSVNGLIAKSFDKHLEKLSLGSWVKGLIQKAVMLDTARIVRRFLSLEP

SEQ ID NO: 27541 - protein, 1204 aa, Phalera bucephala
MAEPSRRNPVRLCRQRDVRSPSARPTPLPGSPTSPQPSEDEDFFTPPTSGASSDDAGISASPPTLTSARRGRPPLPARLGPAGHCAPPTAPATGGVVRRMRWTPELNLSVMRAYYGATEGGTILTAYRPKLLSLFQGLHPTVAVTAQRLSDQVRAIQRCKLLDDTVLERLHREALPARTESNVRSVEDPISLNNFARSEEVNSEQVSVSDQLQEQVRRALEDAFAEYRSAPISLRPCLPRLPMHRRNISLVSALDNVLKPHWETSVDLCDTHSILYCGAVAVCRVAGVRFPNLHRAAQPTNAKPLWQCRIERRINMARTLIAKLLCFQAGNNRPRVVRFVTQAFAGTRVAPVDYVAGVAERIDYWKQKVYAWAKRIRRYKARADRYHVNRTFQTNQRSVYQAWERPQERVTDVHLPNAAVMAEFWRKIWSVPVSHSEGEWFDVVGRSCGPIQEMEPVVISREDLACAVRAAPNWKNPGPDGLHAFWLKRLQGSHSRLATQFQEALQLGSLPSFMTSGVTHLIHKSGSTSEPKNYRPITCLPTVYKLLTSILRIKINNHLKAQHILSPTQNGCKGGSRGTKDLLLIDIAICQQVRRSRKNVSMAWIDYKKAYDSVPHTWLGRVLELYRVHPALCSFLGSCMRQWTTVLRHPGCGGLSGSSDLIKISRGIFQGDSLSPLWFCLALNPLSAILKDSKLGYHLRRESEPISHLLYMDDLKLYASKKTDLMELLKITGNFSNDIGMEFGVDKCAVIHVQRGRVEDSFNLQLSEDISLRSLSEMDSYKYLGMSQALSIAEQDMKQSLKDRFFARLIKVLKSLLSGGNKVRAFNGWVMPVPTYSFGILRWTQSELDTLDRKVRRLLTAYRMHHPRSSVMRLYIPRKCGGRGFLNAKTLHNREVCNLRQYFLSVSVVMYRDVAAIDRGLTPLSLANGNWRRPEVLSTSDRTAIWKGKELHGRFYRALTGPDVDQLASVTWLRFSNLFGETEGFVFAIMDEVIMTNNYRKYILKDGTVDICRACHRPGESIRHVVSGCSRLANGEYLHRHNQVARIIHQQLALKYGLVDSEVPYYQYQPLPVLESGHITLYWDRSVITDRTIVANKPDIVIIDRSMRRVMLVDVTIPHDENLVKAEKEKLSKYLDLAHEVTAMWNVDSTIIIPMVVSVNGLIAKSFDKHLEKLSLGSWVKGLIQKAVMLDTARIVRRFLSLEP

SEQ ID NO: 27542 - protein, 962 aa, Phalera bucephala
MHRRNISLVSALDNVLKPHWETSVDLCDTHSILYCGAVAVCRVAGVRFPNLHRATQPTNAKPLWQCRIERRINMARTLIAKLLCFQAGNNRPRVVRFVTQAFAGTGVASVDYVAGVAERIDYWKQKVYAWAKRIRRYKARADRYHVNRTFQTNQRSVYQAWERPQERVTDVHLPNAAVMAEFWRKIWSVPVTHSEGEWFDVVGRSCGPIQEMEPVVISREDLACAVRAAPNWKSPGPDGLHAFWLKRLQGSHSRLATQFQEALQLGSLPSFMTSGVTHLIHKSGSTSEPKNYRPITCLPTVYKLLTSILRIKINNHLKAQHILSPTQNGCKGGSRGTKDLLLIDIAICQQVRRSRKNVSMAWIDYKKAYDSVPHTWLGRVLELYRVHPALCSFLGSCMRQWTTVLRHPGCGGLSGSSDLIKISRGIFQGDSLSPLWFCLALNPLSAILKDSKLGYHLRRESEPISHLLYMDDLKLYASKKTDLMELLKITGNFSNDIGMEFGVDKCAVIHVQRGRVEDSFNLQLSEDISLRSLSEMDSYKYLGMSQALSVAEQDMKQSLRDRFFARLIKVLKSLLSGGNRVRAFNGWVMPVLTYSFGILRWTQSELDALDRKVRRLLTTYRMHHPRSSVMRLYIPRKCGGRGFLNAKTLHNREVCNLRQYFLSVSVVMYRDVAAIDRGLTPLSLANGNWRRPQVLSTSDRTAIWKGKELHGRFYRALTGPDVDQLASVTWLRFSNLFGETEGFVFAIMDEVIMTNNYRKHILKDGTVDICRACHRPGESIRHVVSGCSRLANGEYLHRHNQVARIIHQQLALKYGLVDSEVPYYQYQPLPVLESGHITLYWDRSVITDRTIVANKPDIVIIDRSMRRVMLVDVTIPHDENLVKAEKEKLSKYLDLAHEVTAMWNVDSTIIIPMVVSVNGLIAKSFDKHLEKLSLGSWVKGLIQKAVMLDTARIVRRFLSLEP

SEQ ID NO: 27543 - protein, 1204 aa, Phalera bucephala
MAEPSRRNPVRLCRQRDARSPSARPTPLPGSLTSPQPSEDEDFFTPPTSGASSDDAGISASPPTSTSARRGRPPLPARLGPAGHCAPPTAPATGGVVRRMRWTPELNLSVMRAYYGATEGGTILTAYRPKLLSLFQGLHPTVAVTAQRISDQVRAIQRCKLLDDTVLERLHREALPARTESNVRSVEDPISLNNFARSEEVNSEQVSVSDQLQEQVRRALEDAFAEYRSAPISLRPCLPRLPMHRRNISLVSALDNVLKPHWETSVDLCDTHSILYCGAVAVCRVAGVRFPNLHRATQPTNTKPFWQCRIERRINMARTLIAKLLCFQAGNNRPRVMRFVAQAFAGTGVAPVDYVAGVAERIDYWKQKVYAWAKRIRRYKARADRYHVNRTFQTNQRSVYQAWERPQERVTDVHLPNAAVMAEFWRKIWSVPVSHSEGEWFDVVGRSCGPIQEMEPVVISREDLACAVRAAPNWKSPGPDGLHAFWLKRLQGSHSRLATQFQEALQLGSLPSFMTSGVTHLIYKSGSTSEPKNYRPITCLPTVYKLLTSILRIKINNHLKAQHILSPTQNGCKGRSRGTKDLFLIDMAICQQVRRSRKNVSMAWIDYKKAYNSVLHTWLGRVLELYRVHPALCSFLGSCMRQWTTVLRHPGCGGLSGSSDLIKISRGIFQGDSLSPLWFCLALNPLSAILKDSKLGYHLRRESEPISHLLYMDDLKLYASKKTDLMELLKITGNFSNDIGMEFGVDKCAVIHVQRGRVEDSFNLQLSEDISLRSLSEMDSYKYLGMSQALSIAEQDMKQSLRDRFFARLIKVLKSLLSGGNRVRAFNGWVMPVLTYSFGILRWTQSELDALDRKVRRLLTAYRMHHPRSSVMRLYIPRKCGGRGFLNAKTLHNREVCNLRQYFLSVSVVMYRDVAAIDRGLTPLSLANGNWRRPQVLSTSDRTAVWKGKELHGRFYRALTEPDVDQLASVTWLRFSNLFGETEGFVFAIMDEVIMTNNYRKHILKDGTVDICRACHRPGESIRHVVSGCSRLANGEYLHRHNQVARIIHQQLALKYGLVDSEVPYYQYQPLPVLESGHITLYWDRSFITDRTIVANKPDIVIIDRSMRRVMLVDVTIPHDENLVKAEKEKLSKYLDLAHEVTTMWNVDSTIIIPMVVSVNGLIAKSFDKHLEKLSLGSWVKGLIQKAVMLDTARIVRRFLSLEP

SEQ ID NO: 27544 - protein, 1105 aa, Phalera bucephala
MRWTSELNMSVMRAYYGATKGETILTAYRPKLLSLFQELHPTVAVTAQRLSDQVRAIQRCKLLDDTVLERLRSETCPARTESDLRSFEEPISLDSFARSEEVNSGQVSVGDQLQEQVRRALKDAFAEYRSAPISLRPCLPRLPMHRHNISLVGALDNVLKSHWETSVDLCDTHSILYCGAVAVCRVAGVRFPNLHRATQPTNAKPFWQCRIERRINMARTLIAKLLCFQAGNNRPRVVRFVAQAFAGTGVAPVDYMARVTERIDYWKQKVYAWANRIRRYRERADRYHVNRTFEVNQRSVYQAWERPQERVTDVHLPDAATMAEFWRKIWSVPVSHSEGEWFDVVGRSCEPIQEMEPVVITRDDVACAVRAAPNWKSPGPDGLHAFWLKRLQGSHARLATQFQEALELGSLPSLLTTGVTHLIHKSGSTLEPKNYRPITCLPTVYKLLTSILRTKINNHLKAQHILSPTQNGCKGGSRGTKDLLLIDMAICQQVRRSRKNVSMAWIDYKKAYDSVPHTWLRRVLELYKVHPALCSFLGLCMGQWTTVLRHPGYGGLSGSSDLIKISRGIFQGDSLSPLWFCLALNPLSAILKNSKLGYHLRRGSEPISHLLYMDDLKLYASKKTDLMELLKITGNFSNDIGMEFGVDKCAVIHVQRGSVEDSFNLQLSEDISLRSLSEMDSYKYLGMSQALSIAEQDMKQSLKDRFFARLMKVLKSLLSGGNRVRAFNGWVMPVLTYSFGILRWTQSELDALDRKVRRLLTAYRMHHPRSSVMRLYIPRRCGGRGFLNAKTLHNREVCNLRQYFLSVSVVMYRDVAAIDRGLTPLSLANGNWRRPQVLSISDRTAIWKGKELHGRFYRALTGPDVDQLASVTWLRFSNLFGETEGFVFAIMDEVIMTNNYRKHILKDGTVDICRACHRPGESIRHVVAGCSRLANGEYLHRHNQVAKIIHQQLALKYDLVDSEVPYYQYQPLPVLESGHITLYWDRSIITDRTIVANKPDIVIIDRSMRRVMLVDVTIPHDENLVKAEKEKISKYLDLAHEVTAMWNVDSTIIIPMVVSVNGLIAKSFDKHLEKLSLGSWVKGLIQKVVVLDTARIVRRFLSLEP

SEQ ID NO: 27545 - protein, 1204 aa, Phalera bucephala
MAEYPRRNPVRRCRQQIAQGHSARPSPLRGSPNSPQSSENELYFTPPTSGASSDETEPPASLHPLRPERRGRPPLPACIGRAEHCAPPTAPATGGVVRRMRWTSELNMSVMRAYYGATKGETILTAYRPKLLSLFQELHPTVAVTAQRLSDQVRAIQRCKLLDDTVLERLRSETCPARTESDLRSFEEPISLDNFARSEEVNSGQVSVGDQLQEQVRRALKDAFAEYRSAPISLRPCLPRLPMHRQNISLVGALDNVLKSHWETSVDLCDTHSILYCGAVAVCRVAGVRFPNLHRATQPTNAKPFWQCRIERRINMARTLIAKLLCFQAGNNRPRVVRFVAQAFAGTGVAPVDCMARVTERIDYWKQKVYAWANRIRRYRERADRYHVNRTFGVNQKSVYQAWERPQERVTDVHLPDAATMAEFWRKIWSVPVSHSEGEWFDVVGRSCEPIQEMEPVVITRDDVACAVRAAPNWKSPGPDGLHAFWLKRLQGSHARLATQFQEALILGSLPSLLTTGVTHLIHKSGSTLEPKNYRPITCLPTVYKLLTSILRTKINNHLKAQHILSPTQNGCKGGSRGTKDLLLIDMAICQQVRRSRKNVSMAWIVYKKAYDSVPHTWLGRVLELYKVHPALCSFLGLCMGQWTTVLRHPGYGGLSGSSDLIKISRGIFQGDSLSPLWFCLALNPLSAILKNSKLGYHLRRGSEPISHLLYMDDLKLYASKKTDLMELLKITGNFSNDIGMEFGVDKCAVIHVQRGRVEDSFNLQLSEDISLRSLSEMDSYKYLGMSQALSIAEQDMKQSLKDRFFARLIKVLKSLLSGGNRVRAFNGWVMPVLTYSFGILRWTQSELDALDRKVRRLLTAYRMHHPRSSVMRLYIPRRCGSRGFLNAKTLHNREVCNLRQYFLSVSVVMYRDVAAIDRGLTPLSLANGNWRRPQVLSILDRTAIWKGKELHGRFYRALTGPDVDQLASVTWLRFSNLFGETEGFVFAIMDEVIMTNNYRKHILKDGTVDICRACHRPGESIRHVVSGCSRLANGEYLHRHNQVAKIIHQQLALKYDLVDSEVPYYQYQPLPVLESGHITLYWDRSIITDRTIVANKPDIVIIDRSMRRVMLVDVTIPHDENLVKAEKEKISKYLDLAHEVTAMWNVDSTIIIPMVVSVNGLIAKSFDKHLEKLSLGSWVKGLIQKVVVLDTARIVRRFLSLEP

SEQ ID NO: 27546 - protein, 1200 aa, Eilema depressum
MLTRSRTRNNANAPTTSPDSSLSSAAQPLASEPAASSSSSSDEFFSPPTSPPPVRRPGRGRPPASLEPRRPPASNRAPAAGGEVRRMRWTNSINENVMRAFYAATEGGTNLTAYRARMLPLFQVLEPTVNVSAQRLSDQVRAIQRCHLLDDSVLERLRSDSRSSPGASTSSQPLTQHEHFISQVNEESVSHVSEEVVDTGVTHVSTVCIDIIRSALECAMREYRSMPFDYRPRLPRLPTHKKNIALVCALDSLLSDYFDNSEDLSDTHSILYCAAVAACRVANVKFHRTILTTRPKSAVPAWQSRIERRIAETRALIGKLICFRSGNTRPRVMRFVTRAFSGTDIRPREFLSRVTERIDFLKQKIYAWANRIRRYKRRVDRYSQNRTFQRDERWVYRSWERPDSNGTDMRRPDDDATNTFWRSIWSTPVSHTEGDWMRVVERSCESIGTMEPVTISDDDVTNAVRLLPNWRSAGPDGLHNFWLKWFRSSHGRLAMQFQSCLESGSLPAFITTGVTHLLHKSGSTTDPKNYRPITCLPTVYKLLTSILREKISSHLIDNSIMSISQNGCRSGARGTKELLIIDMAICQQARRHRKDLATCWIDYKKAYDSVPHTWLLRVLELYKIDTTLCTFMKTCMGQWRTVLCYPGCRQICEDSGLIKIERGIFQGDSLSPLWFCLALNPLSTILDSSGLGCRLRRDGQVISHLLYMDDLKLFAPNNLHLIELLKSTETFSNSIRMDFGVDKCAVMHVKRGRIVESESVELSDSTKLRALSATDTYKYLGMSQALGISEAGMKQSLQERFFGRLKKVLKSLLSGGNKVRACNGWVMPVLMYSFGILRWTQTELEALDRKVRAHLTAYRMHHPRSSVMRLYIPRKCGGRGFLNAKTLHNREVCNLREYFLHNDADMHRDVVMVDNGLTPLGLAKENWRKPAVLSINDRKDVWKGKELHGRFYRALHGPEIDIPASLSWLRFGDLFGETEGFVFAIMDEVVMTNNYRRYIIKDGTVDICRACHRPGESLRHIISGCSRLANGEYLHRHNQVARIIHQQLALKYNLVESEVPYYRYVPDPVLENGQITLYWDRSIITDRTIVANKPDIVIIDRLERRAIIVDITIPHDENLMKAEKEKQIKYLDLAHEIVDMWDVDSAIIVPIVVSVHGLIAKSLDQHLKRLSLDGWLKGLMQKAVLLGTARIVRKFLSLEP

SEQ ID NO: 27547 - protein, 1089 aa, Phalera bucephala
MVLQREEPSSPLTVRNCCLFQGLHPTVAVTAQRLSDQVRAIQRCKLLDDTVLERLHREALPARTESNVRSVEDPISLNNFARSEEVNSEQVSVSDQLQEQVRRALEDAFAEYRSAPISLRPCLPRLPMHRRNISLVSALDNVLKPHWETSVDLCDTHSILYCGAVAVCRVAGVRFPNLHRATQPTNAKPLWQCRIERRINMARTLIAKLLCFQAGNNRPRVVRFVTQAFAGTRVAPVDYVAGVAERIDYWKQKVYAWAKRIRRYKARADRYHVNRTFQTNQRSVYQAWERPQERVTDVHLPNAAVMAEFWRKIWSVPVTHSEGEWFDVVGRSCGPIQEMEPVVISREDLACAVRAAPNWKSPGPDGLHAFWLKRLQGSHSRLATQFQEALQLGSLPSFMTSGVTHLIHKSGSTSEPKNYRPITCLPTVYKLLTSILRIKINNHLKAQHILSPTQTGCKGGSRGTKDLLLIDIAICQQVRRSRKNVSMAWIDYKKAYDSVPHTWLGRVLELYRVHPALCSFLGSCMRQWTTVLRHPGCGGLSGSSDLIKISRGIFQGDSLSPLWFCLALNPLSAILKDSKLGYHLRRESEPISHLLYMDDLKLYASKKTDLMELLKITGNFSNDIGMEFGVDKCAIIHVQRGRVEDSFNLQLSEDISLRSLSEMDSYKYLGMSQALSIAEQDMKQSLSDRFFARLIKVLKSLLSGGNKVRAFNGWVMPVLTYSFGILRWTQSELDALDRKVRRLLTAYRMHHPRSSVMRLYIPRKCGGRGFSNAKTLHNREVCNLRQYFLSVSVVMYRDVAAIDTGLTPLSLANGNWRRPQVLSTSDRTAIWKGKELHGRFYRALTGPDVDQLASVTWLRFSNLFGETEGFVFAIMDEVIMTNNYRKHILKDGTVDICRACHRPGESIRHVVSGCSRLANGEYLHRHNQVARIIHQQLALKYGLVDSEVPYYQYQPLPVLESGHITLYWDRSVITDRTIVANKPDIVIIDRSMRRVMLVDVTIPHDENLVKAEKEKLSKYLDLAHEVTTMWNVDSTIIIPMVVSVNGLIAKSFDKHLEKLSLGSWVKGLIQKAVMLDTARIVRRFLSLEP

SEQ ID NO: 27548 - protein, 1204 aa, Phalera bucephala
MAEPSRRNPVRLCRQRDARSPSARPTPLPGSPTSPQPSEDEDFFTPPTSGASSDDAGISASPPTLTSARRGRPPLPARLGPAGHCAPPTAPATGGVVRRMRWTPELNLSVMRAYYGATEGGTILTAYRPKLLSLFQGLHPTVAVTAQRLSDQVRAIQRCKLLDDTVLERLHREALPARTESNVRSVEDPISLNNFARSEEVNSEQVSVSDQLQEQVRRALEDAFAEYRSAPISLRPCLPRLPMHRRNISLVSALDNVLKPHWETSVDLCDTHSILYCGAVAVCRVAGVRFPNLHRATQPTNAKPLWQCRIERRINMARTLIAKLLCFQAGNNRPRVVRFVTQAFAGTRVAPVDYVAGVAERIDYWKQKVYAWAKRIRRYKARADRYHVNRTFQTNQRSVYQAWERPQERVTDVHLPNAAVMAEFWRKIWSVPVTHSEGEWFDVVGRSCGPIQEMEPVVISREDLACAVRAAPNWKSPGPDGLHAFWLKRLQGSHSHLATQFQEALQLGSFPSFMTSGVTHLIHKSGSTSEPKNYRPITCLPTVYKLLTSILRIKINNHLKAQHILSPTQTGCKGGSRGTKDLLLIDIAICQQVRRSRKNVSMAWIDYKKAYDSVPHTWLGRVLELYKVHPALCSFLGSCMRQWTTVLRHPGCGGLSGSSDLIKISRGIFQGDSLSPLWFCLALNPLSAILKDSKLGYHLRRESEPISHLLYMDDLKLYASKKTDLMQLLKITGNFSNDIGMEFGVDKCAVIHVQRGRVEDSFNLQLSEDISLRSLSEMDSYKYLGMSQALSIAEQDMKQSLRDRFFARLIKVLKSLLSGGNRVRAFNGWVMPVLTYSFGILRWTQSELDALDRKVRRLLTAYRMHHPRSSVMRLYIPRKCGGRGFLNAKTLHNREVCNLRQYFLSVSVVMYRDVAAIDRGLTPLSLANGNWRRPQVLSTSDRTAIWKGKELHGRFYRALTGPDVDQLASVTWLRFSNLFGETEGFVFAIMDEVIMTNNYRKHILKDGTVDICRACHRPGESIRHVVSGCSRLANGEYLHRHNQVARIIHQQLALKYGLVDSEVPYYQYQPLPVLESGHITLYWDRSVITDRTIVANKPDIVIIDRSMRRVMLVDVTIPHDENLVKAEKEKLSKYLDLAHEVTAMWNVDSTIIIPMVVSVNGLIGKSFDKHLEKLSLGSWVKGLIQKAVMLDTARIVRRFLSLEP

SEQ ID NO: 27549 - protein, 1204 aa, Phalera bucephala
MAEPSRRNPVRLCRQRDARSPSARPTPLPGSPASPQPSEDEDFFTPPTSGASSDDAGISATPPTLTSARRGRPPLPARLGPAGHCAPPTAPATGGVVRRMRWTPELNLSVMRAYYGATEGGTILTAYRPKLLSLFQGLHPTVAVTAQRLSDQVRAIQRCKLLDDTVLKRLRREALPARTDSNVRGVEEPISLNNFARSEEVNSEQVSVSDQPQEQVRRALEDAFAEYRSAPISLRTCLPRLPMHRRNISLVSALDNVLKPHWETSVDLCDTHSILYCGAVAVCRVAGVRFPNLHRATQPTNTKPFWQCRIERRINMARTLIAKLLCFQAGNTRPRVMRFVTQAFSGTGVAPVDYVAGVAERIDYWKQKVYAWAKRIRRYKARADRYHVNRTFQTNQRSVYQAWERPQERVSDVHLPNAAVMAEFWRKIWSVPVSHSEGEWFDVVGRSCGPIQEMEPVVISREDLACAVRAAPNWKSPGPDGLHAFWLKRLQGSHSRLATQFQEALELGSLPSFMTSGVTHLIYKSGSTSEPKNYRPITCLPTVYKLLTSILRIKINNHLKAQHILSPTQNGCKGGSRGTKDLLLIDMAICQQVRRSRKNVSMAWIDYKKAYDSVPHTWLGRVLELYRVHPALCSFLGSCMRQWTTVLRHPGCGGLSGSSDLIKISRGIFQGDSLSPLWFCLALNPLSAIFKDSKLGYHLRRESEPISHLLYMDDLKLYASKKTDLMELLKITGNFSNDIGMEFGVDKCAVIHVQRGRVEDSFNLQLSEDISLRSLSEMDSYKYLGMSQALSIAEQDMKQSLKDRFFARLIKVLKSLLSGGNKVRAFNGWVMPVLKYSFGILRWTQSELDALDRKVRRLLTAYRMHHPRSSVMRLYIPRKCGGRGFLNAKTLHNREVCNLRQYFLSVSVVMYRDVAAIDRGLTPLSLANENWRRPQVLSISDRTAIWKGKELHGRFYRALTGPDVDQLASVNWLRFSNLFGDTEGFVFAIMGEVIMTNNYRKHILKDGTVDICRACHRPGESIRHVVSGCSRLANGEYLHRHNQVARIIHQQLALKYGLVDSEVPYYQYQPLPVLESGHITLYWDRSIITDRTIVANKPDIVIIDRSMRRVMLVDVTIPHDENLVKAETEKLSKYLDLAHEVTAMWNVDSTIIIPMVVSVNGLIAKSFDKHLEKLSLGSWVKGLIQKAVMLDTARIVRRFLSLEP

SEQ ID NO: 27550 - protein, 1200 aa, Phalera bucephala
MAEPSRRNPVRLCRQRDARSPSARPTPLPGSPTSPQPSEDEDFFTPPTSGASSDDAGISASPPTLTSARRGRPPLPARLGPAGHCAPPTAPATGGVVRRMRWTPELNLSVMRAYYGATEGGTILTAYRPKLLSLFQGLHPTVAVTAQRLSDQVRAIQRCKLLDDTVLERLHREALPARTESNVRSVEDPISLNNFARSEEVNSEQVSVSDQLQEQVRRALEDAFAEYRSAPISLRPCLPRLPMHRRNISLVSALDNVLKPHWETSVDLCDTHSILYCGAVAVCRVAGVRFPNLHRATQPTNAKPLWQCRIERRINMARTLIAKLLCFQAGNNRPRVVRFVTQAFAGTRVAPVDYVAGVAERIGYWKQKVYAWAKRIRRYKARADRYHVNRTFQTNQRSVYQAWERPQERVTDVHLPNAAVMAEFWSVPVTHSEGEWFDVVGRSCGPIQEMEPVVISREDLACTVRAAPNWKSPGPDGLHAFWLKRLQGSHYRLATQFQEALQLGSLPSFMTSGVTHLIHKSGSTSEPKNYRPITCLPTVYKLLTSILRIKINNHLKAQHILSPTQNGCKGGSRGTKDLLLIDIAICQQVRRSRKNVSMAWIDYKKAYDSVPHTWLGRVLELYRVHPALCSFLGSCMRQWTTVLRHPGCGGLSGSSDLIKISRGIFQGDSLSPLWFCLALNPLSAILKDSKLGYHLRREREPISHLLYMDDLKLYASKKTDLMELLKITGNFSNDIGMEFGVDKCAVIHVQRGRVEDSFNLQLSEDISLRSLSEMDSYKYLGMSQALSIAEQDMKQSLRDRFFARLIKVLKSLLSGGNRVRAFNGWVMPVLTYSFGILRWTQSELDALDRKVRRLLTAYRMHHPRSSVMRLYIPRKCGGRGFLNAKTLHNRKVCNLRQYFLSVSVVMYRDVAAIDRGLTPLSLANGNWRRPQVLSTSDRTAIWKGKELHGRFYRALTGPDVDQLASVTWLRFSNLFGETEGFVFAIMDEVIMTNNYRKYILKDGTVDICRACHRPGESIRHVVSGCSRLANGEYLHRHNQVARIIHQQLALKYGLVDSEVPYYQYQPLPVLESGHITLYWDRSVITDRTIVANKPDIVIIDRSMRRVMLVDVTIPHDENLVKAEKEKLSKYLDLAHEVTDMWNVDSTIIIPMVVSVNGLIAKSFDKHLEKLSLGSWVKGLIQKAVMLDTARIVRRFLSLEP

SEQ ID NO: 27551 - protein, 1204 aa, Phalera bucephala
MAEYPRRNPVRRCRQRIAQGHSARPSPLRGSPNSPQSSENELYFTPPTSGASSDETEPPASSHPLRPERRGRPPLPACIGPAEHCAPPTAPATGGVVRRMRWTSELNMSVMRAYYGATKGETILTAYRPKLLSLFQELHPTVAVTAQRLSDQVRAIQRCKLLDDTVLERLRSETCPARTESDLRSFEEPISLDNFARSEEVNSGQVSVGDQLQEQVRRALKDAFAEYRSAPISLRPCLPRLPMHRHNISLVGALDNVLKSHWETSVDLCDTHSILYCGAVAVCRVAGVRFPNLHRATQPTNAKPFWQCRIERRINMARTLIAKLLCFQAGNNRPRVVRFVAQAFAGTGVAPVDCMARVTERIDYWKQKVYAWVNRIRRYRERADRYHVNRTFEVNQKSLYQAWERPQERVTDVHLPDAATMAEFWRKIWSVPVSHSEGEWFDVVGRSCEPIQEMEPVVITRDDVACAVRAAPNWKSPGPDGLHAFWLKRLQGSHARLATQFQEALELGSLPSLLTTGVTHLIHKSGSTLEPKNYRPITCLPTVYKLLTSILRTKINNHLKAQHILSPTQNGCKGGSRGTKDLLLIDMAICQQVRRSRKNVSMAWIDYKKAYDSVPHTWLRRVLELYKVHPALCSFLGLCMGQWTTVLRHPGYGGLSGSSDLIKISRGIFQGDSLSPLWFCLALNPLSAILKNSKLGYHLRRGSEPISHLLYMDDLKLYASKKTDLMELLKITGNFSNDIGMEFGVDKCAVIHVQRGRVEDSFNLQLSEDISLRSLSEMDSYKYLGMSQALSIAEQDMKQSLKDRFFARLMKVLKSLLSGGNKVRAFNGWVMPVLTYSFGILRWTQSELDALDRKVRRLLTAYRMHHPRSSVMRLYIPRRCGGRGFLNAKTLHNREVCNLRQYFLSVSVVMYRDVAAIDRGLTPLSLANGNWRRPQVLSISDRTAIWKGKELHGRFYRALTGPDVDQLASVTWLRFSNLFGETEGFVFAIMDEVIMTNNYRKHILKDGTVDICRACHRPGESIRHVVSGCSRLANGEYLHRHNQVAKIIHQQLALKYDLVDSEVPYYQYQPLPVLESGHITLYWDRSIITDRTIVANKPDIVIIDRSMRRVMLVDVTIPHDENLVKAEKEKISKYLDLAHEVTAMWNVDSTIIIPMVVSVNGLIAKSFDKHLEKLSLGSWVKGLIQKVVVLDTARIVRRFLSLEP

SEQ ID NO: 27552 - protein, 962 aa, Phalera bucephala
MHRHNISLVGALDNVLKSHWETSVDLCDTHSILYCGAVAVCRVAGVRFPNLHRATQPTNAKPFWQCRIERRINMARTLIAKLLCFQAGNNRPRVVRFVAQAFAGTGVAPVDYMARVTERIDYWKQKVYAWANRIRRYRERADRYHVNRTFEVNQRSVYQAWERPQERVTDVHLPDAATMAEFWRKIWSVPVSYSEGEWFDVVGRSCEPIQEMEPVVITRDDVACAVRAAPNWKSPGPDGLHAFWLKRLQGSHARLATQFQEALELGSLPSLLTTGVTHLIHKSGSTLEPKNYRPITCLPTVYKLLTSILRTKINNHLKAQHILSPTQNGCKGGSRGKKDLLLIDMAICQQVRRSRKNVSMAWIDYKKAYDSVPHTWLRRVLELYKVHPALCSFLGLCMGQWTTVLRHPGYGGLSGSSDLIKISRGIFQGDSLSPLWFCLALNPLSAILKNSKLGYHLRRGSEPISHLLYMDDLKLYASKKTDLMELLKITGNFSNDIGMEFGVDKCAVIHVQRGRVEDSFNLQLSEDISLRSLSEMDSYKYLGMSQALSIAEQDMKQSLKDRFFARLMKVLKSLLSGGNRVRAFNGWVMPVLTYSFGILRWTQSELDALDRKVRRLLSAYRMHHPRSSVMRLYIPRRCGGRGFLNAKTLHNREVCNLRQYFLSVSVVMYRDVAAIDRGLTPLSLANGNWRRPQVLSISDRTAIWKGKELHGRFYRALTGPDVDQLASVTWLRFSNLFGETEGFVFAIMDEVIMTNNYRKHILKDGTVDICRACHRPGESIRHVVSGCSRLANGEYLHRHNQVAKIIHQQLALKYDLVDSEVPYYQYQPLPVLESGHITLYWDRSIITDRTIVANKPDIVIIDRSMRRVMLVDVTIPHDENLVKAEKEKISKYLDLAHEVTAMWNVDSTIIIPMVVSVNGLIAKSFDKHLEKLSLGSWVKGLIQKVVVLDTARIVRRFLSLEP

SEQ ID NO: 27553 - protein, 1204 aa, Phalera bucephala
MAEPSRRNPVRLCRQRDARSPSARPTPLPGSPTSPQPSEDEDFFTPPTSGASSDDAGISASPPTSTSARRGRPPLPARLGPAGHCAPPTAPATGGVVRRMRWTTELNLSVMRAYYGATEGGTILTAYRPKLLSLFQGLHPTVAVTAQRLSDQVRAIQRCKLLDDTVLERLHREALPARTESNVRSVEDPISLNNFARSEEVNSEQVSVSDQLQEQVRRALEDAFAEYRSAPISLRPCLPRLPMHRRNISLVSALDNVLKPHWETSVDLCDTHSILYCGAVAVCRVAGVRFPNLHRATQPTNAKPLWQCRIERRINMARTLIAKLLCFQAGNNRPRVVRFVTQAFAGTRVAPVDYVAGVAERIDYWKQKVYAWAKRICRYKARADRYHVNRTFQTNQRSVYQAWERPQERVTDVHLPNAAVMAEFWRKIWSVPVTHSEGEWFDVVGRSCGPIQEMEPVVISREDLACAVRAAPNWKSPGPDGLHAFWLKRLQGSHSRLATQFQEALQLGSLPSFMTSGVTHLIHKSGSTSEPKNYRPITCLPTVYKLLTSILRIKINNHLKAQHILSPTQTGCRGGSRGTKDLLLIDIAICQQVRRSRKNVSMAWIDYKKAYDSVPHTWLGRVLELYRVHPALCSFLGSCMRQWTTVLRHPGCGGLSGLSDLIKISRGIFQGDSLSPLWFCLALNPLSAILKDSKLGYHLRRESEPISHLLYMDDLKLYASKKTDLMELLKITGNFSNDIGMEFGVDKCAIIHVQRGRVEDSFNLQLSEDISLRSLSEMDSYKYLGMSQALSIAEQNMKQSLSDRFFARLIKVLKSLLSGGNKVRAFNGWVMPVLTYSFGILRWTQSELDALDRKVRRLLTAYRMHHPRSSVMRLYIPRKCGGRGFLNAKTLNSREVCNLRQYFLSVSVVMYRDVAAIDRGLTPLSLANGNWRRPQVLSTSDRTAIWKGKELHGRFYRALTGPDVDQLASVTWLRFSNLFGETEGFVFAIMDEVIMTNNYRKHILKDGTVDICRACHRPGESIRHVVSGCSRLANGEYLHRHNQVARIIHQQLALKYGLVDSEVPYYQYQPLPVLESGHITLYWDRSVITDRTIVANKPDIVIIDRSMRRVMLVDVTIPHDENLVKAEKEKLSKYLDLAHEVTTMWNVDSTIIIPMVVSVNGLIAKSFDKHLEKLSLGSWVKGLIQKAVMLDTARIVRRFLSLEP

SEQ ID NO: 27554 - protein, 1204 aa, Phalera bucephala
MAEPSRRNPVRLCRQRDARSPSARPTPLPGSPASPQPSEDEDFFTPPTSGASSDDAGISATPPTLTSARRGRPPLPARLGPAGHCAPPTAPATGGVVRRMRWTPELNLSVMRAYYGATEGGTILTAYRPKLLSLFQGLHPTVAVTAQRLSDQVRAIQRCKLLDDTVLERLHREALPARTESNVRSVEDPISLNNFARSEEVNSEQVSVSDQLQEQVRRALEDAFAEYRSEPISLRPCLPRLPMHRRNISLVSALDNVLKPHWETSVDLCDTHSILYCGAVAVCRVGGVRFPNLHRATQPTNTKPFWQCRIERRINMARTLIAKLLCFQAGNNRPRVVRFVAQAFAGTGVAPVDYVAGVAERIDYWKQKVYAWAKRIRRYKARADRYHVNRTFQTNQRSVYQAWERPQERVTDVHLPNAAVMAEFWRKIWSVPVSHSEGEWFDVVGRSCGPIQEMEPVVISREDLACAVRAAPNWKSPGPDGLHAFWLKRLQGSHSRLATQFQEALQLGSLPSFMTSGVTHLIYKSGSTSEPKNYRPITCLPTVYKLLTSILRIKINHHLKAQHILSPTQNGCKGGSRGTKNLLLIDMAICQQVRRFRKNVSMAWIDYKKAYDSVPHTWLGRVLELYRVHPALCSFLGSCMRQWTTVLRHPGCGGLSGSSDLIKISRGIFQSDSLSPLWFCLALNPLSAILKDSKLGYHLRRESELISHLLYMDDLKLYASKKTDLMELLKITGNFSNDIGMEFGVDKCAVIHVQRGRVEDSFNLQLSEDISLRSLSEMDSYKYLGMSQALSIAEQDMKQSLKDRFFARLIKVLKSLLSGGNKVRAFNGWVMPVLTYSFGILRWTQSELAALDRKVRRLLTAYRMHHPRSSVMRLYIPRKCGGRGFLNAKTLHNREVCNLRQYFLSVSVVMYRDVAAIDRGLTPLSLANENWRRPQVLSISDRTAIWKGKELHGRFYRALTGPDVDQLASVNWLRFSNLFGETEGFVFAIMDEVIMTNNYRKHILKDGTVDICRACHRPGESIRHVVSGCSRLANGEYLHRHNQVARIIHQQLALKYGLVDSEVPYYQYQPLPVLESGHITLYWDRSIITDRTIVANKPDIVIIDRSMRRVMLLDVTIPHDENLVKAEKEKLSKYLDLAHEVTAMWNVDSTIIIPVVVSVNDLIAKSFDKHLEKLSLGSWVKGLIQKAVMLDTARIVRRFLSLEL

SEQ ID NO: 27555 - protein, 962 aa, Phalera bucephala
MHRRNISLVSALDNVLKPHWETSVDLCDTHSILYCGAVAVCRVAGVRFPNLHRATQPTNAKPLWQCRIERRINMARTLIAKLLCFQAGNNRPRVVRFVTQAFAGTRVAPVDYVAGVAERIDYWKQKVYAWAKRIRRYKARADRYHVNRTFQTNQRSVYQAWECPQERVTDVHLPNAAVMAEFWRKIWSVPVTHSEGEWFDVVGRSCGPIQEMEPVVISREDLACAVRAAPNWKSPGPDGLHAFWLKRLQGSHSRLATQFQEALQLGSLPSFMTSGVTHLIHKSGSTSEPKNYRPITCLPTVYKLLTSILRIKINNHLKAQHILSPTQNGCRGGSRGTKDLLLIDIAICQQVRRSRKNVSMAWIDYKKAYDSVPHTWLGRVLELYRVHPALCSFLGSCMRQWTTVLRHPGRGGLSGSSDLIKISRGIFQGDSLSPLWFCLALNPLSAILKDSKLGYHLRRESEPISHLLYMDDLKLYASKKTDLMELLKITGNFSNDIGMEFGVDKCAVIHVQRGRVEDSFNLQLSEDISLRSLSEMDSYKYLGMSQALSIAEQDMKQALRDRFFARLIKVLKSLLSGGNRVRAFNGWVMPVLTYSFGILRWTQSELDALDRKVRRLLTAYRMHHPRSSVMRLYIPRKCGGRGFLNAKTLHNREVCNLRQYFLSVSVVMYRDVAAIDRGLTPLSLANGNWRRPQVLSTSDRTAIWKGKELHGRFYRALTGPDVDQLASVTWLRFSNLFGETEGFVFAIMDEVIMMNNYRKHILKDGTVDICRACHRPGESIRHVVSGCSRLANGEYLHRHNQVARIIHQQLALKYGLVDSEVPYYQYQPLPVLESGHITLYWDRSVITDRTIVANKPDIVIIDRSMRRVMLVDVTIPHDENLVKAEKEKLSKYLDLAHEVTAMWNVYSTIIIPMVVSVNGLIAKSFDKHLEKLSLGSWVKGLIQKAVMLETARIVRRFLSLEP

SEQ ID NO: 27556 - protein, 1197 aa, Bombyx mori
MSTTTALRKNPSRQCRQVTCGAQRTSPCIPSCSSDGSPSPTRIESLSSDETQPSPAPPRPVRRGRPPLACLGSTRRNAPSTVPATSGVVRSRMRWNENINMNVMRAYYEATEGETNLSAYRSKMFSVFQTLCPTVNVSTQRLSDQVRAIQRLRLLDQSLLDRLRYEALPVPIEPQENQVVTDTVAPIIQHDEEIQEQVCASNQDYERLSSALEDSIQEYRLVSACSRPRLPRLPMHRRNVSLVGALDSILKPYLESSTDLIDTHSLLYCGAVAVCRVAEVKSPNLTQTAYRPPTKPQWQCRIEKRIDRARILIAKLMCFQKGNTRPRVMCFVDQAFAGTGISSNEYMTCIIERIDFWKQKVYAWASRIRRYRLRSERYHLNRVFQRDQRSIYRNWESSQSQVTDEPYNVNEEDMSTFWNNIWSIPIGHSEGEWIQTVRRECESYKEMDSITISAVDVSRAVRSMPNWKSPGPDGLHSYWIKWIRSSHERLAAQFQQALELGSLPDFMTSGITYLIYKSGNTSDPKNYRPITCLPTIYKLLTSILRIKIQNHIFNNNILSPNQNGCKAGSRGTKDLLLIDMTITQQVRRSKRNVHMAWIDYKKAYDSVPHTWLMRVLELYKINPILCSFLSSCMGQWSTFLSQPGQMTSSAAPNLIRIKRGIFQGDSLSPLWFCLALNPLSTLLKDSTLGYRLRRGAEAISHLLFMDDLKLFASKKPDLMSLLKITDNFSKAIGMEFGVDKCAFIDVQRGKVVSSDCLLLNHSVVLKSLCESETYKYLGMFEVLNIVDADMKQSFRDRFFGRLIKVLKSHLSGGNKIRAFNGWVMPMLTYSFGILRWTQSELDVLDRKVRRLLTAYRMHHPRSSVMRLYIPRKCGGRGILNAKDLHNREIYNLREYFLKMNVNMYRDVVAVDKGLTPLSLANGNWKRLKVESISDRITVWRSKELHGRFYRALTGPDVDQLASVAWLRFSNLFGETEGFIFAIMDEVIMTNNYRKYILKDGTVDICRACHRPGESIRHIVSGCSRFANGEYLHRHNQVARIIHQQLALKYGFLDSAVPYYQYQPQPVLDNGHVTLYWDRSIITDRYIVANKPDIVIIDRSARRAVLVDVTIPHDENLVKAEKDKLIKYLDLAHETTAMWHVDSTIIVPIVVSVHGLIAKSFDQHLKKLSLSSWVKGLIQKAVILDTARIVRRFLNLES

SEQ ID NO: 27557 - protein, 1203 aa, Clostera curtula
MERRINPRRQCREPYETNARITSAAVSSNPVQSSDEEYFTPPGTASSSEDEPTPSPSLSRRPARRGRPPLPASLGSTGHRALPTAPATGGVVRRMRWTNNLNESVMRAYYGATDGGTNLTAYRSRLLALFQELHPDVTVTAQRLSDQVRAIQRLNLLEQPVLERLRLEALPPQSVSSVQVTTPTAACLLPPTSVEQLDLGQIEEVSLNDQYNEQLRRILEETIEEFRLIPMTSRPRIPCLSMHKRNMALVSALDSLLMDKLNSVGDLTELHFILYCGAVAVCRVAGVTFPKSSTASRQPECKPAWQYRIEKRITAARTLIAKLYCFMTGNTRPRVMRYVIQAFAGTGVRQCDYAACVTERIDYFKQKVYAWAKRIRRYRERADRFNQNRLFQNDQKIIYRNWERPQPPTADLSTPDADTMLAFWRNIWSRPVDHLEGQWIGVVGRACEQITQMEPVHIDLNDVISAIRSAPNWKSPGPDGLHNFWIKKVCSCHARLATLFQAALEAGSLPHFMTTGVTHLIHKSGRISEPKNYRPITCLPTIYKLLTSIIKFKIVKHILANNILASNQNGCNAGSRGTKDLLLIDMAICQQVRRSKKNISMAWIDYKKAYDSVPHSWLMRVLDLYKVDANLCLFLSSCMRQWSTVLYHPGHRHFFEPSERIWIKRGIFQGDSLSPLWFCLALNPLSILLNDSMPGYRLHRGGKTISHLLYMDDLKLYAPKQSDLMALLQVTETFSSAISMEFGVDKCAVINVQKGRVVNSENLQLSENVVLRSLCESDTYKYLGMSEALGIADSDVKQQLKTRFLGRLTKVLKSLLSGGNKVRAFNCWVIPVIAYSFGILRWTQSELDALDRMVRRQLTAFRMHHPRSSVMRLYIPRRCGGRGFLNVKSLHNREVCNLRDYFLRVDDEMHRDVVKVDSGLTALSMAKQNWRRPQVLSVSERKTIWKGKELHGRFYSALTGPEIDQLASVSWLRFGNLFGETEGFVFAIMDEVVKTNNYRKYIIKDGTVDICRACHCPGESIRHVVSGCSRLANGEYLHRHNQVAGIIHQQLALRYGIVESEVPYYQYKPEPVLSNNHVTLYWDRSIVTDRTIMANKPDIVVIDRSTRRAMLIDITIPHDVNLVKAEHEKISKYLDLSHEVGAMWNMDSTIIVPIVISVHGLIAKSFDQHLQKLSLGSWVKSLIQKAVLLDTARIVRRFLTLDP

SEQ ID NO: 27558 - protein, 1204 aa, Phalera bucephala
MAEPSRRNPVRLCRQRDARSPSARPTPLPGSPASPQPSEDEDFFTPPTSGASSDDAGISATPPTLTSARRGRPPLPARLGPAGHCAPPTAPATGGVVRRMRWTPELNLSVMRAYYGATEGGTILTAYRPKLLSLFQGLHPTVAVTAQRLSDQVRAIQRCKLLDDTVLERLRREALPARTDSNVRGVEEPISLNNFARSEEVNSEQVSVSDQLQEQVRRALEDAFAEYRSAPISLRPCLPRLPMHRRNISLVSALDNVLKPHWETSVDLCDTHSILYCGAVAVCRVAGVRFPNLHRATQPTNTKPFWQCRIERRINMARTLIAKLLCFQAGNNRPRVLRFVAQAFAGTGVAPVDYVAGVAERIDYWKQKVYAWAKRIRRYKARADRYHVNRTFQTNQRSVYQAWERPQERVSDVHLPNAAVMAEFWRKIWSVPVSHSEGEWFDVVGRSCGPIQEMEPVVISREDLACAVRAAPNWKSPGPDGLHAFWLKRLQGSHSRLATQFQEALQLGSLPSFMTSGVTHLIYKSGSTSEPKNYRPITCLPTVYKLLTSILRIKINNHLKAQHILSPTQNGCKGGSRGTKDLLLIDMAICQQVRRSRKNVSMAWIDYKKAYDSVPHTWLGRVLELYRVHPALCSFLGSCMGQWTTVLRHPGCGGLSGSSDLIKISRGIFQGDSLSPLWFCLALNPLSAILKDSKLGYHLRRESKPISHLLYMDDLKLYASKKTDLMELLKITGNFSNDIGMEFGVDKCAVIHVQRGRVEDSFNLQLSEDISLRSLSEMDSYKYLGMSQALSIAEQDMKQSLKDRFFAHLIKVLKSLLSGGNKVRAFNGWVMPVLTYSFGILRWTQSELDALDRKVRRLLTAYRMHHPRSSVMRLYIPRKCGGRGFLNAKTLHNREVCNLRQYFLSVSVVMYRHVAAIDRGLTPLSLANENWRRPQVLSISDRTAVWKGKELHGRFYRALTGPDVDQLASVNWLRFSNLFGETEGFVFAIMDEVIMTNNYRKHILKDGTVDICRACHRPGESIRHVVSGCSRLANGEYLHRHNQVARIIHQQLALKYGLVDSEVPYYQYQPLPVLESGHITLYWDRSIITDRTIVANKPDIVIIDRSMRRVMLVDVTIPHDENLVKAEKEKLSKYLDLAHEVTAMWNVDSTIIIPMVVSVNGLIAKSFDKHLEKLSLGSWVKGLIQKAVMLDTARIVRRFLSLEP

SEQ ID NO: 27559 - protein, 1204 aa, Phalera bucephala
MAEPSRRNPVRLCRQRDARSPSARPTPLPGSPASPQPSEDEDFFTPPTSGASSDDAGISATPPTLTSARRGRPPLPARLGPAGHCAPPTAPATGGVVRRMRWTPELNLSVMRAYYGATEGGTILTAYRPKLLSLFQGLHPTVAVTAQRLSDQVRAIQRCKLLDDTVLERLRREALPARTDFNVRSVEEPISLNNFARSEEVNSEQVSASDQLQEQVRRALEDAFAEYRSAPISLRPCLPRLPMHRRNISLVSALDNVLKPHWETSVDLCDTHSILYCGAVAVCRVAGVRFPNLHRATQPTNTKPFWQCRIERRINMARTLIAKLLCFQAGNNHPRVMRFVAQAFAGTGVAPVDYVAGVAERIDYWKQKVYAWAKRIRRYKARADRYHVNRTFQTNQRSVYQAWERPQERVTDVHLPNAAVMAEFWRKIWSVPVSHSEGEWFDVVGRSCGPIQEMEPVVISREDLACAVRAAPNWKSPGPDGLHALWLKRLQGSHSRLATQFQEALQLGSLPSFMTSGVTHLIYKSGSTSEPKNYRPITCLPTVYKLLTSILRIKINNHLKAQHILSPTQNGCKGGSRGTKDLLLIDMAICQQVRRSRKNVSMAWIDYKKAYDSVPHTWLGRVLELYRVHPALCSFLGSCMRQWTTVLRHPGCGGLSGSSDLIKISRGIFQGDSLSPLWFCLALNPLSAILKDSKLGYHLRRESEPISHLLYMDDLKLYASKKTDLMELLKITDNFSNDIGMEFGVDKCAVIHVQRGRVEDSFNLQLSEDISLRSLSEMDSYKYLGMSQALSIAEQDMKQSLKDRFFARLIKVLKSLLSGGNKVRAFNGWVMPVLTYSFGILRWTQSELDALDRKVRRLLTAYRMHHPRSSVIRLYIPRKCGGRGFLNAKTLHNREVCNLRQYFLSVSVVMYRDVAAIDRGLTPLSLANENWRRPQVLSISDRTAIWKGKELHGRFYRALTGPDVDQLASVNWLRFSNLFGETEGFVFAIMDEVIMTNNYRKHILKDGTVDICRACHRPGESIRHVVSGCSRLANGEYLHRHNQVARIIHQQLALKYGLVDSEVPYYQYQPLPVLESGHITLYWDRSIITDRTIVANKPDIVIIDRSMRRVMLVDVTIPHDENLVKAEKEKLSKYLDLAHEVTAMWNVDSTIIIPMVVSVNGLIAKSFDKHLEKLSLGSWVKGLIQKAVMLDTARIVRRFLSLEP

SEQ ID NO: 27560 - protein, 962 aa, Phalera bucephala
MHRRNISLVSALDNVLKPHWETSVDLCDTHSILYCGAVAVCRVAGVRFPNLHRATQPTNAKPLWQCRIERRINMARTLIAKLLCFQAGNNRPRVVRFVTQAFAGTRVAPVDYVAGVAERIDYWKQKVYAWAKRIRRYKARADRYHVNRTFQTNQRSVYQAWERPQERVTDVHLPNAAVMAEFWRKIWSVPVTHSEGEWFDVVGRSCGPIQEMEPVVISREDLACAVRAAPNWKSPGPDGLHAFWLKRLQGSHSRLATQFQEALQLGSLPSFMTSGVTHLIHKSGSTSEPKNYRPITCLPTVYKLLTSILRIKINNHLKAQHILSPTQNGCKGGSRGTKDLLLIDIAICQQVRRSRKNVSMAWIDYKKAYDSVPHTWLGRVLELYRVHPALCSFLGSCMRQWTTVLRHPGCGGLSGSSDLIKISRGIFQGDSLSPLWFCLALNLLSAILKDSKLGYHLRRESEPISHLLYMDDLKLYASKKTDLMELLKITGNFSNDIGMEFGVDKCAVIHVQRGRVEDSFNLQLSEDISLRSLSEMDSYKYLGMSQALSTAEQDMKQSLRDRFFARLIKVLKSLLSGGNRVRAFNGWVMPVLTYSFGILRWTQSELDALDRKVRRLLTAYRMHHPRSSVMRLYIPRKCGGRGFLNAKTLHNREVCNLKQYFLSVSVVMYRDVAAIDRGLTPLSLANGNWRRPQVLSTSDRTAIWKGKELHGRFYRALTGPDVDQLASVTWLRFSNLFGETEGFVFAIMDEVIMTNNYRKYILKDGTVDICRACHRPGESIRHVVSGCSRLANGEYLHRHNQVARIIHQQLALKYGLVDSEVPYYQYQPLLVLESGHITLYWDRSVITDRTIVANKPDIVIIDRSMRRVMLVDVTIPHDENLVKAEKEKLSKYLDLAHEVTAMWNVDSTIIIPMVVSVNGLIAKSFDKHLEKLSLGSWVKGLIQKAVMLDTARIVRRFLSLEP

SEQ ID NO: 27561 - protein, 1204 aa, Phalera bucephala
MAEPSRRNPVRLCRQRDARSPSARPTPLPGSPASPQPSEDEDFFTPPTSGASSDDAGISATPPTLTSARRGRPPLPARLGPAGHCAPPTAPATGGVVRRMRWTPELNLSVMRAYYGATEGGTILTAYRPKLLSLFQGLHPTVAVTAQRLSDQVRAIQRCKLLDDTVLERLRREALPARTDSNVRSVEEPISLNNFARSEEVNSEQVSVSDQLQEQVRRALEDAFAEYRSAPISLRPGLPRLPMHRRNISLVSALDNVLKPHWETSVDLCDTHSILYCGAVAVCRVAGVRFPNLHRATQPTNTKPFWQCRIERRINMARTLIAKLLCFQAGNNRPRVMRFVAQAFAGTGVAPVDYVAGVAERIDYWKQKVYAWAKRIRRYKARADRYHVNRTFQTNQRSVYQAWERPQERVTDVHLPNAAVMAEFWRKIWSVPVSHSEGEWFDVVGRSCGHIQEMEPVVISREDLACAVRVAPNWKSPGPDGLHAFWLKRLQGSHSRLATQFQEALQLGSLPSFMTSGVTHLIYKSGSTSEPKNYRPITCLPTVYKLLTSILRIKINNHLKAQHILSPTQNGCKGRSRGTKDLLLIDMAICQQVRRSRKNVSMAWIDYKKAYDSVPHTWLGRVLELYRVHPALCSFLGSCMRQWTTVLRHPGCGGLSGSSDLIKISRGIFQGDSLSPLWFCLALNPLSAILKDSKLGYHLRRESEPISHLLYMDDLKLYASKKTDLMELLKITGNFSNDIGMEFGVDKCAVIHVQRGRVEDSFNLQLSEDISLRSLSEMDSYKYLGMSQALSIAEQDMKQSLKDRFFARLIKVLKSLLSGGNKVRAFNGWVMPVLTYSFGILRWTQSELDALDRKVRRLLTAYRMHHPRSSVMRLYIPRKCGGRGFLNAKTLHNRELCNLRQYFLSVSVVMYRDVAAIDRGLTPLSLANENWRRPQVLSISDRTAIWKGKELHGRFYRALTGPDVDQLASVNWLRFSNLFGETEGFVFAIMDEVIMTNNYRKHILKDGTVDICRACHRPGESIRHVVSGCSRLANGEYLHRHNQVARIIHQQLALKYGLVDSEVPYYQYQPLPVLESGHITLYWDRSIITDRTIVANKPDIVIIDRSMRRVMLVDVTIPHDENLVKAEKEKLSKYLDLAHEVTAMWNVDSTIIIPIVVSVNGLIAKSFDKHLEKLSLGSWVKGLIQKAVMLDTARIVRRFLSLEP

SEQ ID NO: 27562 - protein, 889 aa, Phalera bucephala
MARTLIAKLLCFQAGNNRPRVVRFVTQAFAGTRVAPVDYVAGVAERIDYWKQKVYAWAKRIRRYKARADRYHVNRTFQTNQRSVYQAWERPQERVTDVHLPNAAVMAEFWRKIWSVPVTHSEGEWFDVVGRSCGPIQEMEPVVISREDLACAVRAAPNWKSPGPDGLHAFWLKRLQGSHSRLATQFQEALQLGSLPSFMTSGVTHLIHKSGSTSEPKNYRPITCLPTVYKLLTSILRIKINNHFKAQHILSPTQNGCKGGSRGTKDLLLIDIAICQQVRRSRKNVSMAWIDYKKAYDSVPHTWLGRVLELYRVHPALCSFLSSCMRQWTTVLRHPGCGGLSGSSDLIKISRGIFQGDSLSPLWFCLALNPLSAILKDSKLGYHLRRESEPISHLLYMDDLKLYASKKTDLMELLKITGNFSNDIGMEFGVDKCTVIHVQRGRVEDSFNLQLSEDISLRSLSEMDSYKYLGMSQALSIAEQDMKQSLRDRFFARLIKVLKSLLSGGNRVRAFNGWVMPVLTYSFGILRWTQSELDALDRKVRRLLTAYRMHHPRSSVMRLYIPRKCGGRGFLNAKTLHNREVCNLRQYFLSVSVVMYRDVAAIDRGLTPLSLANGNWRRPQVLSTSDRTAIWKGKELHGRFYRALTGPDVDQLASVTWLRFSNLFGETEGFVFAIMDEVIMTNNYRKYILKDGTVDICRACHRPGESIRHVVSGCSRLANGEYLHRHNQVARIIHQQLALKYGLVDSEVPYYQYQPLPVLESGHITLYWDRSVITDRTIVANKPDIVIIDRSMRRVMLVDVTIPHDENLVKAEKEKLSKYLDLAHEVTAMWNVDSTIIIPMVVSVNGLIAKSFDKHLEKLSLGSWVKGLIQKAVMLDTARIVRRFLSLEP

SEQ ID NO: 27563 - protein, 1197 aa, Bombyx mori
MSTTTALRKNPSRQCRQVTCGARRTSPCIPSCSSDGSPSPTRIENLSSDETQPSPAPPRPVRRGRPPLARLGSTRRNAPSTVPATSGVVRSRMRWNENINMNVMRAYYEATEGETNLSAYRSKMFSVFQTLCPTVNVSTQRLSDQVRAIQRLRLLDQSLLDRLRYEALPVPIEPQENQVVTDTVAPIIQHDEEIQVQVCASNQDYERLSSALEDSIQEYRLVSSCSRPRLPRLPMHRRNVSLVGALDSILKPYLESSTDLIDTHSLLYCGAVAVCRVAEVKSPNLTQTAYRPPTKPQWQCRIEKRIDRARILIAKLMCFQKGNTRPRVMCFVDQAFAGTGISSNEYMTCIIERIDFWKQKVYAWASRIRRYRLRSERYHLNRVFQRDQRSVYRNWELSQSQVTNEPYNVNEEDMSTFWKNIWSIPIGHSEGEWIQTVRRECESYKEMDPITISAIDVSRAVRSMPNWKSPGPDGLHSYWIKWIRSSHERLAAQFQQALEMGSLPDFMTSGITYLIYKSGNTSDPKNYRPITCLPTIYKLLTSILRIKIQNHIFNNNILSPNQNGCKAGSRGTKDLLLIDMTITQQVRRGKRNVHMAWIDYKKAYDSVPHTWLMRVLELYKINPILCSFLSSCMGQWSTFLSQPGQMTSSAAPNLIRIKRGIFQGDSLSPLWFCLALNPLSTLLKDSTLGYRLRRGAEAISHLLFMDDLKLFASKKPDLMSLLKITDSFSKAIGMEFGVDKCAFIDVQRGKVVSSDCLLLNHSVVLKSLCESETYKYLGMFEVLNIVDADMKQSFRDRFFGRLIKVLKSHLSGGNKIRAFNGWVMPMLTYSFGILRWTQSELDVLDRKVRRLLTTYRMHHPRSSVMRLYIPRKCGGRGILNAKDLHNREIYNLREYFLKMNVNMYRDVVAVDKGLTPLSLANGNWKRLKVEGISDRITVWRSKELHGRFYRALTGPDVDQLASVAWLRFSNLFGETEGFIFAIMDEVIMTNNYRKYILKDGTVDICRACHRPGESIRHIVSGCSRFANGEYLHRHNQVARIIHQQLALKYGFLDSAVPYYQYQPQPVLDNGHVTLYWDRSIITDRYIVANKPDIVIIDRSARRAVLVDVTIPHDENLVKAEKDKLIKYLDLAHETTAMWHVDSTIIVPIVVSVHGLIAKSFDQHLKKLSLSSWVKGLIQKAVILDTARIVRRFLTLES

SEQ ID NO: 27564 - protein, 1008 aa, Bombyx mandarina
MNRDKIIIIIISNQDYERLSSALEDSIQEYRLVSACSRPRLPRLPMHRRNVSLVGALDSILKPYLESSTDLIDTHSLLYCGAVAVCRVAEVKSPNLTQTAYRPPTKPQWQCRIEKRIDRARILIAKLMCFQKGNTRPRVMCFVDQAFAGTGISSNEYMTCIIERIDFWKQKVYAWASRIRRYRLRSERYHLNRVFQRDQRSVYRNWESSQSQVTNEPYNVNEEDMSTFWKNIWSIPIGHSEGEWIQTVRRECESYKEMDPITISAIDVSRAVRSMPNWKSPGPDGLHSYWIKWIRSSHERLAAQFQQALEMGSLPDFMTSGITYLIYKSGNTSDPKNYRPITCLPTIYKLLTSILRIKIQNHIFNNNILSPNQNGCKAGSRGTKDLLLIDMTITQQVRRGKRNVHMAWIDYKKAYDSVPHTWLMRVLELYKINPILCSFLSSCMGQWSTFLSQPGQMTSSAAPNLIRIKRGIFQGDSLSPLWFCLALNPLSTLLKDSTLGYRLRRGAEAISHLLFMDDLKLFASKKPDLMSLLKITDSFSKAIGMEFGVDKCAFIDVQRGKVVSSDCLLLNHSVVLKSLCESETYKYLGMFEVLNIVDADMKQSFRDRFFGRLIKVLKSHLSGGNKIRAFNGWVMPMLTYSFGILRWTQSELDVLDRKVRRLLTAYRMHHPRSSVMRLYIPRKCGGRGILNAKDLHNREIYNLREYFLKMNVNMYRDVVAVDKGLTPLSLANGNWKRLKVESISDRITVWRSKELHGRFYRALTGPDVDQLASVAWLRFSNLFGETEGFIFAIMDEVIMTNNYRKYILKDGTVDICRACHRPGESIRHIVSGCSRFANGEYLHRHNQVARIIHQQLALKYGFLDSAVPYYQYQPQPVLDNGHVTLYWDRSIITDRYIVANKPDIVIIDRSARRAVLVDVTIPHDENLVKAEKDKLIKYLDLAHETTAMWHVDSTIIVPIVVSVHGLIAKSFDQHLKKLSLSSWVKGLIQKAVILDTARIVRRFLTLES

SEQ ID NO: 27565 - protein, 1194 aa, Junonia genoveva
MKKARGQLAQPSSEVNSPNSESQSSSSDNDYKTLLSTSESKKNEVDSPVRTTKRRRVAHPPQEGLESQGRRAPARTPAASGAVRRMKWSQKMNESVMRAYYGATGGGINLTAYRSTMLSMFQALEPTVTVTAQRLSDQVRAIQRCHLLDESVLERLRSNLQQINAVSDSHSVQQPRYEQIEATDNISNSWPPNSVDLSVSNQDDEHMRRTLEDAILKYRPMPFNLRPRIPRLPIHKRNITIVGVVDKMLQQYLNNSQDLYDTCSIMYCGAVAVCNLALVKFKTNKIIPISNTVPAWQARIENRISSTRTIIGKLISFKSGNNRPRIMRYVHQAFAGTNIRSSEYMDSVTERIDFFKQKIFAWAKRIRRYKKRVSRYRQNRMFQSDQRKVYRDWEQCNDTVASSAFPPSEVTSEFWRSIWSAPIEHTEGEWMSAVRKECESLPQMEPVTISPEDISCAIRTSSNWKCPGPDGLHNFWLKNFHSSHSVLASQFQNALVSGTLPTFLTTGTTSLLYKSGCTADPKNYRPITCLSTTYKLLTSILAAKINKHITANNILAPAQNGCRSGSRGTKELLLIDMTICQQARRNRKNLCAAWIDYKKAYDSVPHTWLVRIMELYKIDATLYSFLRSCMGQWITYLRHPGSTDISGSTEPIRIKRGIFQGDSLSPLWFCLALNPLSTLLENSGLGFRLRRGSTIISHLLYMDDLKLYASKKSDLVKLLQITETFSSCIGMEFGIDKCAVIHVERGRVVSSEHIQLTQTLFLRSLDVGENYKYLGMSEALGIDDGSMKQLVKERFFGRLKKVLNSFLSGGNKVRAFNSWVMPLLVYTFGILRWTQTELDSLDRQVRKQLTTYRMHHPRSSVMRLYIPRKCGGRGFLNAKNLHNREVYNLRNYFLGISGGMHKDVVAVDKGLTPLSLGKENWRRPIVLDTHDRMTVWKGKELHGRFYRALMSSDVDQASSVSWLQYGDLFGETEGFVCAIMDEVIKTNNYRKFIMKDGTADVCRACHRPGESLRHIISGCCHLANGEYLHRHNQVARIIHQQLALRYGLVDIEVPYYRYNPAPVLENGNALLYWDRSIITDRHIPANKPDIVIVDRSARLAIIVDITIPHDDNLVKAEKEKLSKYLDLAHEITAMWSVDSTIIVPVVVSVNGLFAKSFDQHLKKLSLGCWIKGRLQKAVLLETARIVRRFLTLES

SEQ ID NO: 27566 - protein, 1200 aa, Eilema depressum
MLTRSRTRNNANAPTTSPDSSLSSAAQPLASEPAASSSSSSDEFFSPPTSPPPVRRPGRGRPPASLEPRRPPASNRAPAAGGEVRRMRWTNSINENVMRAFYAATEGGTNLTAYRARMLPLFQVLEPTVNVSAQRLSDQVRAIQRCHLLDASVLERLRSDSRSNPGASTSSQPLTQHEHFISQVNEESVSHVSEEVVDTGVTHVSTVCIDIIRSALECAMREYRSMPFDYRPRLPRLPTHKKNIALVCALDSLLSDYFDNSEDLSDTHSILYCAAVAACRVANVKFHRTILTTRPKSAVPAWQSRIERRIAETRALIGKLICFRSGNTRPRVMRFVTRAFSGTDIRPREFLSRVTERIDFLKQKIYAWANRIRRYKRRVDRYSQNRTFQRDERWVYRSWERPDSNGTDMRRPDDDATNTFWRSIWSTPVSHTEGDWMRVVERSCESIGTMEPVTISDDDVTNAVRLLPNWRSAGPDGLHNFWLKWFRSSHGRLAMQFQSCLESGSLPAFITTGVTHLLHKSGSTTDPKNYRPITCLPTVYKLLTSILREKISSHLIDNSIMSISQNGCRSGARGTKELLIIDMAIFQQARRHRKDLATCWIDYKKAYDSVPHTWLLRVLELYKIDTTLCTFMKTCMGQWRTVLCYPGCRQICEDSGLIKIERGIFQGDSLSPLWFCLALNPLSTILDSSGLGCRLRRDGQVISHLLYMDDLKLFAPNNLHLIELLKSTETFSNSIRMDFGVDKCAVMHVKRGRIVESESVELSDSTKLRALSATDTYKYLGMSQALGISEAGMKQSLQERFFGRLKKVLKSLLSGGNKVRACNGWVMPVLMYSFGILRWTQTELEALDRKVRAHLTAYRMHHPRSSVMRLYIPRKCGGRGFLNAKTLHNREVCNLREYFLHNDADMHRDVVMVDNGLTPLGLAKENWRKPAVLSINDRKDVWKGKELHGRFYRALHGPEIDIPASLSWLRFGDLFGETEGFVFAIMDEVVMTNNYRRYIIKDGTVDICRACHRPGESLRHIISGCSRLANGEYLHRHNQVARIIHQQLALKYNLVESEVPYYRYVPDPVLENGHITLYWDRSIITDRTIVANKPDIVIIDRLERRAIIVDITIPHDENLMKAEKEKQIKYLDLAHEIVDMWDVDSAIIVPIVVSVHGLIAKSLDQHLKRLSLDGWLKGLMQKAVLLGTARIVRKFLSLEP

SEQ ID NO: 27567 - protein, 1203 aa, Clostera curtula
MERRINPRRQCREPYETNARITSAAVSSNPVQSSDEEYFTPPGTASSSEDEPTPSPSLSRRPARRGRPPLPASLGSTGHRALPTAPATGGVVRRMRWTNNLNESVMRAYYGATDGGTNLTAYRSRLLALFQELHPDVTVTAQRLSDQVRAIQRLNLLEQPVLERLRLEALPPQSVSSVQVTTPTAACLLPPTSVEQLDLGQIEEVSLNDEYNEQWRRILEETIEEYRLIPMTSRPRIPRLSMHKRNMALVSALDSLLMDKLNSVGDLTELHFILYCGAVAVCRVAGVTFPKSSTASRQPECKPAWQYRIEKRITAARTLIAKLYCFMTGNTRPRVMRYVIQAFAGTGVRQCDYAACVTERIDYFKQKVYAWAKRIRRYRERADRFNQNRLFQNDQKIIYRNWERPQPPTADLSTPDADTMLAFWRNIWSRPVDHLEGQWIGVVGRACEQITQMEPVHIDLNDVISAIRSAPNWKSPGPDGLHNFWIKKVCSCHARLATLFQAALEAGSLPHFMTTGVTHLIHKSGRISEPKNYRPITCLPTIYKLLTSIIKFKIVKHILANNILASNQNGCNAGSRGTKDLLLIDMAICQQVRRSKKNISMAWIDYKKAYDSVPHSWLMRVLDLYKVDANLCLFLSSCMRQWSTVLYHPGHRHFFEPSERIWIKRGIFQGDSLSPLWFCLALNPLSILLNDSMPGYRLHRGGKTISHLLYMDDLKLYAPKQSDLMALLQVTETFSSAISTEFGVDKCAVINVQKGRVVNSENLQLSENVVLRSLCESDTYKYLGMSEALGIADSDVKQQLKTRFLGRLTKVLKSLLSGGNKVRAFNCWVIPVIAYSFGILRWTQSELDALDRMVRRQLTAFRMHHPRSSVMRLYIPRRCGGRGFLNVKSLHNREVCNLRDYFLRVDDEMHRDVVKVDSGLTALSMAKQNWRRPQVLSVSERKTIWKGKELHGRFYSALTGPEIDQLASVSWLRFGNLFGETEGFVFAIMDEVVKTNNYRKYIIKDGTVDICRACHCPGESIRHVVSGCSRLANGEYLHRHNQVAGIIHQQLALRYGIVESEVPYYQYKPEPVLSNNHVTLYWDRSIVTDRTIMANKPDIVVIDRSTRRAMLIDITIPHDVNLVKAEHEKISKYLDLSHEVGAMWSMDSTIIVPIVISVHGLIAKSFDQHLQKLSLGSWVKSLIQKAVLLDTARIVRRFLTLDP

SEQ ID NO: 27568 - protein, 1204 aa, Phalera bucephala
MAEPSRRNPVRLCRQRDARSPSARPTPLPGSPTSPQPSEDEDFFTPPTSGASSDDAGISASPPTLTSARRGRPPLPARLGPAGHCAPPTAPATGGVVRRMRWTPELNLSVMRAYYGATEGGTILTAYRPKLLSLFQGLHPTVAVTAQRLSDQVRAIQRCKLLDDTVLERLHREALPARTESNVRSVEDPISLNNFARSEEVNSEQASVSDQLQEQVRRALEDAFAEYRSAPISLRPCLPRLPMHRRNISLVSALDNVLKPHWETSVDLCDTHSILYCGAVALCRVAGVRFPNLHRATQPTNAKPLWQCRIERRINMARTLIAKLLCFQAGNNRPRVVRFVTQAFAGTRVAPVDYEAGVAERIDYWKQKVYAWAKRIRRYKARADRYHVNRTFQTNQRSVYQAWERPQERVTDVHLPNAAVMAEFWRKIWSVPVSHSEGEWFDVVGRSCGPIQEMEPVVISREDLACAVRAAPNWKSPGPDGLHTFWLKRLQGSHSRLATQFQEALQLGSLPSFMTSGVTHLIHKSGSTSEPKNYRPITCLPTVYKLLTSILRIKINNHLKAQHILSPTQNGCKGGSRGTKDLLLIDIAISQQVRRSRKNVSMAWIDYKKAYDSVPHTWLGRVLELYRVHPALCSFLGSCMGQWTTVLRHPGCGGLSGSSDLIKISRGIFQGDSLSPLWFCLALNPLSAILKDSKLGYHLRRESEPISHLLYMDDLKLYASKKTDLMELLKITGNFSNDIGMEFGVDECAVIHVQRGRVEDSFNLQLSEDISLRSLSEMDSYKYLGMSQALSIAEQDMKQSLRDRFFARLIKVLKSLLSGGNRVRAFNGWVMPVLTYSFGILRWTQSELDALDRKVRRLLTAYRMHHPRSSVMRLYIPRKCGGRGFLNAKTLHNREVCNLRQYFLSVSVVMYRDVAAIDRGLTPLSLANGNWRRPQVLSTSDRTAIWKGKELHGRFYRALTGPDVDQLASVTWLRFSNLFWETEGFVFAIMDEVIMTNNYRKYILKDGTVDICRACHRPGESIRHVVSGCSRLANGEYLHRHNQVARIIHQQLALKYGLVDSEVPYYQYQPLPVLESGHITLYWDRSVITDRTIVANKPDIVIIDRSMRRVMLVDVTIPHDENLVKAEKEKLSKYLDLAHEVTAMWNVDSTIIIPMVVSVNGLIAKSFDKHLEKLSLGRWVKGLIQKAVMLDTARIVRRFLSLEP

SEQ ID NO: 27569 - protein, 1204 aa, Phalera bucephala
MAEPSRRNPVRLCRQRDARSPSARPTPLPGSPASPQPSEDEDFFTPPTSGASSDDAGISATPPTLTSARRGRPPLPARLGPAGHCAPPTAPATGGVVRRMRWTPELNLSVMRAYYGATEGGTILTAYRPKLLSLFQGLHPTVAVTAQRLSDQVRAIQRCKLLDDTVLERLRREALPARTDSNVRGVEEPISLNNFARSEEVNSEQVSVSDQLQEQVRRALEDAFAEYRSAPISLRPCLPRLPMHRRNISLVSALDNVLKPHWETSVDLCDTHSILYCGAVAVCRVAGLRFPNLHRATQPTNTKPFWQCRIERRINMARTLIAKLLCFQAGNNRPRVMRFVAQAFAGTGVAPVDYVAGVAERIDYWKQKVYAWAKRIRRYKARADRYHVNRTFQTNQRSVYQAWERPQERVSDVHLPNAAVMAEFWRKIWSVPVSHSEGEWFDVVGRSCGPIQEMEPVVISREDLACAVRAAPNWKSPGPDGLHAFWLKRLQGSHSRLATQFQEALQLGSLPSFMTSGVTHLIYKSGSTSEPKNYRPITCLPTVYKLLTSILRIKINNHLKAQHILSPTQNGCRGGSRGTKDLLLIDMAICQQVRRSRKNVSMAWIDYKKAYDSVPHTWLGRVLELYRVHPALCSFLGSCMGQWTTVLRHPGCGGLSGSSDLIKISRGIFQGDSLSPLWFCLALNPLSAILKDSKLGYHLRRESEPISHLLYMDDLKLYASKKTDLMELLKITGNFSNDIGMEFGVDKCAVIHVQRGRVEDSFNVQLSEDISLRSLSEMDSYKYLGMSQALSIAEQDMKQSLKDWFFARLIKVLKSLLSGGNKVRAFNVWVMPVLTYSFGILRWTQSELDALDRKVRRLLTAYRMHHPRSSVMRLYIPRKCGGRGFLNAKTLHNREVCNLRQYFLSVSVVMYRDVAAIDRGLTPLSLANENWRRPQVLSISDRTAIWKGKELHGRFYRALTGPDVDQLASVNWLRFSNLFGETEGFVFAIMDEVIMTNNYRKHILKDGTVDICRACHRPGESIRHVVSGCSRLANGEYLHRHNQVARIIHQQLALKYGLVDSEVPYYQYQPLPVLESGHITLYWDRSIITDRTIVANKPDIVIIDRSMRRVMLVDVTIPHDENLVKAEKEKLSKYLDLAHEVTAMWNVDSTIIIPMVVSVNGLIAKSFDKHLEKLSLGSWVKGLIQKAVMLDTARIVRRFLSLEP

SEQ ID NO: 27570 - protein, 1204 aa, Phalera bucephala
MAEPSRRNPVRLCRQRDARSPSARPTPLPGSPTSPQPSEDEDFFTPPTSGASSDDAGISASPPTLTSARRGRPPLPARLGPAGHCAPPTAPATGGVVRRMRWTPELNLSVMRAYYGATEGGTILTAYRPKLLSLFQGLHPTVAVTAQRLSDQVRAIQRCKLLDDTVLERLHREALPARTESNVRSVEDPISLNNFARSEEVNSEQVSVSDQLQEQVRRALEDAFAEYRSAPISLRPCLPRLPMHRRNISLVSALDNVLKPHWETSVDLCDTHSILYCGAVAVCRVAGVRFPNLHRATQPTNAKPLWQCRIERRINMARTLIAKLLCFQAGNNRPRVVRFVTQAFAGTRVAPVDYVAGVAERIDYWKQKVYAWAKRIRRYKARADRYHVNRTFQTNQRSVYQAWERPQERVTDVHLPNAAVMAEFWRKIWSVPVTHSEGEWFDVVGRSCGPIQEMEPVVISREDLACAVRAAPNWKSPGPDGLHAFWLKRLQGSHSRLATQFQEALQLGSLPSFMTSGVTHLIHKSGSTSEPKNYRPITCLPTVYKLLTSILRIKINNHLKAQHILSPTQNGCKGGSRGTKDLLLIDIAICQQVRRSRKNVSMAWIVYKKAYDSVPHTWLGRVLELYRVHPALCSFLGSCMRQWTTVLRHPGCGGLSGSSDLIKISRGIFQGDGLSPLWFCLALNPLSAILKDSKLGYHLRRESEPISHLLYMDDLKLYASKKTDLMELLKITGNFSNDIGMEFGVDKCAVIHVQRGRVEDSFNLQLSEDISLRSLSEMDSYKYLGMSQALSIAEQDMKQSLRDRFFARLIKVLKSLLSGGNRVRAFNGWVMPVLTYSFGILRWTQSELDALDRKVRRLLTAYRMHHPRSSVMRLYIPRKCGGRGFLNAKTLHNREVCNLRQYFLSVSVVMYRDVAAIDRGLTPLSLANGNWRRPQVLSTSDRTAIWKGKELHGRFYRALTGPDVDQLASVTWLRFSNLFGETEGFVFAIMDEVIMTNNYRKYILKDGTVDICRACHRPGESIRHVVSGCSRLANGEYLHRHNQVARIIHQQLALKYGLVDSEVPYYQYQPLPVLESGHITLYWDRSVITDRTIVANKPDIVIIDRSMRRVMLVDVTIPHDENLVKAEKEKLSKYLDLAHEVTAMWNVDSTIIIPMVVSVNGLIAKSFDKHLEKLSLGSWVKGLIQKAVMLDTARIVRRFLSLEP

SEQ ID NO: 27571 - protein, 1204 aa, Phalera bucephala
MAEPSRRNPVRLCRQRDARSPSARPTPLPGSPTSPQPSEDEDFFTPPTSGASSDDAGISASPPTLTSARRGRPPLPARLGPAGHCAPPTAPATGGVVRRMRWTPELNLSVMRVYYGATEGGTILTAYRPKLLSLFQGLHPTVAVTAQRLSDQVRAIQRCKLLDDTVLERLHREALPARTESNVRSVEDPISLNNFARSEEVNSEQVSVSDQLQEQVRRALEDAFAEYRSAPISLRPCLPRLPMHRRNISLVSALDNVLKPHWETSVDLCDTHSILYCGAVAVCRVAGVRFPNLHRATQPTNAKPLWQCRIERRINMARTLIAKLLCFQAGNNRPRVVRFVTQAFAGTRMAPVDYVAGVAERIDYWKQKVYAWAKRIRRYKARADRYHVNRTFQTNQRSVYQAWERPQERVTDVHLPNAAVMAEFWRKIWSVPVTHSEGEWFDVVGRSSGPIQEMEPVVISREDLACAVRAAPNWKSPGPDGLHAFWLKRLQGSHSRLATQFQEALQLGSLPSFMTSGVTHLIHKSGSTSEPKNYRPITCLPTVYKLLTSILRIKINNHLKAQHILSPTQNGCKGGSRGTKDLLLIDIAICQQVRRSRKNVSMAWIDYKKAYDSVPHTWLGRVLELYRVHPALCSFLGSCMRQWTTVLRHPGCGGLSGSSDLIKISRGIFQGDSLSPLWFCLALNPLSAILKDSKLGYHLRRESEPISHLLYMDDLKLYASKKTDLMELLKITGNFSNDIGMEFGVDKCAVIHVQRGRVEDSFNLQLSEDISLRSLSEMDSYKYLGMSQALSIAEQDMKQSLRDRFFARLIKVLKSLLSGGNRVRAFNGWVMPVLTYSFGILRWTQSELDALDRKVRRLLTAYRMHHPRSSVMRLYIPRKCGGRGFLNAKTLHNREVCNLRQYFLSVSVVMYRDVAAIDRGLTPLSLANGNWRRPQVLSISDRTAIWKGKELHGRFYRALTGPDVDQLASVTWLRFSNLFGETEGFVFAIMDEVIMTNNYRKYILKDGTVDICRACHRPGESIRHVVSGCSRLANGEYLHRHNQVARIIHQQLALKYGLVDSEVPYYQYQPLPVLESGHITLYWDRSVITDRTIVANKPDIVIIDRSMRRVMLVDVPIPHDENLVKAEKEKLSKYLDLAHEVTAMWNVDSTIIIPMVVSVNGLIAKSFDKHLEKLSLGRWVKGLIQKAVMLDTARIVRRFLSLEP

SEQ ID NO: 27572 - protein, 1204 aa, Phalera bucephala
MAEPSRRNPVRLCRQRDARSPSARPTPLPGSPTSPQPSEDEDFFTPPTSGASSDDTGISASPPTITSARRGRPPLPARLGPAGHCAPPTAPATGGVVRRMRWTPELNLSVMRAYYGATEGGTILTAYRPKLLSLFQGLHPTVAVTAQRLSDQVRAIQRCKLLDDTVLERLHREALPARTESNVRSVEDPISLNNFARSEEVNSEQVSVSDQLQEQVRRALEDAFAEYRSAPISLRPCLPRLPMHRRNISLVSALDNVLKPHWETSVDLCDTHSILYCGAVAVCRVAGVRFPNLHRATQPTNAKPLWQCRIERRINMARSLIAKLLCFQAGNNRPRVVRFVTQAFAGTRVAPVDYVAGVAERIDYWKQKVYAWAKRIRRYKARADRYHVNRTFQTNQRSVYQAWERPQERVTDVHLPNAAVMAEFWRKIWSVPVTHSEGEWFDVVGRSCGPIQEMEPVVISREDLACAVRAAPNWKSPGPDGLHAFWLKRLQGSHSRLATQFQEALQLGSLPSFMTSGVTHLIHKSGSTSEPKNYRPITCLPTVYKLLTSILRIKINNHLKAQHILSPTQNGCKGGSRGTKDLLLIDIAICQQVRRSRKNVSMAWIDYKKAYDSVPHTWLGRVLELYRVHPALCSFLGSCMRQWTTVLRHPGCGGLSGSSDLIKISRGIFQGDSLSPLWFCLALNPLSAILKDSKLGYHLRRESEPISHLLYMDDLKLYASKKTDLMELLKITGNFSNDIGMEFGVDKCAVIHVQRGRVEDSFNLQLSEDISLRSLSEMDSYKYLGMSQALSIAEQDMKQSLRDRFFARLIKVLKSLLSGGNRVRAFNGWVMPVLTYSFGILRWTQSELDALDRKVRRLLTAYRMHHPRSSVMRLYIPRKCGGRGFLNAKTLHNREVCNLRQYFLSVSVVMYRDVAAIDRGLTPLSLANGNWRRPQVLSTSDRTAIWKGKELHGRFYRALTGPDVDQLASVTWLRFSNLFGETEGFVFAIMDEVIMTNNYRKYILKDGTVDICRACHRPGESIRHVVSGCSRLANGEYLHRHNQVARIIHQQLALKYGLVDSEVPYYQYQPLPVLESGHITLYWDRSVITDRTIVANKPDIVIIDRSMRRVMLVDVTIPHDENLVKAEKEKLSKYLDLAHEVTAMWNVDSTIIIPMVVSVNGLIAKSFDKHLEKLSLGSWVKGLIQKAVMLDTARIVRRFLSLEP

SEQ ID NO: 27573 - protein, 1105 aa, Phalera bucephala
MRWTPELNLSVMRAYYGATEGGTILTAYRPKLLSLFQGLHPTVAVTAQRLSDQVRAIQRCKLLDDTVLERLRREALPARTDFNMRSVEEPISLNNFARSEEVNSEQVSVSDQLQEQVRRALEDAFAEYRSAPISLRPCLPRLPMHRRNISLVSALDNVLKPHWETSVDLCDTHSILYCGAVAVCQVAGVRFPNLHRATQPTNTKPFWQCRIERRINMARTLIAKLLCFQAGNNRPRVMRFVAQAFAGTGVAPVDYVAGVAERIDYWKQKVYAWAKRIRRYKARADRYHVNRTFQTNQRSVYQAWERPQERVTDVHLPNAAVMAEFWRKIWSVPVSHSEGEWFDVVGRSCGPIQEMEPVVISREDLACAVRAAPNWKSPGPDGLHAFWLKRLQGSHSGLATQFQEALQLGSLPSFMTSGVTHLIYKSGSTSEPKNYRPITCLPTVYKLLTSILRIKINNHLKAQHILSPTQNGCKGGSRGTKDLLLIDMAICQQVRRSRKNVSMAWIDYKKAYDSVPHTWLGRVLELYRVNPALCSFLGSCMGQWTTVLRHPGCGGLSGSSDLIKISRGIFQGDSLSPLWFCLALNPLSAILKDSKLGYHLRRESEPISHLLYMDDLKLYASKKTDLMELHKITGNFSNDIGMEFGVDKCAVIHVQRGRVEDSFNLQLSEDISLRSLSEMDSYKYLGMSQALSIAEQDMKQSLKDRFFARLIKVLKSLLSGGNKVRAFNGWVMPVLTYSFGILRWTQSELDALDRKVRRLLTAYRMHHPRSSVMRLYIPRKCGGRGFLNAKTLHNREVCNLRQYFLSVSVVMYRDVAAIDRGLTPLSLANENWRRPQVLSISDRTAIWKGKELHGRFYRALTGPDVDQLASVNWLRFSNLFGEIEGFVFAIMDEVIMTNNYRKHILKDGTVDICRACHRPGESIRHVVSGCSRLANGEYLHRHNQVARIIHQQLALKYGLVDSEVPYYQYQPLPVLESGHITLYWDRSIITDRTIVANKPDIVIIDRSMRRVMLVDVTIPHDENLVKAEKEKLSKYLDLAHEVTAMWNVDSTIIIPMVVSVNGLIAKSFDKHLEKLSLGSWVKGLIQKAVMLDTARIVRRFLSLEP

SEQ ID NO: 27574 - protein, 1204 aa, Phalera bucephala
MAEPSRRNPVRLCRQRDARSPSARPTPLPGSPASPQPSEDEDFFTPPTSGASSDDAGISATPPTLTSARRGRPPLPARLGPAGHCAPPTAPATGGVVRRMRWTPELNLSVMRAYYGATEGGTILTAYRPKLLSLFQGLHPTVAVTAQRLSDQVRAIQRCKLLDDTVLERLRREALPARTDSNVRSVEEPISLNNFARSEEVNSEQVSVSDQLQEQVRRALEDAFAEYRSAPISLRPCLPRLPMHRRNISLVSALDNVLKPHWETSVDLCDTHSILYCGAVAVCRVAGVRFPNLHRATQPTNTKPFWQCRIERRINMARTLIAKLLCFQAGNNRPRVMRFVAQAFAGTGVAPVDYVAGVAERIDYWKQKVYAWAKRIRRYKARADRYHVNRTFQTNQRSVYQAWERPQERVTDVHLPNAAVMAEFWRKIWSVPVSHSEGEWFDVVGRSCGPIQEMEPVVISREDLACAVRAAPNWKSPGPDGLHAFWLKRLQGSHSRLATQFQEALQLGSLPSFMTSGVTHLIYKSGSTSEPKNYRPITCLPTVYKLLTSILRIKINNHLKAQHILSPTQNGCKGGSRGTKDLLLIDMAICQQVRRSRKNVSMAWIDYKKAYDSVPHTWLGRVLELYRVHPALCSFLGSCMRQWTTVLRHPGCGGLSGSSDLIKISRGIFQGDSLSPLWFCLALNPLSAILKDSKLGYHLRRESEPISHLLYMDDLKLYASKKTDLMELLKITGNFSNDIGMEFGVDKCAVIHVQRGRVEDSFNLQLSEDISLRSLSEMDSYKYLGMSQALSKAEQDMKQSLKDRFFARLIKVLKSLLSGGNKVRAFNGWIMPVLTYSFGILRWTQSELDALDRKVRRLLTAYRMHHPRSSVMRLYIPRKCGGRGFLNAKTLHNREVCNLRQYFLSVSVVMYRDVAAIDRGLTPLSLANETWRRPQVLSISDRTAIWKGKELHGRFYRALTGPDVDQLASVNWLRFSNLFGETEGFVFAIMDEVIMTNNYRKHILKDGTVDICRACHRPGESIRHVVSGCSRLANGEYLHRHNQVARIIHQQLALKYGLVDSEVPYYQYQPLPVLESGHITLYWDRSIITDRTIVANKPDIVIIDRSMRRVMLVDVTIPHDENLVKAEKEKLSKYLDPAHEVTAMWNVDSTIIIPMVVSVNGLIAKSFDKHLEKLSLGSWVKGLIQKAVMLDTARIVRRFLSLEP

SEQ ID NO: 27575 - protein, 1086 aa, Bombyx mori
MDFSNARGRAKPLFSVFQTLCPTVNVSTQRLSDQVRAIQRLRLLDQSLLDRLRYEALPVPIEPQENQVVTDTVAPIIQHDEEIQEQVCASNQDYERLSSALEDSIQEYRLVSACSRPRLPRLPMHRRNVSLVGALDSILKPYLESSTDLIDTHSLLYCGAVAVCRVAEVKSPNLTQTAYRPPTKPQWQCRIEKRIDRARILIAKLMCFQKGNTRPRVMCFVDQAFAGTGISSNEYMTCIIERIDFWKQKVYAWASRIRRYRLRSERYHLNRVFQRGQRSVYRNWESSQSQVTDEPYNVNEEDMSTFWNNIWSIPIGHSEGEWIQTVRRECESYKEMDSITISAVDVSHAVRSMPNWKSPGPDGLHSYWIKWIRSSHERLAAQFQQALELGSLPDFMTSGITYLIYKSGNTSDPKNYRPITCLPTIYKLLTSILRIKIQNHIFNNNILSPNQNGCKAGSRGTKDLLLIDMTITQQVRRSKRNVHMAWIDYKKAYDSVPHTWLMRVLELYKINPILCSFLSSCMGQWSTFLSQPGQMTSSAAPNLIRIKRGIFQGDSLSPLWFCLALNPLSTLLKDSTLGYRLRRGAEAISHLLFMDDLKLFATKKPDLMSLLKITDNFSKAIGMEFGVDKCAFIDVQRGKVVSSDCLLLNHSVVLKSLCESETYKYLGMFEVLNIVDADMKQSFRDRFFGRLIKVLKSHLSGGNKIRAFNGWVMPMLTYSFGILRWTQSELDVLDRKVRRLLTAYRMHHPRSSVMRLYIPRKCGGRGILNAKDLHNREIYNLREYFLKMNVNMYRDVVAVDKGLTPLSLANGNWKRLKVESISDRITVWRSKELHGRFYRALTGPDVDQLASVAWLRFSNLFGETEGFIFAIMDEVIMTNNYRKYILKDGTVDICRACHRPGESIRHIVSGCSRFANGEYLHRHNQVARIIHQQLALKYGFLDSAVPYYQYQPQPVLDNGHVTLYWDRSIITDRYIVANKPDIVIIDRSARRAVLVDVTIPHDENLVKAEKDKLIKYLDLAHETTAMWHVDSTIIVPIVVSVHGLIAKSFDQHLKKLSLSSWVKGLIQKAVILDTARIVRRFLTLES

SEQ ID NO: 27576 - protein, 1197 aa, Bombyx mori
MSTTTALRKNPSRQCRQVTCGARRTSPCIPSCSSDGSPSPTRIENLSSDETQPSPAPPRPVRRGRPPLARLGSTRRNAPSTVPATSGVVRSRMRWNENINMNVMRAYYEATEGETNLSAYRSKMFSVFQTLCPTVNVSTQRLSDQVRAIQRLRLLDQSLLDRLRYEALPVPIEPQENQVVTDTVAPIIQHDEEIQEQVCASNQDYERLSSALEDSIQEYRLVSSCSRPRLPRLPMHRRNVSLVGALDSILKPYLESSTDLIDTHSLLYCGAVAVCRVAEVKSPNLTQTAYRPPTKPQWQCRIEKRIDRARILIAKLMCFQKGNTRPRVMCFVDQAFAGTGISSNEYMTCIIERIDFWKQKVYAWASRIRRYRLRSERYHLNRVFQRDQRSVYRNWESSQSQVTNEPYNVNEEDMSTFWKNIWSIPIGHSEGEWIQTVRRECESYKEMDPITISAIDVSRAVRSMPNWKSPGPDGLHSYWIKWIRSSHERLAAQFQQALEMGSLPDFMTSGITYLIYKSGNTSDPKNYRPITCLPTIYKLLTSILRIKIQNHIFNNNILSPNQNGCKAGSRGTKDLLLIDMTITQQVRRGKRNVHMAWIDYKKAYDSVPHTWLMRVLELYKINPILCSFLSSCMGQWSTFLSQPGQMTSSAAPNLIRIKRGIFQGDSLSPLWFCLALNPLSTLLKDSTLGYRLRRGAEAISHLLFMDDLKLFASKKPDLMSLLKITDSFSKAIGMEFGVDKCAFIDVQRGKVVSSDCLLLNHSVVLKSLCESETYKYLGMFEVLNIVDADMKQSFRDRFFGRLIKVLKSHLSGGNKIRAFNGWVMPMLTYSFGILRWTQSELDVLDRKVRRLLTAYRMHHPRSSVMRLYIPRKCGGRGILNTKDLHNREIYNLREYFLKMNVNMYRDVVAVDKGLTPLSLANGNWKRLKVEGISDRITVWRSKELHGRFYRALTGPDVDQLASVAWLRFSNLFGETEGFIFAIMDEVIMTNNYRKYILKDGTVDICRACHRPGESIRHIVSGCSRFANGEYLHRHNQVARIIHQQLALKYGFLDSAVPYYQYQPQPVLDNGHVTLYWDRSIITDRYIVANKPDIVIIDRSARRAVLVDVTIPHDENLVKAEKDKLIKYLDLAHETTAMWHVDSTIIVPIVVSVHGLIAKSFDQHLKKLSLSSWVKGLIQKAVILDTARIVRRFLTLES

SEQ ID NO: 27577 - protein, 868 aa, Eilema depressum
MRFVTRAFSGTDIRPREFLSRVTERIDFLKQKIYAWANRIRRYKRRVDRYSQNRTFQRDERWVYRSWERPDSNVTDMRRPDDDATNTFWRSIWSTPVSHTEGDWMRIVERSCESIETMEPVTISNEDVTNAVRLLPNWRSAGPDGLHNFWLKWFRSSHGRLAMQFQSCLESGSLPAFITTGVTHLLHKSGSTTDPKNYRPITCLPTVYKLLTSILREKISSHLIDNSIMSISQNGCRSGARGTKELLIIDMAICQQARRHRKDLATCWIDYKKAYDSVPHTWLLRVLELYKIDATLCAFMKTCMGQWRTVLCYPGCRQICEDNGLIKIERGIFQGDSLSPLWFCLALNPLSTILESSGLGCRLRREGQVISHLLYMDDLKLFAPNNLHLIELLKLTETFSSSIRMDFGVDKCAVMHVKRGRIVESESAELSDSTKLRALSAADTYKYLGMSQALGISEAGMKQSLQERFFGRLRKVLKSLLSGGNKVRACNGWVMPVLMYSFGILRWTQTELDALDRKVRAHLTAYRMHHPRSSVMRLYIPRKCGGRGFLNAKTLHNREVCNLREYFLHNDADMHRDVVMVDNGLTPLGLAKENWRKPAVLSINDRRDVWKGKELHGRFYRALHGPEIDIPASLSWLRFGDLFGETEGFVFAIMDEVVMTNNYRRYIIKDGTVDICRACHRPGESLRHIISGCSRLANGEYLHRHNQVARIIHQQLALKYSLVESEVPYYRYVPDPVLENGHITLYWDRSIITDRTIVANKPDIVIIDRLERRAIIVDITIPHDENLVKAEKEKQIKYLDLAHEIVDMWDVDSAIIVPIVVSVHGLIAKSLDQHLKRLSLDGWLKGLMQKAVLLGTARIVRKFLSLEP

SEQ ID NO: 27578 - protein, 1103 aa, Clostera curtula
MRWTHQLNEDVMRAYYGATKGGTVLTSYRSKMLSLFQALHPTVSVTAQRLSDQVRVIQRLGLLDAPVLEQLRGESQPAPSEPALENVTMAPRDPFPESDANVHEQVSISHQDIERLRSTLENVINEYRSMPIFDRPQLPRLPLNPYNISLVNAFDQILKTYIDSSSDLTNTHSILYCGAVAACYEAGVRFPASYQNARPVGSPPLWKQRIERRITAARTIIAKLYCFQAGNTRPKIMRFVKQAFAGTEINSNNYLSHIIERIDYWKQKVYAWAKRIKRYSIRMERYSINKIFQRDQRSIYRKWHLKDQTPDKQLPNIDEMSTFWRNIWSNPINHSENECFEVVRRACENISEMSPVLITATDVKSAVGWAPNWKSPGPDRLHAYWIKSYRSSHERLATQFQQALESGNVPNFMTTGLTHLIHKSGSTSDPKNFRPITCLPIIYKILTSILRTKINAHVMDNNILSPSQNGCKAKSRGTKDLLLIDMAISQQVRRNKRNVFMAWIDYKKAYDSVPHSWLKKILNLYRIHPTLCDFLSTCMEQWSTILLHPGHVNYFDSSNLVKIKRGIFQGDSLSPLWFCLALNPLSTLLKCSGLGYRLRKENEAISHLLYMDDLKLYASKKPDLMELLKITDNFSKSIGMEFGVDKCAVLNIQRGRIVNSECLQVSRNVSLRCLSESETYKYLGMSEALGIADADMKQVLKERFYSRLTKVLKSLLSGGNKVRAFNSWVMPVLAYSFGILRWTQTELDAVDRKVRRLLTAHRMHHPRSSVMRMYISRKCGGRGFLNAKDLHNREIHNLREYFLKVNVDMYRNVVAIDKGLTPLSLAIENWRKPKVMSISDRTAIWKDKELHGRFYRALTGSDVDQLASVDWLRFGNLFGETEGFVFAIMDEVMMTNNYRKHILKDGTVDICRACHRPGESIRHIVSGCSRLANGEYLHRHNQVAKIIHQQLAFKYGLVSTEVPYYQYQPQPVLENDHVTLYWDRSIITDRYIAANKPDIVIIDRSTRRVKLVDITIPHDENLVKAEKEKMIKYLDLAHEVTAMWSAESTSIIPIVLSVHGLISKSFDGHLNQLSISGWVKRLMQKAVLLETARIVRRFLSLKH

SEQ ID NO: 27579 - protein, 1205 aa, Phlogophora meticulosa
MQRYPCRLRRQRAANREDDSARPTSPSGSSCSSKSSEDVFFTPPATAGSNDEEARTPTPSRRRRPALRGRLPLPASLGQADPSAPPTVPATGGIVRRMRWTTDLNKSVMQAYYRATDGGTNLTAYRPRMLSLFQTLQPTATVTAQRLSDRVRLIQRRKLLDDDVLERLRLETQQAHIDSTSTNPPEVQGNHNSVQQDIPSGVEECVQVSVSNQDNEQLRSALNDAIAKYHVSPLSERPRLPRLPINKRNLALMGALNSILSSELRICKTLSLTHSILFCGAVAACRVAGVRFPNKERISRLPAAVPLWQYRIEKRISQARALIGKLIAFRNGNTRPRVMRFVNQAFEGTNIRHENYISWVTERIDFWKQKVFAWAKRIRRYKERYDRFHINRIFQSDEKKVYRNWEKPQQVVDMHLPNADAMSTFWRNLWSMPVNYCEDDWIGVVERACESLEPMPSIKICQKDVSFALRLAPNWKSPGPDGLHNFWLKWFHCSHGLLATQFQDALELGELPEFMTTGVTHLLYKSGNTTEPQNYRPITCLPTIYKVLTSILKFKINSHISRNNIMAATQNGCKSGARGTKELLLIDRAICQQVRRNKKSISIAWIDYKKAYDSVPHAWLKKVLELYKIHPDICGLLSSCMRRWTTVLRQPGNGDAVDSSNLIRINRGIFQGDSLSPLWFCLALNPLSTLLKDSKLGYRLHRGAEPISHLLYMDDLKLYAPKKTQLMELLKITESFSKSIKMEFGVDKCAVAHIQLGSVVNSESLPLSGDIILRSLSELETYKYLGMPQALGIDDKGVKQSLRERFMTRLLKVLNSFLSGGNKVRAFNGWVMPLLSYSFGILRWTQSELDALDRKVRCLLTAHRMHHPRSSVMRLYIPRRCGGRGFLNAKNLHNREVYNLREYFLHSDVGMHQDVALIDKGFTPLSLANENWRKPLVLSISDRRDVWKGKELHGRFYRTLTGPDIDPIASVAWLRFGNLFGETEGFVFAIMDEVIKTRNYQRHIIKDGTVDVCRACHLPGESIRHIISGCSRLANGEYLHRHNLVARIIHQQLALKYALVDIEVPYYQYHPEPVLDNGQITLYWDRLIITDRFIPANKPDIVIIDRSMSRAVIVDVTIPHDENLVKAEKDKIIKYLDLAHEVTSMWNINSTIIVPIVISVNGLIAKSFDQHLEQLSLNSWVKSQMQKAVVMDTARIVRRFLSLDP

SEQ ID NO: 27580 - protein, 962 aa, Phalera bucephala
MHRRNISLVSALDNVLKPHWETSVDLCDTHSILYCGAVAVCRVAGVRFPNLHRATQPTNTKPFWQCRIERRINMARTLIAKLLCFQAGNNRPRVMRFVAQAFAGTRVAPVDYVAGVAERIDYWKQKVYAWAKRIRRYKARADRYHVNRTFQTNQRSIYQAWERPQERVTDVHLPNAAVMAEFWRKIWSVPVTHSEGEWFDVVGRSCGPIQEMEPVVISREDLACAVRAAPNWKSPGPDGLHAFWLKRLQGSHSRLATQFQEALQLGSLPSFMTSGVTHLIYKSGSTSEPKNYRPITCLPTVYKLLTSILRIKINNHLKAQHILSPTQNGCKGGSRGTKDLLLIDMAICQQVRRSRKNVSMAWIDYKKAYDSVPHTWLGRVLELYRVHPALCSFLGSCMGQWTTVLRHPGCGGLSGSSDLIKISRGIFQGDSLSPLWFCLALNPLSAILKDSKLGYHLRRESEPISHLLYMDDLKLYASKKTDLMELLKITGNFSNDIGMEFGVDKCAVIHVQRGRVEDSFNLQLSEDISLRSLSEMDSYKYLGMSQALSIAEQDMKQSLKDRFFARLIKVLKSLLSGGNKVRAFNGWVMPVLTYSFGILRWTQSELDALDRKVRRLLTAYRMHHPRSSVMRLYIPRKCGGRGFLNAKTLHNREVCNLRQYFLSVSVVMYRGVAAIDRGLTPLSLANENWRRPQVLSISDRTAIWKGKELHGRFYRALTGPDVDQLASVNWLRFSNLFGETEGFVFAIMDEVIMTNNYRKHILKDGTVDICRACHRPGESIRHVVSGCSRLANGEYLHRHNQVARIIHQQLALKYGLVHSEVPYYQYQPLPVLESDHITLYWDRSIITDRTIVANKPDIVIIDRSMRRVMLVDVTIPHDENLVKAEEEKLSKYLDLAHEVTAMWNVDSTIIIPMVVSVNGLIAKSFDKHLEKLSLGSWVKGLIQKAVMLDTARIVRRFLSLEP

SEQ ID NO: 27581 - protein, 1204 aa, Phalera bucephala
MAEPSRRNPVRLCRQRDARTPSARPTPLPGSPTSPQPSEDEDFFTPPTSGASSDDAGISASPPTSTSARRGRPPLPARLGPAGHCAPPTAPATGGVVRRMRWTPELNLSVMRAYYGATEGGTILTAYRPKLLSLFQGLHPTVAVTAQRLSDQVRAIQRCKLLDDTVLERLHREALPARTESNVRSVEDPISLNNFARSEEVNSEQVSVSDQLQEQVRRVLEDAFAEYRSAPISLRPCLPRLPMHRRNISLVSALDNVLKPHWETSVDLCDTHSILYCGAVAVCRVAGVRFPNLHRATQPTNAKPLWQCRIERRINMARTLIAKLLCFQAGNNRPRVVRFVTQAFAGTRVAPVDYVAGVAERIDYWKQKVYAWAKRIRRYKARADRYHVNRTFQTNQRSVYQAWERPQERVTDVHLPNAAVMAEFWRKIWSVPVTHSEGEWFDVVGRSCGPIQEMEPVVISREDLACAVRAAPNWKSPGPDGLHAFWLKRLQGSHSRLATQFQEALQLGSLPSFMTSGVTHLIHKSGSTSEPKNYRPITCLPTVYKLLTSILRIKINNHLKAQHILSPTQTGCKGGSRGTKDLLLIDIAICQQVRRSRKNVSMAWIDYKKAYDSVPHTWLGRVLELYRVHPALCSFLGSCMRQWTTVLRHPGCGGLSGSSDLIKISRGIFQGDSLSPLWFCLALNPLSAILKDSKLGYHLRRESEPISHLLYMDDLKLYASKKTDLMELLKITGNFSNDIGMEFGVDKCAIIHVQRGRVEDSFNLQLSEDISLRSLSEMDSYKYLGMSQALSIAEQDMKQSLSDRFFARLIKVLKSLLSGGNKVRAFNGWVMPVLTYSFGILRWTQSELDALDRKVRRLLTAYRMHHPRSSVMRLYIPRKCGGRGFLNAKTLHNREVCNLRQYFLSVSVVMYRDVAAIDRGLTPLSLANGNWRRPQVLSTSDRTAIWKGKELHGRFYRALTGPDVDQLASVTWLRFSNLFGETEGFVFAIMDEVIMTNNYRKHILKDGTVDICRACHRPGESIRHVVSGCSRLANGEYLHRHNQVARIIHQQLALKYGLVDSEVPYYQYQPLPVLESGHITLYWDRSVITDRTIVANKPDIVIIDRSMRRVMLVDVTIPHEENLVKAEKEKLSKYLDLAHEVTTMWNVDSTIIIPMVVSVNGLIAKSFDKHLEKLSLGSWVKGLIQKAVMLDTARIVRRFLSLEP

SEQ ID NO: 27582 - protein, 1204 aa, Phalera bucephala
MAEYPRRNPVRRCRQRIAQGHSARPSPLRGSPNSPQSSENELYFTPPTSGASSDETEPPASSHPLRPERRGRPPLPACIGPAEHCAPPTAPATGGVVRRMRWTSELNMSVMRAYYGATKGETILTAYRPKLLSLFQELHPTVAVTAQRLSDQVRAIQRCKLLDDTVLERLRSETCPARTESDLRSFEEPISLDSFARSEEVNSGQVSVGDQLQEQVRRALKDAFAEYRSAPISLRPCLPRLPMHRHNISLVGALDNVLKSHWETSVDLCDTHSILYCGAVAVCRVAGVRFPNLHRATQPTNAKPFWQCRIERRINMARTLIAKLLCFQAGNNRPRVVRFVAQAFAGTGVAPVDYMARVTERIDYWKQKVYAWANRIRRYRERADRYHVNRTFEVNQRSVYQAWERPQERVTDVHLPDAATMAEFWRKIWSVPVSHSEGEWFDVVGRSCEPIQEMEPVVITRDDVACAVSAAPNWKSPGPDGLHAFWLKRLQGSHARLATQFQEALELGSLPSLLTTGVTHLIHKSGSTLEPKNYRPITCLPTVYKLLTSILRTKINNHLKAQHILSPTQNGCKGGSRGTKDLLLIDMAICQQVRRSRKNVSMAWIDYKKAYDSVPHTWLRRVLELYKVHPALCSFLGLCMGQWTTVLRHPGYGGLSGSSDLIKISRGIFQGDSLSPLWFCLALNPLSAILKNSKLGYHLRRGSEPISHLLYMDDLKLYASKKTDLMELLKITGNFSNDIGMEYGVDKCAVIHVQRGRVEDSFNLQLSEDISLRSLSEMDSYKYLGMSQALSIAEQDMKQSLKDRFFARLMKVLKSLLSGGNRVRAFNGWVMPVLTYSFGILRWTQSELDALDRKVRRLLTAYRMHHPRSSVMRLYIPRRCGGRGFLNAKTLHNREVCNLRQYFLSVSVVMYRDVAAIDRGLTPLSLANGNWRRPQVLSISDRTAIWKGKELHGRFYRALTGPDVDQLASVTWLRFSNLFGETEGFVFAIMDEVIMTNNYRKHILKDGTVDICRACHRPGESIRHVVSGCSRLANGEYLHRHNQVAKIIHQQLALKYDLVDSEVPYYQYQPLPVLESGHITLYWDRSIITDRTIVANKPDIVIIDRSMRRVMLVDVTIPHDENLVKAEKEKISKYLDLAHEVTAMWNVDSTIIIPMVVSVNGLIAKSFDKHLEKLSLGSWVKGLIQKVVVLDTARIVRRFLSLEP

SEQ ID NO: 27583 - protein, 1204 aa, Phalera bucephala
MAEPSRRNPVRLCRQRDARSPSARPTPLPGSPTSPQPSEDEDFFTPPTSGASSDDAGISASPPTLTSARRGRPPLPARLGPAGHCAPPTAPATGGVVRRMRWTPELNLSVMRAYYGATEGGTILTAYRPKLLSLFQGLHPTVAVTAQRLSDQVRAIQRCKLLDDTVLERLRREALPARTDFNVRSVEEPISLNNFARSEEVNSEQVSVSDQLQEQVRRALEDAFAEYRSAPISLRPCLPRLPMHRRNISLVSALDNVLKPHWETSVDLCDTHSILYCGAVAVCRVAGVRFPNLHRATQPTNAKPLWQCRIERRINMARTLIAKLLCFQAGNNRPRVVRFVTQAFAGTRVAPVDYVAGVAERIDYWKQKVYAWAKRIRRYKARADRYHVNRTFQTNQRSVYQAWERPQERVTDVHLPNAAVMAEFWRKTWSVPVTHSEGEWFDVVGRSCGPIQEMEPVVISREDLACAVRAAPNWKSPGPDGLHAFWLKRLQGSHSRLATQFQEALQLGSLPSFMTSGVTYLIHKSGSTSEPKNYRPITCLPTVYKLLTSILRIKINNHLKAQHILSPTQNGCKGGSRGTKDLLLIDIAICQQVRRSRKNVSMAWIDYKKAYDSVPHTWLGRVLELYRVHPALCSFLGSCMRQWTTVLRHPGCGGLCGSSDLIKISRGIFQGDSLSPLWFCLALNPLSAILKDSKLGYHLRRESEPISHLLYMDVLKLYASKKTDLMELLKITGNFSNDIGMEFGVDKCAVIHVQRGRVEDSFNLQLSEDISLRSLSEMDSYKYLGMSQALSIAEQDMKQSLKDRFFARLIKVLKSLLSGGNKVRAFNGWVMPVLTYSFGILRWTQSELDALDRKVRRLLTAYRMHHPRSSVMRLYIPRKCGGRGFLNAKTLHNREVCNLRQYFLSVSVVMYRDVAAIDRGLTPLSLANGNWRRPQVLSTSDRTAIWKGKELHGRFYRALTGPDVDQLASVTWLRFSNLFGETEGFVFAIMDEVIMTNNYRKHILKDGTVDICRACHRPGESIRHVVSGCSRLANGEYLHRHNQVARIIHQQLALKYGLVDSEVPYYQYQPLPVLESGHITLYWDRSVITDRTIVANKPDIVIIDRSMRRVMLVDVTIPHDENLVKAEKEKLSKYLDLAHEVTTMWNVNSTIIIPMVVSVNGLIAKSFDKHLEKLSLGSWVKGLIQKAVMLDTARIVRRFLSLEP

SEQ ID NO: 27584 - protein, 1204 aa, Phalera bucephala
MAEPSRRNPVRLCRQRDARSPSARPTPLPGSPTSPQPSEDEDFFTPPTSGASSDDAGISASPPTITSARRGRPPLPARLGPAGHCAPPTAPATGGVVRRMRWTPELNLSVMRAYYGATEGGTILTAYRPKLLSLFQGLHPTVAVTAQRLSDQVRAIQRCKLLDDTVLERLHREALPARTESNVRSVEDPISLNNFARSEEVNSEQVSVSDQLQEQVRRALEDAFAEYRSAPISLRPCLPRLPMHRRNISLVSALDNVLKPHWETSVDLCDTHSILYCGAVAVCRVAGVRFPNLHRATQPTNAKPLWQCRIERRINMARTLIAKLLCFQAGNNRPRVVRFVTQAFAGTRVAPVDYVAGVAERIDYWKQKVYAWAKRIRRYKARADRYHVNRTFQTNQRSVYQAWERPQERVTDVHLPNAAVMAEFWRKIWSVPVTHSEGEWFDVVGRSCGPIQEMEPVVISREDLACAVRAAPNWKSPGPDGLHAFWLKRLQGSHSRLATQFQEALQLGSLPSFMTSGVTHLIHKSGSTSEPKNYRPITCLPTVYKLLTSILRIKINNHLKAQHILSPTQNGCKGGSRGTKDLLLIDIAICQQVRRSRKNVSMAWIDYKKAYDSVPHTWLGRVLELYRVHPALCSFLGSCMRQWTTVLRHPGCGGLSGSSDLIKISRGIFQGDSLSPLWFCLALNPLSAILKDSKLGYHLRRESEPISHLLYMDDLKLYASKKTDLMELLKITGNFSNDIGMEFGVDKCAVIHVQRGRVEDSFNLQLSEDISLRSLSEMDSYKYLGMSQALSIAEQDMKQSLRDRFFARLIKVLKSLLSGGNRVRAFNGWVMPVLTYSFGILRWTQSELDALDRKVRRLLTAYRMHHPRSSVMRLYIPRKCGGRGFLNAKTLHNREVCNLRQYFLSVSVVMYRDVAAIDRGLTPLSLANGNWRRPQVLSTSDRTAIWKGKELHGRFYRALTGPDVDQLASVTWLRFSNLFGETEGFVFAIMDEVIMTNNYRKYILKDGTVDICRACHRPGESIRHVVSGCSRLANGEYLHRHNQVARIIHQQLALKYGLVDSEVPYYQYQPLPVLESGHITLYWDRSVITDRTIVANKPDIVIIYRSMRRVMLVDVTIPHDENLVKAEKEKLSKYLDLAHEVTAMWNVDSTIIIPMVVSVNGLIAKSFDKHLEKLSLGSWVKGLIQKAVMLDTARIVRRFLSLEP

SEQ ID NO: 27585 - protein, 1132 aa, Phalera bucephala
MAEYPRRNPVRRCRQRIAQGHSARPSPLRGSPNSPQSSENELYFTPPTSGASSDETEPPASSHPLRPERRGRPPLPACIGPAEHCAPPTAPATGGVVRRMRWTSELNMSVMRAYYGATKGETILTAYRPKLLSLFQELHPTVAVTAQRLSDQVRAIQRCKLLDDTVLERLRSETCPARTESDLRSFEEPISLDNFARSEEVNSGQVSVGDQLQEQVRRALKDAFAEYRSAPISLRPCLPRLPMHRHNISLVGALDNVLKSHWETSVDLCDTHSILYCGAVAVCRVAGVRFPNLHRATQPTNAKPFWQCRIERRINMARTLIAKLLCFQAGNNRPRVVRFVAQAFAGTGVAPVDYMARVTERIDYWKQKVYAWANRIRRYRERADRYHVNRTFEVNQRSVYQAWERPQERVTDVHLPDAATMAEFWRKIWSVPVSHSEGEWFDVVGRSCEPIQEMEPVVITRDDVACAVRAAPNWKSPGPDGLHAFWLKRLQGSHARLATQFQEALELGSLPSLLTTGVTHLIHKSGSTLEPKNYRPITCLPTVYKLLTSILRTKINNHLKAQHILSPTQNGCKGGSRGTKDLLLIDMAICQQVRRSRKNVSMAWIDYKKAYDSVPHTWLRRVLELYKVHPALCSFLGLCVGQWTTVLRHPGYGGLSGSSDLIKISRGIFQGDSLSPLWFCLALNPLSAILKNSKLGYHLRRGSEPISHLLYMDDLKLYASKKTDLMELLKITGNFSNDIGMEFGVDKCAVIHVQRGRVEDSFNLQLSEDISLRSLSEMDSYKYLGMSQALSIAEQDMKQSLKDRFFARLMKVLKSLLSGGNRVRAFNGWVMPVLTYSFGILRWTQSELDALDRKVRRLLTAYRMHHPRSSVMRLYIPRRCGGRGFLNAKTLHNREVCNLRQYFLSVSVVMYRDVAAIDRGLTPLSLANGNWRRPQVLSISDRTAIWKGKELHGRFYRALTGPDVDQLASVTWLRFSNLFGETEGFVFAIMDEVIMTNNYRKHILKDGTVDICRACHRPGESIRHVVSGCSRLANGEYLHRHNQVAKIIHQQLALKYDLVDSEVPYYQYQPLPVLESGHITLYWDRSIITDRTIVANKPDIVIIDRSMRRVMLVDVTIPHDENLVKAEKEKNI

SEQ ID NO: 27586 - protein, 881 aa, Bombyx mandarina
MCFQKGNTRPRVMCFVDQAFAGTGISSNEYMTCIIERIDFWKQKVYAWASRIRRYRLRSERYHLNRVFQRDQRSVYRNWESSQSQVTNEPYNVNEEDMSTFWKNIWSIPIGHSEGEWIQTVRRECESYKEMDPITISAIDVSRAVRSMPNWKSPGPDGLHSYWIKWIRSSHERLAAQFQQALEMGSLPDFMTSGITYLIYKSGNTSDPKNYRPITCLPTIYKLLTSILRIKIQNHIFNNNILSPNQNGCKAGSRGTKDLLLIDMTITQQVRRGKRNVHMAWIDYKKAYDSVPHTWLMRVLELYKINPILCSFLSSCMGQWSTFLSQPGQMTSSAAPNLIRIKRGIFQGDSLSPLWFCLALNPLSTLLKDSTLGYRLRRGAEAISHLLFMDDLKLFASKKPDLMSLLKITDSFSKAIGMEFGVDKCAFIDVQRGKVVSSDCLLLNHSVVLKSLCESETYKYLGMFEVLNIVDADMKQSFRDRFFGRLIKVLKSHLSGGNKIRAFNGWVMPMLTYSFGILRWTQSELDVLDRKVRRLLTAYRMHHPRSSVMRLYIPRKCGGRGILNAKDLHNREIYNLREYFLKMNVNMYRDVVAVDKGLTPLSLANGNWKRLKVESISDRITVWRSKELHGRFYRALTGPDVDQLASVAWLRFSNLFGETEGFIFAIMDEVIMTNNYRKYILKDGTVDICRACHRPGESIRHIVSGCSRFANGEYLHRHNQVARIIHQQLALKYGFLDSAVPYYQYQPQPVLDNGHVTLYWDRSIITDRYIVANKPDIVIIDRSARRAVLVDVTIPHDENLVKAEKDKLIKYLDLAHETTAMWHVDSTIIVPIVVSVHGLIAKSFDQHLKKLSLSSWVKGLIQKAVILDTARIVRRFLTLES

SEQ ID NO: 27587 - protein, 1203 aa, Clostera curtula
MERRINPRRQCREPYEANARITSAAVSSNRVQSSDEEYFTPPGTASSSEDEPTPSPSLSRRPARRGRPPLPASLGSTGHRALPKAPATGGVVRRMRWTNNLNESVMRAYYGATDGGTNLTAYRSRLLALFQELHPDVTVTAQRLSDQVRAIQRLNLLEQPVLERLRLETLPPQPVSSVQVTTPTAACLLPPTSVEQLDLGQIEEVSLNDQYNEQLRRILEETIEEYRLIPMTSRPRIPRLPMHKRNMALVSALDSLLMDKLNSVGDLTELHFILYCGAVAVCRVAGVTFPKNSTASRHPECKPAWQYRIEKRITAARTLIAKLYCFMTGNTRPRVMRYVIQAFAGTGVRQCDYAACVTERIDYFKQKVYAWAKRIRRYRERADRFNQNRLFQNDQKIIYRNWERPQPPTADLSTPDADTMLAFWRNIWSRPVDHLEGQWIGVVGRACEQITQMEPVHIELDDVISAIRSAPNWKSPGPDGLHNFWIKKVCSCHARLATLFQAALEAGSLPDFMTTGVTHLIHKSGRISEPTNYRPITCLPTIYKLLTSIIKFKIVNHILANNILASNQNGCNAGSRGTKDLLLIDMAICQQVRRSKKNISMAWIDYKKAYDSVPHSWLMRVLDLYKVDANLCLFLSSCMRQWSTVLYHPGHRHFFEASERIWIKRGIFQGDSLSPLWFCLALNPLSILLNDSMPGYRLHRGGKTISHLLYMDDLKLYAPKQSDLMALLKVTETFSSAISMEFGVDKCAVINVQKGRVVNSENLQLSENVILRSLCESDTYKYLGMSEALGIADSDVKQQLKTRFLGRLTKVLKSLLSGGNKVRAFNCWVIPVIAYSFGILRWTQSELDALDRMVRRQLTAFRMHHPRSSVMRLYIPRRCGGRGFLNVKSLHNREVCNLRDYFLRVDDEMHRDVVKVDSGLTALSMAKQNWRRPQVLSISERKAIWKGKELHGRFYSALTGPEIDQLASVSWLRFGNLFGETEGFVFAIMDEVVKTNNYRKYIIKDGTVDICRACHCPGESIRHVVSGCSRLANGEYLHRHNQVAGIIHQQLALRYGIVESEVPYYQYKPEPVLSNNHVTLYWDRSIVTDRTIMANKPDIVVIDRSTRRAMLIDITIPHDVNLVKAEHEKISKYLDLSHEVGAMWNMDSTIIVPIVISVHGLMAKSFDQHLQKLSLGSWVKSLIQKAVLLDTARIVRRFLTLDP

SEQ ID NO: 27588 - protein, 962 aa, Phalera bucephala
MHRRNISLVSALDNVLKPHWETSVDLCDTHSILYCGAVAVCRVAGVRFPNLHRATQPTNAKPLWQCRIERRINMARTLIAKLLCFQAGNNRPRVVRFVTQAFAGTRVAPVDYVAGVAERIDYWKQKVYAWAKRIRSYKARADRYHVNRTFQTNQRSVYQAWERPQERVTNVHLPNAAVMAEFWRKNWSVPVSHFEGEWFDVVGRSCGPIQEMEPVVISREDLACAVRAAPNWKSPGPDGLHAFWLKRLQGSHSRLATQFQEALQLGSLPSFMTSGVTHLIHKSGSTSEPKNYRPITCLPTVYKLLTSILRIKINNHLKAQHILSPTQNGCKGGSRGTKDLLLIDIAICQQVRRSRKNVSMAWIDYKKAYDSVPHTWLGRVLELYRVHPALCSFLGSCMRQWTTVLRHPGCGGLSGSSDLIKISRGIFQGDSLSPLWFCLALNPLSAILKDSKLSYHLRRKSEPISHLLYMNDLKLYALKKTDLIELLKITGNFSNDIGMEFGVDKCAVIHVQRGRVEDSFNLQLSEDISFRSLFEMDSYKYLGMSQALSIAEQDMKQSLRDRFFARLIKVLKSLLSGGNRVRAFNGWVMPVLTYSFGILRWTQSELDALDRKVRRLLTAYRMHHPRSSVMRLYIPRKCSGRGFLNAKTLHNREVCNLRQYFLSVSVVMYRDVAAIDRGLTPLSLANGNWRRPQVLSTSDRTAIWKGKELHGRFYRALTGPDVDQLASVTWLRFSNLFGETEGFVFAIMDEVIMTNNYRKYILKDGTVDICQACHRPGESIRHVVSGCSRLANGEYLHRHNQVARIIHQQLALKYGLVDSEVPYYQYQPLPVLESGHITLYWDRSVITDRTIVANKPDIVIIDRSMRRVMLVDVTIPHDENLVKAEKEKLSKYLDLAHEVTAMWNVDSTIIIPMVVSVNGLIAKSFDKHLEKLSLGSWVKGLIQKAVMLDTARIVRRFLSLEP

SEQ ID NO: 27589 - protein, 1204 aa, Phalera bucephala
MAEPSRRNPVRLCRQRDARSPSARPTPLPGSPTSPQPSEDEDFFTPPTSGASSDDAGISASPPTLTSARRGRPPLPARLGPAGHCAPPTAPATGGVVRRMRWTPELNLSVMRAYYGATEGGTILTAYRPKLLSLFQGLHPTVAVTAQRLSDQVRAIQRCKLLDDTVLERLHREALPARTESNVRSVEDPISLNNFARSEEVNSEQVSVSDQLQEQVRRALEDAFAGYRSAPISLRPCLPRLPMHRRNISLVSALDNVLKPHWETSVDLCDTHSILYCGAVAVCRVAGVRFPNLHRATQPTNAKPLWQCRIERRINMARTLIAKLLCFQAGNNRPRVVRFVTQAFAGTRVAPVDYVAGVAERIDYWKQKVYAWAKRIRRYKARADRYHVNRTFQTNQRSVYQAWERPQERVTDVHLPNAAVMAEFWRKIWSVPVTHSEGEWFDVVGRSCGPIQEMEPVVISREDLACAVRAALNWKSPGPDGLHAFWLKRLQGSHSRLATQFQEALQLGSLPSFMTSGVTHLIHKSGSTSEPKNYRPITCLPTVYKLLTSILRIKINNHLKAQHILSPTQNGCKGGSRGTKDLLLIDIAICQQVRRSRKNVSMAWIDYKKAYDSVPHTWLGRVLELYRVHPALCSFLGSCMRQWTTVLRHPGCGGLSGSSDLIKISRGIFQGDSLSPLWFCLALNPLSAILKHSKLGYHLRRESEPISHLLYMDDLKLYASKKTDLMELLKITGNFSNDIGMEFGVDKCAVIHVQRGRVEDSFNLQLSEDISLRSLSEMDSYKYLGMLQALSIAEQDMKQSLRDRFFARLIKVLKSLLSGGNRVRAFNGWVMPVLTYSFGILRWTQSELDALDRKVRRLLTAYRMHHPRSSVMRLYIPRKCGGRGFLNAKTLHNREVCNLRQYFLSVSVVMYRDVAAIDRGLTPLSLANGNWRRPQVLSTSDRTAIWKGKELHGRFYRALTGPDVDQLASVTWLRFSNLFGETEGFVFAIMDEVIMTNNYRKYILKDGTVDICRACHRPGESIRHVVSGCSRLANGEYLHRHNQVARIIHQQLALKYGLVDSEVPYYQYQPLPVLESGHITLYWDRSVITDRTIVANKPDIVIIDRSMRRVMLVDVTIPHDENLVKAEKEKLSKYLDLAHEVTAMWNVDSTIIIPMVVSVNGLIAKSFDKHLEKLSLGSWVKGLIQKAVMLDTARIVRRFLSLEP

SEQ ID NO: 27590 - protein, 1201 aa, Phalera bucephala
MAEPSRRNPVRLCRQRDARSPSARPTPLPGSPTSPQPSEDEDFFTPPTSGASSDDAGISASPPTLTSARRGRPPLPARLGPAGHCAPPTAPATGGVVRRMRWTPELNLSVMRAYYGATEGGTILTAYRPKLLSLFQGLHPTVAVTAQRLSDQVRAIQRCKLLDDTVLERLHREALPARTESNVRSVEDPISLNNFARSEEVNSEQVSVSDQLQEQVRRALEDAFAEYRSAPISLRPCPPRLPMHRRNISLVSALDNVLKPHWETSVDLCDTHSILYCGAVAVCRVAGVRFPNLHRATQSTNAKPLWQCRIERRINMARTLIAKLLCFQAGNNRPRVVRFVTQAFAGTRVAPVDYVAGVAERIDDWKQKVYAWAKRIRRYKARADRYHVNRTFRTNQRSVYQAWERPQERVTDVHLPNAAVMAEFWRKIWSVPVTHSEGEWFDVVGRSCGPIQEMEPVVISREDLACAVRAAPNWKSPGPDGLHAFWLQGSHSRLATQFQEALQLGSLPSFMTSGVTHLIHKSGSTSEPKNYRPITCLPTVYKLLTSILRIKINNHLKAQHILSPTQNGCKGGSRGTKDLLLIDIAICQQVRRSRKNVSMAWIDYKKAYDSVPHTWLGRVLELYRVHPALCSFLGSCMRQWTTVLRHPGCGGLSGSSDLIKISRGIFQGDSLSPLWFCLALNPLSAILKDSKLGYHLRRESEPISHLLYMDDLKLYASKKTDLMELLKITGNFSNDIGMEFGVDKCAVIHVQRGRVEDSFNLQLSEDISLRSLSEMDSYKYLGMSQALSIAEQDMKQSLRDRFFARLIKVLKSLLSGGNRVRAFNGWVMPVLTYSFGILRWTQSELDALDRKVRRLLTAYRMHHPRSSVMRLYIPRKCGGRGFLNAKTLHNREVCNLRQYFLSVSVVMYRDVAAIDRGLTPLSLANGNWRRPQVLSTSDRTAIWKGKELHGRFYRALTGPDVDQLASVTWLRFSNLFGETEGFVFAIMDEVIMTNNYRKYILKDGTVDICRACHRPGESIRHVVSGCSRLANGEYLHRHNQVARIIHQQLALKYGLVDSEVPYYQYQPLPVLESGHITLYWDRSVITDRTIVANKPDIVIIDRSMRRVMLVDVTIPHDENLVKAEKEKLSKYLDLAHEVTAMWNVDSTIIIPMVVSVNGLIAKSFDKHLEKLSLGSWVKGLIQKAVMLDTARIVRRFLSLEP

SEQ ID NO: 27591 - protein, 1204 aa, Phalera bucephala
MAEPSRRNPVRLCRQRDARSPSARPTPLPGSPTSPQPSEDEDFFTPPTSGASSDDAGISATSPTLTSARRGRPPLPARLGPAGHCAPPTAPATGGVVRRMRWTPELNLSVMRAYYGATEGGTILTAYRPKLLSLFQGLHPTVAVTAQRLSDQVRAIQRCKLLDDTVLERLRREALPARTDFNVRSVEEPISLNNFARSEEVNSEQVSVSDQLQEQVRRALEDAFAEYRSAPIFLRPCLPRLPMHRRNISLVSALDNVLKPHWETSVDLCDTHSILYCGAVAVCRVAGVRFPNLHRATQPTNTKPFWQCRIDRRINMARTLIAKLLCFQAGNNRPRVMRFVAQAFAGTGVAPVDYVAGVAERIDYWKQKVYVWAKRIRRYKARADRYHVNRTFQTNQRSVYQAWERPQERVTDVHLPNAAVMAEFWRKIWSVPVSHSEGEWFDVVGRSCAPIQEMEPVVISREDLACAVRAAPNWKSPGPDGLHAFWLKRLRGSHSRLATQFQEALQLGSLPSFMTSGVTHLIYKSGSTSEPKNYRPITCLPTVYKLLTSILRIKINNHLKAQHILSPTQNGCKGGSRGAKDLLLIDMAICQQVRRSRKNVSMAWIDYKKAYDSVPHTWLGRVLELYRVHPALCSFLGSCMRQWTTVLRHPGCGGLSGSSDLIKISRGIFQGDSLSPLWFCLALNPLSAILKDSKLGYHLRRESEPISHLLYMDDLKLYASKKTDLMELLKITGNFSNDIGMEFGVDKCAVIHVQRGRVKDSFNLQLSEDISLRSLSEMDSYKYLGMSQALSIAEQDMKQSLKDRFFARLIKVLKSLLSGGNKVRDFNGWVMPVLTYSFGILRWTQSELDSLDRKVHRLLTAYRMHHPRSSVMRLYIPRKCGGRGFLNAKTLHNREVCNLRQYFLSVSVVMYRDVAAIDRGLTPLSLANENWRRPQVLSISDRTAIWKGKELHGRFYRALTGPDVDQLASVNWLRFSNLFGETEGFVFAIMDEVIMTNNYRKHILKDGTVDICRACHRPGESIRHVVSGCSRLANGEYLHRHNQVARIIHQQLALKYGLVDSEVLYYQYQPLPVLESGHITLYWDRSIITDRTIVANKPDIVIIDRSMRRVMLVDVTIPHDENLVKAEKEKLTKYLDLAHEVTAMWNVDSTIIIPMVVSVNGLIAKSFDKHLEKLSLGTWVKGLIQKAVMLDTARIVRRFLSLEP

SEQ ID NO: 27592 - protein, 1084 aa, Phalera bucephala
MAEPSRRNPVRLCRQRDARSPSARPTPLPGSPTSPQPSEDEDFFTPPTSGASSDDAGISASPPTLTSARRGSPPLPARLGPAGHCAPPTAPATGGVVRRMRWTPELNLSVMRAYYGATEGGTILTAYRPKLLSLFQGLHPTVAVTAQRLSDQVRAIQRCKLLDDTVLERLRREALPARTDFNVRSVEEPISLNNFARSEEVNSEQVSVSDQLQEQVRRALEGAFAEYRSAPISLRPCLPRLPMHRRNISLVSALDNVLKPHWETSVDLCDTHSILYCGAVAVCRVAGVRFPNLHRATQPTNTKPFWQCRIERRINMARTLIAKLLCFQAGNNRPRVVRFVTQAFAGTRVAPVDYVAGVAERIDYWKQKVYAWAKRIRRYKARADRYHVNRTFQTNQRSVYQAWERPQERVTDVHLPNAAVMAEFWRKIWSVPVTHSEGEWFDVVGRSCGPIQEMEPVVISREDLACAVRAAPNWKSPGPDGLHAFWLKRLQGSHSRLATQFQEALQLGSLPSFMTSGVTHLIHKSGSTSEPKNYRPITCLPTVYKLLTSILRIKINNHLKAQHILSPTQNGCKGGSWGTKDLLLIDIAICQQVRRSRKNVSMAWIDYKKAYDSVPHTWLGRVLELYRVHPALCSFLGSCMRQWTTVLRHPGCGGLSGSSDLIKISRGIFQGDSLSPLWFCLALNPLSAILKDSKLGYHLRRESEPISHLLYMDDLKLYASKKTDLMELLKITGNFSNDIGMEFGVDKCAVIHVQRGRVEDSFNLQLSEDISLRSLSEMDSYKYLGMSQALSIAEQDMKQSLKDRFFARLIKVLKSLLSGGNKVRAFNGWVMPVLTYSFGILRWTQSELDALDRKVRRLLTAYRMHHPRSSVMRLYIPRKCGGRGFLNAKTLHNREVCNLRQYFLSVSVVMYRDVAAIDRGLTPLSLANGNWRRPQVLSTSDRTAIWKGKELHGRFYRALTGPDVDQIASVTWLRFSNLFGETEGFVFAIMDEVIMTNNYRKHILKDGTVDICRACHRPGESIRHVVSGCSRLANGEYLHRHNQVARIIHQQLALKYGLVNSEVPYYQYQPLPVLESGHITLYWD

SEQ ID NO: 27593 - protein, 1105 aa, Phalera bucephala
MRWTPELNLSVMRAYYGATEGGTILTAYRPKLLSLFQGLHPTVAVTAQRLSDQVRAIQRCKLLDDTVLERLHREALPALTESNVRSVEDHISLNNFARSEEVNSEQVSVSDQLQEQVRRALEDAFAEYRSAPISLRPCLPRLPMHRRNISLVSALDNVLKPHWETSVDLCDTHSILYCGAVAVCRVAGVRFPNLHRATQPTNAKPLWQCRIERRINMARTLIAKLLCFQAGNNRPRVVRFVTQAFAGTRVAPVDYVAGVAERIDYWKQKVYAWAKRIRRYKARADRYHVNRTFQTNQRSVYQAWERPQERVTDVHLPNAAVMAEFWRKIWSVPVTHSEGEWFDVVGRSCGPIQEMEPVVISREDLACAVRAAPNWKSPGPDGLHAFWLKRLQGSHSRLATQFQEALQLGSLPSFMTSGVTHLILKSGSTSEPKNYRPITCLPTVYKLLTSILRIKINNHLKAQHILSPTQNGCKGGSRGTKDLLLIDIAICQQVRRSRKNVSMAWIDYKKAYDSVPHTWLGRVLELYRVHPALCSFLGSCMRQWTTVLRHPGCGGLSGSSDLIKISRGIFQGDSLSPLWFCLALNPLSAILKDSKLGYHLRRESEPISHLLYMDDLKLYASKKTDLMELLKITGNFSNDIGMEFGVDKCAVIHVQRGRVEDSFNLQLSEDISLRSLSEMDSYKYLGMSQALSIAEQDMKQSLRDRFFARLIKVLKSLLSGGNRVRAFNGWVMPVLTYSFGILRWTQSELDALDRKVRRLLTAYRMHHPRSSVMRLYIPRKCGGRGFLNAKTLHNREVCNLRQYFLSVSVVMYRDVAAIDRGLTPLSLANGNWRRPQVLSTSDRTAIWKGKELHGRFYRALTGPDVDQLASVTWLRFSNLFGETEGFVFAIMDEVIMTNNYRKYILKDGTVDICRACHRPGESIRHVVSGCSRLANGEYLHRHNQVARIIHQQLALKYGLVDSEVPYYQYQSLPVLESGHITLYWDRSVITDRTIVANKPDIVIIDRSMRRVMLVDVTIPHDENLVKAEKEKLSKYLDLAHEVTAMWNVDSTIIIPMVVSVNGLIAKSFDKHLEKLSLGSWVKGLIQKAVMLDTARIVRRFLSLEP

SEQ ID NO: 27594 - protein, 1197 aa, Bombyx mandarina
MSTTTALRKNPSRQCRQVTCGAQRTSPCIPSCSSDGSPSPTRIENLSSDETQPSPAPPRPVRRGRPPLARLGSTRRNAPSTVPATSGVVRSRMRWNENINMNVMRAYYEATEGETNLSAYRSKMFSVFQTLCPTVNVSTQRLSDQVRAIQRLRLLDQSLLDRLRYEALPVPIEPQENQVVTDTVAPIIQHDEEIQEQVCASNQDYERLSSALEDSIQEYRLVSSCSRPRLPRLPMHRRNVSLVGALDSILKPYLESSTDLIDTHSLLYCGAVAVCRVAEVKSPNLTQTAYRPPTKPQWQCRIEKRIDRARILIAKLMCFQKGNTRPRVMCFVDQAFAGTGISSNEYMTCIIERIDFWKQKVYAWASRIRRYRLRSERYHLNRVFQRDQRSVYRNWESSQSQVTDEPYNVNEEDMSTFWNNIWSIPIGHSEGEWIQTVRRECESYKEMDSITISAVDVSRAVRSMPNWKSPGPDGLHSYWIKWIRSSHERLAAQFQQALELGSLPDFMTSGITYLIYKSGNTSDPKNYRPITCLPTIYKLLTSILRIKIQNHIFNNNILSPNQNGCKAGSRGTKDLLLIDMTITQQVRRSKRNVHMAWIDYKKAYDSVPHTWLMRVLELYKINPILCSFLSSCMGQWSTFLSQPGQMTSSAAPNLIRIKRGIFQGDSLSPLWFCLALNPLSTLLKDSTLGYRLRRGAEAISHLLFMDDLKLFASKKPDLMSLLKITDSFSKAIGMEFGVDKCAFIDVQRGKVVSSDCLLLNHSVVLKSLCESETYKYLGMFEVLNIVDADMKQSFRDRFFGRLIKVLKSHLSGGNKIRAFNGWVMPMLTYSFGILRWTQSELDVLDRKVRRLLTAYRMHHPRSSVMRLYIPRKCGGRGILNAKDLHNREIYNLREYFLKMNVNMYRDVVAVDKGLTPLSLANGNWKRLKVESISDRITVWRSKELHGRFYRALTGPDVDQLASVAWLRFSNLFGETEGFIFAIMDEVIMTNNYRKYILKDGTVDICRACHRPGESIRHIVSGCSRFANGEYLHRHNQVARIIHQQLALKYGFLDSAVPYYQYQPQPVLDNGHVTLYWDRSIITDRYIVANKPDIVIIDRSARRAVLVDVTIPHDENLVKAEKDKLIKYLDLAHETTAMWHVDSTIIVPIVVSVHGLIAKSFDQHLKKLSLSSWVKGLIQKAVILDTARIVRRFLNLES

SEQ ID NO: 27595 - protein, 1112 aa, Eilema depressum
MNLIYGSMRSIHYEANIIIIIIITAYRARMLPLFQVLEPTVNVSAQRLSDQVRAIQRCHLLDDSVLERLRSDSRSSPGASTSSQPLTQHEHFISQVNEESVSHVSEEVVDTGVTHVSTVCIDIIRSALECAMREYRSMPFDYRPRLPRLPTHKKNIALVCALDSLLSDYFDNSEDLSDTHSILYCAAVAACRVANVKFHRTILTTRPKSAVPAWQSRIERRIAETRALIGKLICFRSGNTRPRVMRFVTRAFSGTDIRPREFLSRVTERIDFLKQKIYAWANRIRRYKRRVDRYSQNRTFQRDERWVYRSWERPDSNGTDMRRPDDDATNTFWRSIWSTPVSHTEGDWMRVVERSCESIGTMEPVTISDEDVTNAVRLLPNWRSAGPDGLHNFWLKWFRSSHGRLAMQFQSCLESGSLPAFITTGVTHLLHKSGSTTDPKNYRPITCLPTVYKLLTSILREKISSHLIDNSIMSISQNGCRSGARGTKELLIIDMAICQQARRHRKDLATCWIDYKKAYDSVPHTWLLRVLELYKIDTTLCTFMKTCMGQWRTVLCYPGCRQICEDSGLIKIERGIFQGDSLSPLWFCLALNPLSTILDSSGLGCRLRRDGQVISHLLYMDDLKLFAPNNLHLIELLKLTETFSNSIRMDFGVDKCAVMHVKRGRIVESDSVELSDSTKLRALSATDTYKYLGMSQALGISEAGMKQSLQERFFGRLKKVLKSLLSGGNKVRACNGWVMPVLMYSFGILRWTQTELEALDRKVRAHLTAYRMHHPRSSVMRLYIPRKCGGRGFLNAKTLHNREVCNLREYFLHNDADLHRDVVMVDNGLTPLGLAKENWRKPAVLSINDRKDVWKGKELHGRFYRALHGPEIDIPASLSWLRFGDLFGETEGFVFAIMDEVVMTNNYRRYIIKDGTVDICRACHRPGESLRHIISGCSRLANGEYLHRHNQVARIIHQQLALKYNLVESEVPYYRYVPDPVLENGHITLYWDRSIITDRTIVANKPDIVIIDRLERRAIIVDITIPHDENLMKAEKEKQIKYLDLAHEIVDMWDVDSAIIVPIVVSVHGLIAKSLDQHLKRLSLDGWLKGLMQKAVLLGTARIVRKFLSLEP

SEQ ID NO: 27596 - protein, 1203 aa, Clostera curtula
MERRINPRRQCREPYETNARITSAAVSSNRVQSSDEEYFTPPGTASSSEDEPTPSPSLSRRPARRGRPPLPASLGSTGHRALPTAPATGGVVRRMRWTNNLNESVMRAYYGATDGGTNLTAYRSRLLALFQELHPDVTVTAQRLSDQVRAIQRLNLLEQPVLERLRLEALPPQSVSSVQVTTPTAACLLPPTSVEQLDLGQIEEVSLNDQYNEQLRRILEETIEEYRLIPMTSRPRIPRLPMHKRNMALVSALDSLLMDKLNSVGDLTELHFILYCGAVAVCRVAGVTFPKSSTASRQPECKPAWQYRIEKRITAARTLIAKLYCFMTGNTRPRVMRYVIQAFAGTGVRQCDYAACVTERIDYFKQKVYAWAKRIRRYRERADRFNQNRLFQNDQKIIYRNWERPQPPTADLSTPDADTMLAFWRNIWSRPVDHLEGQWIDVVGRACEQITQMEPVHIDLNDVISAIRSAANWKSPGPDGLHNFWIKKVCSCHARLATLFQAALEAGSLPHFMTTGVTHLIHKSGRISEPKNYRPITCLPTIYKLLTSIIKFKIVNHILANNILASNQNGCNAGSRGTKDLLLIDMAICQQVRRSKKNISMAWIDYKKAYDSVPHSWLMRVLDLYKVDANLCLFLSSCMRQWSTVLYHPGHRHFFEPSERIWIKRGIFQGDSLSPLWFCLALNPLSILLNDSMPGYRLHRGGKTISHLLYMDDLKLYAPKQSDLMALLQVTETFSSAISMEFGVDKCAVINVQKGRVVNSENLQLSENVVLRSLCESDTYKYLGMSEALGIADSDVKQQLKTRFLGRLTKVLKSLLSGGNKVRAFNCWVIPVIAYSFGILRWTQSELDALDRMVRRQLTAFRMHHPRSSVMRLYIPRRCGGRGFLNVKSLHNWEVCNLRDYFLRVDDEMHRDVVKVDSVLTALSMAKQNWRRPQVLSVSERKAIWKGKELHGRFYSALTGPEIDQLASVSWLRFGNLFGETEGFVFAIMDEVVKTNNYRKYIIKDGTVDICRACHCPGESIRHVVSGCSRLANGEYLHRHNQVAGIIHQQLALRYGIVESEVPYYQYKPEPVLSNNHVTLYWDRSIVTDRTIMANKPDIVVIDRSTRRAMLIDITIPHDVNLVKAEHEKISKYLDLSHEVGAMWNMDSTIIVPIVISVHGLIAKSFDQHLQKLSLGSWVKSLIQKAVLLDTARIVRRFLTLDP

SEQ ID NO: 27597 - protein, 973 aa, Clostera curtula
MTSRPRIPRLPTHKRNMALVSALDSLLMDKLNSVGDLTELHFILYCGAVAVCRVAGVTFPKNSTASRHPECKPAWQYRIEKRITAARTLIAKLYCFMTGNTRPRVMRYVIQAFAGTGVRQCDYAACVTERIDYFKQKVYAWAKRIRRYRERADRFNQNRLFQNDQKIIYRNWERPQPPTADLSTPDADTMLAFWRNIWSRPVDHLEGQRIGVVGRACEQITQMEPVHIELDDVISAIRSAPNWKSPGPDGLHNFWIKKVCSCHARLATLFQAALEAGSLPDFMTTGVTHLIHKSGRISEPTNYRPITCLPTIYKLLTSIIKFKIVNHILANNILASNQNGCNAGSRGTKDLLLIDMAICQQVRRSKKNISMAWIDYKKAYDSVPHSWLMRVLDLYKVDANLCLFLSSCMRQWSTVLYHPGHRHFFEASERIWIKRGIFQGDSLSPLWFCLALNPLSILLNDSMPGYRLHRGGKTISHLLYMDDLKLYAPKQSDLMALLKVTETFSSAISMEFGVDKCAVINVQKGRVVNSENLQLSENVILRSLCESDTYKYLGMSEALGIADSDVKQQLKTRFLGRLTKVLKSLLSGGNKVRAFNCWVIPVIAYSFGILRWTQSELDALDRMVRRQLTAFRMHHPRSSVMRLYIPRRCGGRGFLNVKSLHNREVCNLRDYFLRVDDEMHRDVVKVDSGLTALSMAKQNWRRPQVLSISERKAIWKGKELHGRFYSALTGPEIDQLASVSWLRFGNLFGETEGFVFAIMDEVVKTNNYRKYIIKDGTVDICRACHCPGESIRHVVSGCSRLANGEYLHRHNQVAGIIHQQLALRYGIVESEVPYYQYKPEPVLSNNHVTLYWDRSIVTDRTIMANKPDIVVIDRSTRRAMLIDITIPHDVNLVKAEHEKISKYLDLSHEVGAMWNMDSTIIVPIVISVHGLMAKSFDQHLQKLSLGSWVKSLIQKAVLLDTARIVRRFLTLDP

SEQ ID NO: 27598 - protein, 1204 aa, Phalera bucephala
MAEPSRRNPVRLCRQQDARSPSARPTPLPGSPASPQPSEDEDFFTPPTSGASSDDAGISATPPTLTSARRGRPPLPARLGPAGHCAPPTAPATGGVVRRMRWTPELNLSVMRAYYGATEGGTILTAYRPKLLSLFQGLHPTVAVTAQRLSDQVRAIQRCKLLDDTVLERLRREALPARTDSNVRSVEEPISLNNFARSEEVNSEQVSVSDQLQEQVRRALEDAFAEYRSAPISLRPCLPRLPMHRRNISLVSALDNVLKPHWETTVDLCDTHSILYCGAVAVCRVAGVRFPNLHRATQPTNTKPFWQCRIERRINMARTLIAKLLCFQAGNNRPRVMRFVAQAFPGTGVAPVDYVAGVAERIDYWKQKVYAWAKRIRRYKARADRYHVNRTFQTNQRSVYQAWERPQERVTDVHLPNAAVMAEFWRKIWLVPVSHSEGEWFDVVGRSCGPIQEMEPVVISREDLACAVRAAPNWKSPGPDGLHAFWLKRLQGSHSRLATQFQEALQLGSLPSFMTSGVTHLIYKSSSTSEPKNYRPITCLPTVYKLLTSILRIKINNHLKAQHILSPTQNGCKGGSRGTKDLLLIDMAICQQVRRSRKNVSMAWIDYKKAYDSVPHTWLGRVLELYRVHPALCSFIGSCMRQWTTVLRHPGCGGLSGSSDLIKISRGIFQGDSLSPLWFCLALNPLSAILKDSKLGYHLRRESEPISHLLYMDDLKLYASKKTDLMELLKITGNFSNDIGMEFGVDKCAVIHVQRGRVEDSFNLQLSEDISLRSLSEMDSYKYLGMSQALSIAEQDMKQSLKDRFFARLIKVLKSLLLGGNKVRAFNGWVMPVLTYSFGILRWTQSELDALDRKVRRLLTAYRMHHPRSSVMRLYIPRKCGGRGFLNAKTLHNREVCNLRQYFLSVSVVMYRDVAAIDRGLTPLSLANENWRRPQVLSISDRTAIWKGKELHGRFYRALTGPDVDQLASVNWLRFSDLFGETEGFVFAIMDEVIMTNNYRKHILKDGTVDICRACHRPGESIRHVVSGCSRLANGEYLHRHNQVARIIHQQLALKYGLVDSEVPYYQYQPLPDLESGHITLYWDRSIITDRTIVANKRDIVIIDRSMRRVMLVDVTIPHDENLVKAEKEKLSKCLDLAHEVTAMWNVDSTIIILMVVSVNGLIAKSFDKHLEKLSLGSWVKGLIQKAVMLDTARIVRRFLSLEP

SEQ ID NO: 27599 - protein, 1204 aa, Phalera bucephala
MAEPSRRNPVRLCRQRDARSPSARPTPLPGSPTSPQPSEDEDFFTPPTSGASSDDAGISASPPTLKSARRGRPPLPARLGPAGHCAPPTAPATGGVVRRMRWTPELNLSVMRAYYGATEGGTILTAYRPKLLSLFQGLHPTVAVTAQRLSDQVRAIQRCKLLDDTVLERLHREALPARTESNVRSVEDPISLNNFARSEEVNSEQVSVSDQLQEQVRRALEDAFAEYRSAPISLRPCLPRLPMHRRNISLVSALDNVLKPHWETSVDLCDTHSILYCGAVAVCRVAGVRFPNLHRATQPTNAKPLWQCRIERRINMARTLIAKLLCFQAGNNRPRVVRFVTQAFAGTRVAPVDYVAGVAERIDYWKQKVYAWAKRIRRYKARADRYHVNRTFQTNQRSVYQAWERPQERVTDVHLPNAAVMAEFWRKIWSVPVTHSEGEWFDVVGRSCGPIQEMEPVVISREDLACAVRAAPNWKSPGPDGLHAFWLKRLQGSHSRLATQFQEALQLGSLPSFMTSGVTHLIHKSGSTSEPKNYRPITCLPTVYKLLTSILRIKINNHLKAQHILSPTQNGCKGGSRGTKDLLLIDIAICQQVRRSRKNVSMAWIDYKKAYDSVPHTWLGRVLELYRVHPALCSFLGSCMRQWTIVLRHPGCGGLSGSSDLIKISRGIFQGDSLSPLWFCLALNPLSAILKDSKLGYHLRRESEPISHLLYMDDLKLYASKKTDLMELLKITGNFSNDIGMEFGVDKCAVIHVQRGRVEDSFNLQLSEDISLRSLSEMDSYKYLGMSQALSIAEQDMKQSLRDRFFARLIKVLKSLLSGGNRVRAFNGWVMPVLTYSFGILRWTQSELDALDRKVRRLLTAYRMHHPRSSVMRLYIPRKCGGRGFLNAKTLHNREVCNLRQYFLSVSVVMYRDVAAIDRGLTPLSLANGNWRRPQVLSTSDRTAIWKGKELHGRFYRALTGPDVDQLASVTWLRFSNLFGETEGFVFAIMDEVIMTNNYRKYILKDGTVDICRACHRPGESIRHVVSGCSRLANGEYLHRHNQVARIIHQQLALKYGLVDSEVPYYQYQPLPVLESGHITLYWDRSVITDRTIVANKPDIVIIDRSMRRVMLVDVTIPHNENLVKAEKEKLSKYLDLAHEVTAMWNVDSTIIIPMVVSVNGLIAKSFDKHLEKLSLGSWVKGLIQKAVMLETARIVRRFLSLEP

SEQ ID NO: 27600 - protein, 1204 aa, Phalera bucephala
MAEYPRRNPVRRCRQRIARGHSARPSPLRGSPNSPQSSENELYFTPPTSGASSDETEPPASSHPLRPERRGRPPLPACIGPAEHCAPPTAPATGGVVRRMRWTSELNMSVMRAYYGATKGETILTAYRPKLLSLFQELHPTVAVTAQRLSDQVRAIQRCKLLDDTVLERLRSETCPARTESDLRSFEEPISLDNFARSEEVNSGQVSVGDQLQEQVRRALKDAFAEYRSAPISLRPCLPRLPMHRHNISLVGALDNVLKSHWETSVDLCDTHSILYCGAVAVCRVAGVRFPNLHRATQPTNAKPFWQCRIERRINMARTLIAKLLCFQAGNNRPRVVRFVAQAFAGTGVAPVDCMARVTERIDYWKQKVYAWANRIRRYREGADRYHVNRTFEVNQKSVYQAWERPQERVTDVHLPDAATMAEFWRKIWSVPVSHSEGEWFDVVGRSCEPIQEMEPVVITRDDVACAVRAAPNWKSPGPDGLHAFWLKRLQGSHARLATQFQEALKLGSLPSLLTTGVTHLIHKSGSTLEPKNYRPITCLPTVYKLLTSILRTKINNHLKAQHILSPTQNGCKGGSRGTKDLLLFDMAICQQVRRSRKNASMAWIDYKKAYDSVPHTWLGRVLELYKVHPALCSFLGLCMGQWTTVLRHPGYGGLSGSSDLIKISRGIFQGDSLSPLWFCLALNPLSAILKNSKLGYHLRRGSEPISHLLYMDDLKLYASKKTDLMELLKITGNFSNDIGMEFGVDKCAVIHVQRGRVEDSFNLQLSEDISLRSLSEMDSYKYLGMSQALSIAEQDMKQSLKDRFFARLIKVLKSLLSGGNRVRAFNGWVMPVLTYSFGILRWTQSELDALDRKVRRLLTAYRMHHPRSSVMRLYIPRRCGGRGFLNAKTLHNREVCNLRQYFLSVSVVMYRDVAAIDRGLTPLSLANGNWRRPQVLSISDRTAIWKGKELHGRFYRALTGPDVDQLASVTWLRFSNLFGETEGFVFAIMDEVIMTNNYRKHILKDGTVDICRACHRPGESIRHVVSGCSRLANGEYLHRHNQVAKIIHQQLALKYDLVDSEVPYYQYQPLPVLESGHITLYWDRSIITDRTIVANKPDIVIIDRSMRRVMLVDVTIPHDENLVKAEKEKISKYLDLAHEVTAMWNVDSTIIIPMVVSVNGLIAKSFDKHLEKLSLGSWVKGLIQKVVVLDTARIVRRFLSLEP

SEQ ID NO: 27601 - protein, 1204 aa, Phalera bucephala
MAEYPRRNPVRRCRQRIAQGHSARPSPLRGSPNSPQSSENELYFTPPTSGASSDETEPPASSHPLRPERRGRPPLPACIGPAEHCAPPTAPATGGVVRRMRWTSELNMSVMRAYYGATKGETILTAYRPKLLSLFQELHPTVAVTAQRLSDQVRAIQRCKLLDDTVLERLRSETCPARTESDLRSFEEPISLDNFARSEEVNSGQVSVGDQLQEQVRRALKDAFAEYRSAPISLRPCLPRLPMHRHNISLVGALDNVLKSHWETSVDLCDTHSILYCGAVAVCRVAGVRFPNLHRATQPTNAKPFWQCRIERRINMARTLIAKLLCFQAGNNRPRVVRFVAQAFAGTGVAPVDYMARVTERIDYWKQKVYAWANRIRRYRERADRYHVNRTFEVNQRSVYQAWERPQERVTDVHLPDAATMAEFWRKIWSVPVSHSEGEWFDVVGRSCEPIQEMEPVVITRDDVACAVRAAPNWKSPGPDGLHAFWLKRLQGSHARLATQFQEALELGSLPSLLTTGVTHLIHKSGSTLEPKNYRPITCLPTVYKLLTAILRTKINNHLKAQHILSPTQNGCKGGSRGTKDLLLIDMAICQQVRRSRKNVSMAWIDYKKAYDSVPHTWLGRVLELYKVHPALCSFLGLCMGQWTTVLRHPGYGGLSGSSDLIKISRGIFQGDSLSPLWFCLALNPLSAILKNSKLGYHLRRGSEPISHLLYMDDLKLYASKKTDLMELLKITGNFSNDIGMEFGVDKCAVIHVQRGRVEDSFNLQLSEDISLRSLSEMDSYKYLGMSQALSIAEQDMKQSLKDRFFARLMKVLKSLLSGGNRVRAFNGWVMPVLTYSFGILRWTQSELDALDRKVRRLLTAYRMHHPRSSVMRLYIPRRCGGRGFLNAKTLHNREVCNLRQYFLSVSVVMYRDVAAIDRGLTPLSLANGNWRRPQVLSISDRTAIWKGKELHGRFYRALTGPDVDQLASVTWLRFSNLFGETEGFVFAIMDEVIMTNNYRKHILKDGTVDICRACHRPGESIRHVVSGCSRLANGEYLHRHNQVAKIIHQQLALKYDLVDSEVPYYQYQPLPVLESGHITLYWDRSIITDRTIVANKPDIVIIDRSMRRVMLVDVTIPHDENLVKAEKDKISKYLDLAHEVTAMWNVDSTIIIPMVVSVNGLIAKSFDKHLEKLSLGSWVKGLIQKVVVLDTARIVRRFLSLEP

SEQ ID NO: 27602 - protein, 1204 aa, Phalera bucephala
MAEPSRRNPVRLCRQRDARSPSARPTPLPGSPASPQPSEDEDFFTPPTSGASSDDAGISASPPTLTSARRGRPPLPARLGPAGHCAPPTAPATGGVVRRMRWTPELNLSVMRAYYGATEGGTILTAYRPKLLSLFQGLHQTVAVTAQRLSDQVRAIQRCKLLDDTVLKRLHREALPARTESNVRSVEDPISLNNFARSEEVNSKQVSVSDQLQEQVRRALEDAFAEYRSAPISLRPCLPRLPMHRRNISLVSALDNVLKPHWETSVDLCDTHSILYCGAVAVCRVAGVRFPNLHRATQPTNAKPLWQCRIERRINMARTLIAKLLCFQAGNNRPRVMRFVTQAFAGTGVAPVDYVAGVAERIDYWKQKVYAWAKRIRRYKARADRYHVNRTFQTNQRSVYQAWERPQERVTDVHLPNAAVMAEFWRKIWSVPVTHSVGEWFDVVGRSCGPIQEMEPVVISREDLACAVHAAPNWKSPGPDGLHAFWLKRLQGSHSRLATQFQEALQLGSLPSFMTLGVIHLIHKSGSTSEPKNYRPITCLPTVYKLLTSILRIKINNHLKAQHILSPTQNGCKGGSRGTKDLLLINIAICQQERRSRKNVSMAWIDYKKAYDSVPHTWLGRVLELYRVHPALCSFLGSCMRQWTTVLRHPGCGGLSGSSDLIKISRGIFQGDSLSPLWFCLALNPLSAILKDSKLGYHLRRESEPISHLLYMDDLKLYASKKTDLMELLKITGNFSNDIGMEFGVDKCAVIHVQRGRVEDSFNLQLSEDISLRSLSEMDSYKYLGMSQVLSIAEQDMKQSLRDRFFARLIKVLKSLLSGGNKVRAFNGWVLPVLTYSFGILRWTQSELDALDRKVRRLLTAYRMHHPRSSVMRLYIPRKCGGRGFLNAKTLHNREVCNLRQYFLSVSVVMYRDVAAIDRGLTPLSLANGNWRRPQVLSTSDRIAIWKGKELHERFYQALTGPDVDQLASVTWLRFSNLFGETEGFVFAIMDEVIMTNNYRKHILKNGTVDICRACHRPGESIRHVVSGRSRLANGEYLHRHNQVARIIHQQLALKYGLVDSEVPYYQYQPLPVLESGHITLYWDRSVITDRTIVANKPDIVIIDRSMRRVMLVDVTIPHDENLVKAEKEKLSKYLDLAHEVTAMWNVDSTIIIPMVVSVNGLIAKSFDKHLEKLSLGSWVKGLIQKAVMLDTARIVRRFLSLEP

SEQ ID NO: 27603 - protein, 1250 aa, Phalera bucephala
MAEPSRRKPVRLCRQRDARTPSARPTPLPGSPTSPQPSEDEDFFTPPTSGASSDDAGILASPPILTSARRGRPPLQARLGPAGHCCAPPTAPAIGGVVRRMRWTPELNLSVMRAYYGVTEGGTILTAYRPKLLSLFQGLHPTVAVTAQRLSDQVRAIQRCKLLDDTVLERLRREALPARTESNVRSVEEPISLNNFARSEEVNSEQVSVSDQLQEQVRRALEDAFAEYRSAPISLRPCLPRLPMHRRNISLVSALDSVLKAHWETSVDLCDTHSILYCEAVAVCRVAGVRFPNLHRATQPTNAKPFWQCRIERRINMARTLIAKLLCFQAGNNRPRVMRSVAQAFAGTGVAPVDYVAGVAERIVHWKQKVYAWAKRIRRYKARADRYHVNRTFQTNQRSVYQAWERPQERVTDVHLPNAAVMAEFWRTIWSGPVIHSEGKWFDVVGRSCGPIQKMEPVVISREDLACAVRAAPNWKSPGPDGLHAFWLKRLQGSHSRLATQFQEALQLGSLPSFMTSGVTHLIHKSGSTSEPKNYRPITCLPTVYKLLTSILRIKINNPLNAQHILSPTQNGCKGGSRGTKDLLLIDMAICQQVRRSRKNVSMAWIDYKKAYDSVPHTWLGRVLELYRVHPALCSFLGSCMRQWTTVLRHPGCGGLSGSSDLIKISRGIFQGDSLSPLWFCLALNPLSAILKDSKLGYHLRRESEPISHILYMDDLKLYASKKTDLMELLKITGNFSNDIGMEFGVDKCTVIHVQRGRVEDSFNLQLSEDISLRSLSEMDSYKYLGMSQALSIAEQDMKQSLKDRFFARLIKVLKSLLSGGNKVRAFNGWVMPVLTYSFGILRWTQSELDALDRKVRRLLTAYRMHHPRSSVMRLYIPRKCGGRGFLNAKTLHNREVCNLRQYFLSLSVVMYRDVAAIDRGLTPLSLANENWRRPQVLSISDRTAIWKGKELHGRFYRALTGPDVDQLASVNWLRFSNLFGETEGFVFAIMDEVIMTNNYRKHILKDGTVDICRACHRPGGSIRHVVSGCSRLANGEYLHRHNQVARIIHQQLALKYGLVDSEVPYYQYQPLPVLESGHITLYWDRSIITDRTIVVNKPDIMIIDRSMRRVMLVDVIIPHDENLVKTEKEKLSKYLDLAHEVTAMWNVDSTIIIPMVVSVNGLIAKSFDKHLEKLSLGSWVKGLIQKAVMLEPWLGRGAGGGARGIARGRSNSRRRISRLNTADGCILRPATYVDIRGLVRPTFPASATQ

SEQ ID NO: 27604 - protein, 1200 aa, Eilema depressum
MLTRSRTRNNANAPTTSPDSSLSSAAQPLASEPAASSSSSSDEFFSPPTSPPPVRRPGRGRPPASLEPRRPPASNRAPAAGGEVRRMRWTNSINENVMRAFYAATEGGTNLTAYRARMLPLFQVLEPTVNVSAQRLSDQVRAIQRCHLLDDSVLERLRSDSRSNPGASTSSQPLTQHEHFISQVNEESVSHVSEEVVDTGVTHVSTVCIDIIRSALECAMREYRSMPFDYRPRLPRLPTHKKNIALVCALDSLLSDYFDNSEDLSDTHSILYCAAVAACRVANVKFHRTILTTRPKSAVPAWQSRIERRIAETRALIGKLICFRSGNTRPRVMRFVTRAFSGTDIRPREFLSRVTERIDFLKQKIYAWANRIRRYKRRVDRYSQNRTFQRDERWVYRSWERPDSNGTDMRRPDDDATNTFWRSIWSTPVSHTEGDWMRVVERSCESIGTMEPVTISDDDVTNAVRLLPNWRSAGPDGLHNFWLKWFRSSHGRLAMQFQSCLESGSLPAFITTGVTHLLHKSGSTTDPKNYRPITCLPTVYKLLTSILREKISSHLIDNSIMSISQNGCRSGARGTKELLIIDMAICQQARRHRKDLATCWIDYKKAYDSVPHTWLLRVLELYKIDTTLCTFMKTCMGQWRTVLCYPGCRQICEDSGLIKIERGIFQGDSLSPLWFCLALNPLSTILDSSGLGCRLRRDGQVISHLLYMDDLKLFAPNNLHLIELLKLTETFSNSIRMDFGVDKCAVMHVKRGRIVESESVELSDSTKLRALSATDTYKYLGMSQALGISEAGMKQSLQERFFGRLKKVLKSLLSGGNKVRACNGWVMPVLMYSFGILRWTQTELEALDRKVRAHLTAYRMHHPRSSVMRLYIPRKCGGRGFLNAKTLHNREVCNLREYFLHNDADMHRDVVMVDNGLTPLGLAKENWRKPAVLSINDRKDVWKGKELHGRFYRALHGPEIDIPASLSWLRFGDLFGETEGFVFAIMDEVVMTNNYRRYIIKDGTVDICRACHRPGESLRHIISGCSRLANGEYLHRHNQVARIIHQQLALKYNLVESEVPYYRYVPDPVLENGHITLYWDRSIITDRTIVANKPDIVIIDRLERRAIIVDITIPHDENLMKAEKEKQIKYLDLAHEIVDMWDVDSAIIVPIVVSVHGLIAKSLDQHLKRLSLDGWLKGLMQKAVLLGTARIVRKFLSLEP

SEQ ID NO: 27605 - protein, 1203 aa, Clostera curtula
MERRINPRRQCREPYETNARITSAAVSSNRVQSSDEEYFTPPGTASSSEDEPTPSPSLSRRPARRGRPPLPASLGSTGHRALPTAPATGGVVRRMRWTNNLNESVMRAYYGATDGGTNLTAYRSRLLALFQGLHPDVTVTAQRLSDQVRAIQRLNLLEQPVLERLRLEALPPQSVSSVQVTTPTAACLLPPTSVEQLDLGQIEEVSLNDQYNEQLRRILEETIEEYRLIPMTSRPRIPRLPMHKRNMALVSALDSLLMDKLNSVGDLTELHFILYCGAVAVCRVAGVTIPKSSTASRQPECKPAWQYRIEKRITAARTLIAKLYCFMTGNTRPRVMRYVIQAFAGTGVRQCDYAACVTERIDYFKQKVYAWAKRIRRYRERADRFNQNRLFQNDQKIIYRNWERPQPPTADLSTPDADTMLAFWRNIWSRPVDHLEGQWIDVVGRACEQITQMEPVHIDLNDVISAIRSAPNWKSPGPDGLHNFWIKKVCSCHARLATLFQAALEAGSLPHFMTTGVTHLIHKSGRISEPKNYRPITCLPTIYKLLTSIIKFKIVNHILANNILASNQNGCNAGSRGTKDLLLIDMAICQQVRRSKKNISMAWIDYKKAYDSVPHSWLMGVLDLYKVDANLCLFLSSCMRQWSTVLYHPGHRHFFEPSERIWIKRGIFQGDSLSPLWFCLALNPLSILLNDSMPGYRLHRGGKTISHLLYMDDLKLYAPKQSDLMALLQVTETFSSAISMEFGVDKCAFINVQKGRVVNSENLQLSENVVLRSLCESDTYKYLGMSEALGIADSDVKQQLKTRFLGRLTKVLKSLLSGGNKVRAFNCWVIPVIAYSFGILRWTQSELDALDRMVRRQLTAFRMHHPRSSVMRLYIPRRCGGRGFLNVKSLHNREVCNLRDYFLRVDDEMHRDVVKVDSGLTALSMAKQNWRRPQVLSVSERKAIWKGKELHGRFYSALTGPEIDQLASVSWLRFGNLFGETEGFVFAIMDEVVKTNNYRKYIIKDGTVDICRACHCPGESIRHVVSGCSRLANGEYLHRHNQVAGIIHQQLALRYGIVESEVPYYQYKPEPVLSNNHVTLYWDRSIVTDRTIMANKPDIVVIDRSTRRAMLIDITIPHDVNLVKAEHEKISKYLDLSHEVGAMWNMDSTIIVPIVISVHGLIAKSFDQHLQKLSLGSWVKSLIQKAVLLDTARIVRRFLTLDP

SEQ ID NO: 27606 - protein, 1106 aa, Clostera curtula
MRWSHQLNEDVMRAYYGATKGGTALTSYRSKMLSLFQAVHPTVTVTAQRLADQVRAIQRLGLLDAPVLEQLRDEIQPALSEPALGDVTAVPRDTRTISEPDINMPEPVCINDQDIERLRRTLENVIGEYRVMPIFDRPKLPRLPLNAHNVSIVNAYDNILQTYLDSSTDLTDTYSILYCGAVAACREAGIGVLAPNQNIRPAAAAPRWKLRIERRITAARTIIAKLYCFQAGNVRPRIMRFVNQAFAGTGISSNNYSSHILDRIDFWKQKVYAWAKRIKRYSTTTERYSINKIFQSDQRSVYRKWQNPKSQIPDINLPNIDHMSTFWENIWSNPINYSENEWFDVVRRACEIIPEMAPVSITANDVKSAISWAPNWKSPGPDRLHAYWIKSYRSSHERLATQYQQALESGNIPEFMTTGLTHLIHKSGSTSDPKNFRPITCLPIIYKILTSILRTKINAHVTANDILSPTQNGCKAKSRGTKDLLLIDMAIGQQVRRNKRNVFMAWIDYKKAYDSVPHSWLKRVLKLYKIHPTLCAFLSSCMEQWSTILLHPGHINSFDSSNLVKIKRGIFQGDSLSPLWFCLALNPLSTLLKCSGLGYRLRKENEAISHLLYMDDLKLYASKKPDLMELLKITDNFSKSIGMEFGVDKCAVLNIQRGRIVNSECMQVSRNVSLRCLSESETYKYLGMSEALGVADADMKQVLKERFYSRLTKVLKSLLSGGNKVRAFNSWVMPVLTYSFGILRWTQTELDAVDRKVRRLLIAYRMHHPRSSVMRMYIPRKCGGRGFLNAKDLHNREIYNLREYFLKVNVDMYQNVVAIDKGLTPLSLATANWMKPKVMSISDRTAIWKDKELHGRFYRALTGSDVDQLASVDWLRFGNLFGETEGFVFAIMDEVMMTNNYRKHILKDGTVDICRACHRPGESIRHIVSGCSRLANGEYLHRHNQVAKIIHQQLAFKYGLVSTEVPYYQYQPQPVLENDHVTLYWDRSIITDRYIAANKPDIVVIDRSTRHVRLVDITIPHDENLVKAEKEKMIKYLDLAHEVTAMWSAESTSIIPIVISVHGLISKSFDGHLNQLSISGWVKRLMQKAVLLETARIVRRFLSLQH

SEQ ID NO: 27607 - protein, 1204 aa, Phalera bucephala
MAEPSRRNPVRLCRQRDARSPSARPTPLPGSPTSPQPSEDEDFFTPPTSGASSDDAGISASPPTLTSARRGRPPLPARLGPAGHCAPPTAPATGGVVRRMRWTPELNLSVMRAYYGATEGGTILTAYRPKLLSLFQGLHPTVAVTAQRLSDQVRAIQRCKLLDDTVLERLHREALPARTESNVRSVEDPISLNNFARSEEVNSEQVSVSDQLQEQVRRALEDAFAEYRSAPISLRPCLPRLPMHRRNISLVSALDNVLKPHWETSVDLCDTHSILYCGAVAVCRVAGVRFPNLHRATQPTNAKPLWQCRIERRINMARTLIAKLLCFQAGNNRPRVVRFVTQAFAGTRVAPVDYVAGVAERIDYWKQKVYAWAKRIRRYKARADRYHVNRTFQTNQRSVYQAWERPQERVTDVHLPNAAVMAEFWRKIWSVPVTHSEGEWFDVVGRSCGPIQEMEPVVISREDLACAVRAAPNWKSPGPDGLHAFWLKRLQGSHSRLATQFQEALQLGSLPSFMTSGVTHLIHKSGSTSEPKNYRPITCLPTVYKLLTSILRIKINNHLKAQHILSPTQNGCKGGSRGTKDLLLIDMAICQQVRRSRKNVSMAWIDYKKAYDSVPHTWLGRVLELYRVHPALCSFLGSCMRQWTTVLRHPGCGGLSGSSDLIKISRGIFQGDSLSPLWFCLALNPLSAILKDSKLGYHLRRESEPISHLLYMDDLKLYASKKTDLMELLKITGNFSNDIGMEFGVDKCAVIHVQRGRVEDSFNLQLSEDISLRSLSEMDSYKYLGMSQALSIAEQDMKQSLRDRFFARLIKVLKSLLSGGNRVRAFNGWVMPVLTYSFGILRWTQSELDALDRKVRRLLTAYRMHHPRSSVMRLYIPRKCGGRGFLNAKTLHNREVCNLRQYFLSVSVVMYRDVAAIDRGLTPLSLANGNWRRPQVLSTSDRTAIWKGKELHGRFYRALTGPDVDQLASVTWLRFSNLFGETEGFVFAIMDEVIMTNNYRKYILKDGTVDICRACHRPGESIRHVVSGCSRLANGEYLHRHNQVARIIHQQLALKYGLVDSEVPYYQYQPLPVLESGHITLYWDRSVITDRTIVANKPDIVIIDRSMRRVMLVDVTIPHDENLVKAEKEKLSKYLDLAHEVTAMWNVDSTIIIPMVVSVNGLIAKSFNKHLEKLSLGSWVKGLIQKAVMLDTARIVRRFLSLEP

SEQ ID NO: 27608 - protein, 1204 aa, Phalera bucephala
MAEYPRRNPVRRCRQRIAQGHSARPSPLRGSPNSPQSSENELYFTPPTSGASSDETEPPASSHPLRPERRGRPPLPACIGPAEHCAPPTAPATGGVVRRMRWTSELNMSVMRAYYGATKGETILTAYRPKLLSLFQELHPTVAVTAQRLSDQVRAIQRCKLLDDTVLERLRSETCPARTESDLRSFEEPISLDNFARSEEVNSGQVSVGDQLQEQVRRALKDAFAEYRSAPISLRPCLPRLPMHRHNISLVGALDNVLKSHWETSVDLCDTHSILYCGAVAVCRVAGVRFPNLHRATQPTNAKPFWQCRIERRINMARTLIAKLLCFQAGNNRPRVVRFVAQAFAGTGVAPVDCMARVTERIDYWKQKVYAWANRIRRYRERADRYHVNRTFEVNQKSLYQAWERPQERVTDVHLPDAATMAEFWRKIWSVPVSHSEGEWFDVVGRSCEPIQEMEPVVITRDDVACAVRAAPNWKSPGPDGLHAFWLKRLQGSHARLATQFQEALELGSLPSLLTTGVTHLIHKSGSTLEPKNYRPITCLPTVYKLLTSILRTKINNHLKAQHILSPTQNGCKRGSRGTKDLLLIDMAICQQVRRSRKNVSMAWIDYKKAYDSVPHTWLRRVLELYKVHPALCSFLGLCMGQWTTVLRHPGYGGLSGSSDLIKISRGIFQGDSLSPLWFCLALNPLSAILKNSKLGYHLRRGSEPISHLLYMDDLKLYASKKTDLMELLKITGNFSNDIGMEFGVDKCAVIHVQRGRVEDSFNLQLSEDISLRSLSEMDSYKYLGMSQALSIAEQDMKQSLKDRFFARLMKVLKSLLSGGNKVRAFNGWVMPVLTYSFGILRWTQSELDALDRKVRRLLTAYRMHHPRSSVMRLYIPRRCGGRGFLNAKTLHNREVCNLRQYFLSVSVVMYRDVAAIDRGLTPLSLANGNWRRPQVLSILDRTAIWKGKELHGRFYRALTGPDVDQLASVTWLRFSNLFGETEGFVFAIMDEVIMTNNYRRHILKDGTVDICRACHRPGESIRHVVSGCSRLANGEYLHRHNQVAKIIHQQLALKYDLVDSEVPYYQYQPLPVLESGHITLYWDRSIITDRTIVANKPDIVIIDRSMRRVMLVDVTIPHDENLVKAEKEKISKYLDLAHEVTAMWNVDSTIIIPMVVSVNGLIAKSFDKHLEKLSLGSWVKGLIQKVVVLDTARIVRRFLSLEP

SEQ ID NO: 27609 - protein, 1204 aa, Phalera bucephala
MAEPSRRNPVRLCRQRDARSPSARPTPLPGSPTSPQPSEDEDFFTPPTSGASSDDAGISASPPTLTSARRGRPPLPARLGPAGHCAPPTAPATGGVVRRMGWTPELNLSVMRAYYGATEGGTILTAYRPKLLSLFQGLHPTVAVTAQRLSDQVRAIQRCKLLDDTVLERLHREALPARTESNVRSVEDPISLNNFARSEEVNSEQASVSDQLQEQVRRALEDAFAEYRSAPISLRPCLPRLPMHRRNISLVSALDNVLKPHWETSVDLCDTHSILYCGAVAVCRVAGVRFPNLHRATQPTNAKPLWQCRIERRINMARTLIAKLLCFQAGNNRPRVVRFVTQAFAGTRVAPVDYVAGVAERIDYWKQKVYAWAKRIRRYKARADRYHVNRTFQTNQRSVYQAWERPQERVTDVHLPNAAVMAEFWRKIWSVPVTHSEGEWFDVVGRSCGPIQEMEPVAISREDLACAVRAAPNWKSPGPDGLHAFWLKRLQGSHSRLATQFQEALQLGSLPSFMTSGVTHLIHKSGSTSEPKNYRPITCLPTVYKLLTSILRIKINNHLQAQHILSPTQNGCKGGSRGTKDLLLIDIAICQQVRRSRKNVSMAWIDYKKAYDSVPHTWLGRVLDSYRVHPALCSFLGSCMGQWTTVLRHPGCGGLSGSSDLIKISRGIFQGDSLSPLWFCLALNPLSAILKDSKLGYHLRRESEPISHLLYMDDLKLYASKKTDLMELLKITGNFSNDIGMEFGVDKCAVIHVQRGRVEDSFNLQLSEDISLRSLSEMDSYKYLGMSQALSIAEQDMKQSLRDRFFARLIKVLKSLLSGGNRVRAFNGWVMPVLTYSFGILRWTQSELDALDRKVRRLLTAYRMHHPQSSVMRLYIPRKCGGRGFLNAKTLHNREVCNLRQYFLSVSVVMYRDVAAIDRGLTPLSLANGNWRRPQVLSTSDRTAIWKGMELHGRFYRALTGPDVDQLASVTWLRFSNLFGETEGFVFAIMDEVIMTNNYRKYILKDGTVDICRACHRPGESIRHVVSGCSRLANGEYLHRHNQVARIIHQQLALKYGLVDSEVPYYQYQPLPVLESGHITLYWDRSVITDRTFVANKPDIVIIDRSMRRVMLVDVTIPHDENLVKAEKEKLSKYLDLAHEVTAMWNVDSTIIIPMVVSVNGLIAKSFDKHLEKLSLGRWVKGLIQKAVMLDTARIVRRFLSLEP

SEQ ID NO: 27610 - protein, 889 aa, Phalera bucephala
MARTLIAKLLYFQAGNNRPRVMRFVAQAFAGTGVAPVDYVAGVAERIDYWKQKVYAWAKRIRRYKARADRYHVNRTFQTNQRSVYQAWERPQERVTDVHLPNAAVMAEFWRKVWSVPVSHSEGEWFDVDGRSCGPIQEMEPVVISREDLARAVRAAPNWKSPGPDGLHAFWLKRLQGSHSCLATQFQEALQLGSLPSFMTSGVTHLIYKSGSTLEPKNYRPITCLPTVYKLLTSILRIKINNHLKAQHILSPTQNGCKGGSRGTKDLLLIDMAICQQVRRSRKNVSMAWIDYKKAYDSVPHTWLGRVLELYRVHPALCSFLGSCMRQWTTVLRHPGCGGLSGSSDLIKISRGIFQGDSLSPLWFCLALNPLSAILKDSKLGYHLRRESEPISHLLYMDDLKLYASKKTDLMELLKITGNFSNDIGMEFGVDKCAVIHVQRGRVEDSFNLQLSEDISLRSLSEMDSYKYLGMSQALSIAEQDMKQSLKDRFFARLIKVLKSLLSGGNKVRAFNGWVMPVLTYSFGILRWTQSELDALDRKVRRLLTAYRMHHPRSSVMRLYIPRKCGGRGFLNAKTLHNREVCNLRQYFLSVSVVMYRDVAAIDRGLTPLSLANENWRRPQVLTISDRTAIWKGKELHGRFYRALTGPDVDQLASVNWLRFSNLFGETEGFVFAIMDEVIMTNNYRKHILKDGTVDICRACHRPGESIRHVVSGCSRLANGEYLHRHNQVARIIHQQLALKYGLVDSEVPYYQYQPLPVLESGHITLYWDRSIITDRTIVANKPDIVIIDRSMRRVMLLDVTIPHDENLVKAEKEKLSKYLDLAHEVTAMWNVDSTIIIPMVVSVNGLIAKSFDKHLEKLSLGSWVKGLIQKAVMLDTARIVRRFLSLEP

SEQ ID NO: 27611 - protein, 1204 aa, Phalera bucephala
MAEPSRRNPVRLCRQRDARSPSARPTPLPGSPASPQPSEDEDFFTPPTSGASSDDAGISATPPTLTSARRGRPPLPARLGPAGHCAPPTAPATGGVVRRMRWTPELNLSVMRAYYGATEGGTILTAYRPKLLSLFQGLHPTVAVTAQRLSDQVRAIQRCKLLDDTVLERLRREALPARTDSNVRGVEEPISLNNFARSEEVNSEQVSVSDQLQEQVRRALEDAFAEYRSAPISLRPCLPRLPMHRRNISLVSALDNVLKPHWETSVDLCDTHSILYCGAVAVCRVAGVRFPNLHRATQPTNTKPFWQCRIERRINMARTLIAKLLCFQAGNNHPRVVRFVAQAFAGTGVAPVDYVAGVAERIDYWKQKVYAWAKRIRRYKARADRYHVNRTFQTNQRSVYQAWERPQERVSDVHLPNAAVMAEFWRKIWSVPVSHSEGEWFDVVGRSCGPIQEMEPVVISREDLACAVRAAPNWKSPGPDGLHAFWLKRLQGSHSRLATQFQEALQLGSLPSFMTSGVTHLIYKSGSTSEPKNYRPITCLPTVYKLLTSILRIKINNHLKAQHILSPTQNGCKGGSRGTKDLLLIDMAICQQVRRSRKNVSMAWIDYKKAYDSVPHTWLGRVLELYRVHPALCSFLGSCMGQWTTVLRHPGCGGLSGSSDLIKISRGIFQGDSLSPLWFCLALNPLSAILKDSKLGYHLRRESEPISHLLYMDDLKLYASKKTDLMELLKITGNFSNDIGMEFGVDKCAVIHVQRGRVEDSFNLQLSEDISLRSLSEMDSYKYLGMSQALSIAEQDMKQSLKDRFFARLIKVLKSLLSGGNKVRAFNGWVMPVLTYSFGILRWTQSELDALDRKVRRLLTAYRMHHPRSSVMRLYIPRKCGGREFLNAKTLHNREVCNLRQYFLSVSVVMYRDVAAIDRGLTPLSLANENWRRPQVLSISDRTAIWKGKELHGRFYRALTGPDVDQLASVNWLRFSNLFGETEGFVFAIMDEVIMTNNYRKHILKDGTVDICRACHRPGESIRHVVSGCSRLANGEYLHRHNQVARIIHQQLALKYGLVDSEVPYYQYQPLPVLESGHITLYWDRSIITDRTIVANKPDIVIIDRSMRRVMLVDVTIPHDENLVKAEKEKLSKYLDLAHEVTAMWNVDSTIIIPMVVSVNGLIAKSFDKHLEKLSLGSWVKGLIQKAVMLVTARIVRRFLSLEP

SEQ ID NO: 27612 - protein, 1204 aa, Phalera bucephala
MAEPSRRNPVRLCRQRDARSPSARPTPLPGSPTSPQPSEDEDFFTPPTSGASSDDAGISASPPTLTSARRGRPPLPARLGPAGHCAPPTAPATGGVVRRMRWTPELNLSVMRAYYGATEGGTILTAYRPKLLSLFQGLHPTVAVTAQRLSDQVRAIQRCKLLDDTVLERLHREALPARTESNVRSVEDPISLNNFARSEEVNSEQASVSDQLQEQVRRALEDAFAEYRSAPISLRPCLPRLPMHRRNISLVSALDNVLKPHWETSVDLCDTHSILYCGAVAVCRVAGVRFPNLHRATQPTNAKPLWQCRIERRINMARTLIAKLLCFQAGNNRPRVVRFVTQAFAGTRVAPVDYVAGVAERIDYWKQKVYAWAKRIRRYKARADRYHVNRTFQTNQRSVYQAWERPQERVTDVHLPNAAVMAEFWRKIWSVPVTHSEGEWFDVVGRSCGPIQEMEPVVISREDLACAVRAAPNWKSPGPDGLHAFWLKRLQGSHSRLATQFQEALQLGSLPSFMTSGVTHLIHKSGSTSEPKNYRPITCLPTVYKLLTSILRIKINNHLKAQHILSPTQNGCKGGSRGTKDLLLIDIAICQQVRRSRKNVSMAWIDYKKAYDSVPHTWLGRVLELYRVHPALCSFLGSCMGQWTTVLRHPGCGGLSGSSDLIKISRGIFQGDSLSPLWFCLALNPLSAILKDSKLGYHLRRESEPISHLLYMDDLKLYASKKTDLMELLKITGNFSNDIGMEFGVDKCAVIHVQRGRVEDSFNLQLSEDISLRSLSEMDSYKYLGMSQALSIAEQDMKQSLRDRFFARLIKVLKSLLSGGNRVRAFNGWVMPVLTYSFGILRWTQSELDALDRKVRRLLTAYRMHHPRSSVMRLYIPRKCGGRGFLNAKTLHNREVCNLRQYFLSVSVVMYRDVAAIDRGLTPLSLANGNWRRPQVLSTSDRTAIWKGKELHGRFYRALTGPDVDQLASVTWLRFSNLFGETEGFVFAIMDEVIMTNNYRKYILKDGTVDICRACHRPGESIRHVVSGCSRLANGEYLHRHNQVARIIHQQLALKYGLVDSEVPYYQYQPLPVLESGHITLYWDRSVITDRTIVANKPDIVIIDRSMRRVMLVDVTIPHDENLVKAEKEKLSKYLDLAHEVTAMWNVDSTIIIPMVVSVNGLIAKSFDKHLEKLSLGSWVKGLIQKAVMLDTARIVRRFLSLEP

SEQ ID NO: 27613 - protein, 1105 aa, Phalera bucephala
MRWTSELNMSVMRAYYGATKGETILTAYRPKLLSLFQELHPTVAVTAQRLSDQVRAIQRCKLLDDTVLERLRSETCPARTESDLRSFEEPISLDNFARSEEVNSGQVSVGDQLQEQVRRALKDAFAEYRSAPISLRPCLPRLPMHRHNISLVGALDNVLKSHWETSVDLCDTHSILYCGAVAVCRVAGVRFPNLHRATQPTNAKPFWQCRIERRINMARTLIAKLLCFQAGNNRPRVVRFVAQAFAGTGVAPVDYMARVTERIDYWKQKVYAWANRIRRYRERADRYHVNRTFEVNQRSVYQAWERPQERVTDVHLPDAATMAEFWRKIWSVPVSHSEGEWFDVVGRSCEPIQEMEPVVITRDDVACAVRAAPNWKSPGPDGLHAFWLKRLQGSHARLATQFQEALELGSLPSLLTTGVTHLIHKSGSTLEPKNYRPITCLPTVYKLLTSILRTKINNHLKAQHILSPTQNGCKGGSRGTKDLLLIDMAICQQVRRSRKNVSMAWIDYKKAYDSVPHAWLRRVLELYKVHPALCSFLGLCMGQWTTVLRHPGYGGLSGSSDLIKISRGIFQGDSLSPLWFCLALNPLSAILKNSKLGYHLRRGSEPISHLLYMDDLKLYASKKTDLMELLKITGNFSNDIGMEFGVDKCAVIHVQRGRVEDSFNLQLSEDISLRSLSEMDSYKYLGMSQALSIAEQDMKQSLKDRFFARLMKVLKSLLSGGNRVRAFNGWVMPVLTYSFGILRWTQSELDALDRKVRRLLTAYRMHHPRSSVMRLYIPRRCGGRGFLNAKTLHNREVCNLRQYFLSVSVVMYRDVAAIDRGLTPLSLANGNWRRPQVLSISDRTAIWKGKELHGRFFRALTGPDVDQLASVTWLRFSNLFGETEGFVFAIMDEVIMTNNYRKHILKDGTVDICRACHRPGESIRHVVSGCSRLANGEYLHRHNQVAKIIHQQLALKYDLVDSEVPYYQYQPLPVLESGHITLYWDRSIITDRTIVANKPDIVIIDRSMRRVMLVDVTIPHDENLVKAEKEKISKYLDLAHEVTAMWNVDSTIIIPMVVSVNGLIAKSFDKHLEKLSLGSWVKGLIQKVVVLDTARIVRRFLSLEP

SEQ ID NO: 27614 - protein, 1197 aa, Bombyx mori
MSTTTALRKNPSRQCRQVTCGARRTSPCIPSCSSDGSPSPTRIESLSSDETQPSPAPPRPVRRGRPPLARLGSTRRNAPSTVPATSGVVRSRMRWNENINMNVMRAYYEATEGETNLSAYRSKMFSVFQTLCPTVNVSTQRLSDQVRAIQRLRLLDQSLLDRLRYEALPVPIEPQENQVVTDTVAPIIQHDEEIQEQVCASNQDYERLSSALEDSIQEYRLVSACSRPRLPRLPMHRRNVSLVGALDSILKPYLESSTDLIDTHSLLYCGAVAVCRVAEVKSPNLTQTACRPPTKPQWQCRIEKRIDRARILIAKLMCFQKGNTRPRVMCFVDQAFAGTGISSNEYMTCIIERIDFWKQKVYAWASRIRRYRLRSERYHLNRVFQRDQRSVYRNWESSQSQVTDEPYNVNEEDMSTFWNNIWSIPIGHSEGEWIQTVRRECESYKEMDPITISAVDVSRAVRSMPNWKSPGPDGLHSYWIKWIRSSHERLAAQFQQALELGSLPDFMTSGITYLIYKSGNTSDPKNYRPITCLPTIYKLLTSILRIKIQNHIFNNNILSPNQNGCKAGSRGTKDLLLIDMAITQQVRRSKRNVHMAWIDYKKAYDSVPHTWLMRVLELYKINPILCSFLSSCMGQWSTFLSQPGQMTSSAVPNLIRIRRGIFQGDSLSPLWFCLALNPLSTLLKDSTLGYRLRRGDEAISHLLFMDDLKLFASKKPDLMSLLKITDSFSKAIGMEFGVDKCAFIDVQRGKVVSSNCLLLNHSVVLKSLCESETYKYLGMFEVLNIVDADMKQSFRDRFFGRLIKVLKSHLSGGNKIRAFNGWVMPMLTYSFGILRWTQSELDVLDRKVRRLLTAYRMHHPRSSVMRLYIPRKCGGRGILNAKDLHNREIYNLREYFLKMNVNMYRDVVAVDKELTPLSLANGNWKRLKVESISDRITVWRNKELHGRFYRALTGPDVDQLASVAWLRFSNLFGETEGFIFAIMDEVIMTNNYRKYILKDGTVDICRACHRPGESIRHIVSGCSRFANGEYLHRHNQVARIIHQQLALKYGFLDSAVPYYQYQPQPVLDNGHVTLYWDRSIITDRYIVANKPDIVIIDRSARRAVLVDVTIPHDENLVKAEKDKLIKYLDLAHETTAMWHVDSTIIVPIVVSVHGLIAKSFDQHLKKLSLSSWVKGLIQKAVILDTARIVRRFLTLES

SEQ ID NO: 27615 - protein, 988 aa, Junonia evarete
MRRTLEDAILKYRPMPFNLRPRIPRLPIHKRNITIVGVVDKMLQQYLNNSQDLYDTCSIMYCGAVAVCNLALVKFKTNKIIPISNTVPAWQARIENRISSTRTIIGKLISFKSGNNRPRIMRYVHQAFAGTNIRSSEYMDSVTERIDFFKQKIFAWAKRIRRYKKRVSRYRQNRMFQSDQRKVYRDWEQCNDTVASSAFPPSEVTSEFWRSIWSAPIEHTEGEWMSAVRKECESLPQMEPVTISPEDISCAIRTSSNWKCPGPDGLHNFWLKNFHSSHSVLASQFQNALVSGTLPTFLTTGTTSLLYKSGCTADPKNYRPITCLSTTYKLLTSILAAKINKHITANNILAPAQNGCRSGSRGTKELLLIDMTICQQARRNRKNLCAAWIDYKKAYDSVPHTWLVRIMELYKIDATLYSFLRSCMGQWITYLRHPGSTDISGSTEPIRIKRGIFQGDSLSPLWFCLALNPLSTLLENSGLGFRLRRGSTIISHLLYMDDLKLYASKKSDLVKLLQITETFSSCIGMEFGIDKCAVIHVERGRVVSSEHIQLTQTLFLRSLDVGENYKYLGMSEALGIDDGSMKQLVKERFFGRLKKVLNSFLSGGNKVRAFNSWVMPLLVYTFGILRWTQTELDSLDRQVRKQLTTYRMHHPRSSVMRLYIPRKCGGRGFLNAKNLHNREVYNLRNYFLGISGGMHKDVVAVDKGLTPLSLGKENWRRPIVLDTHDRMTVWKGKELHGRFYRALMSSDVDQASSVSWLQYGDLFGETEGFVCAIMDEVIKTNNYRKFIMKDGTADVCRACHRPGESLRHIISGCCHLANGEYLHRHNQVARIIHQQLALRYGLVDIEVPYYRYNPAPVLENGNALLYWDRSIITDRHIPANKPDIVIVDRSARLAIIVDITIPHDDNLVKAEKEKLSKYLDLAHEITAMWSVDSTIIVPVVVSVNGLFAKSFDQHLKKLSLGCWIKGRLQKAVLLETARIVRRFLTLES

SEQ ID NO: 27616 - protein, 1201 aa, Phalera bucephala
MAEPSRRNPVRLCRQRDARSPSARPTPLPGSPTSPQPSEDEDFFTPPTSRASSDDAGISASPPTLTSARRGRPPLPARLGPAGHCAPPTAPATGGVVRRMRWTPELNLSVMRAYYGATEGGTILTAYRPKLLSLFQGLHPTVAVTAQRLSDQVRAIQRCKLLDDTVLERLHREALPARTESNVRSVEDPISLNNFARSEEVNSEQVSVSDQLQEQVRRALEDAFAEYRSAPISLRPCLPRLPMHRRNISLVSALDNVLKPHWETSVDLCDTHSILYCGAVAVCRVAGVRFPNLHRATQPTNAKPLWQCRIERRINMARTLIAKLLCFQAGNNRPRVVRFVTQAFAGTRVAPVDYVAGVAERIDYWKQKVYAWAKRIRRYKARVDRYHVNRTFQTNQRSVYQAWERPQERVTDVHLPNAAVMAEFWRKIWSVPVSHSEGEWFDVVGRSCGPIQEMEPVVISREDLACAVRAAPNWKSPGPDGLHAFWLKRLHSRLATQFQEALQLGSLPSFMTSGVTHLIHKSGSTSEPKNYRPITCLPTVYKLLTSILRIKINNHLKAQHILSPTQNGCKGGSRGTKDLLLIDIAICQQVRRSRKNVSMAWIDYKKAYDSVPHTWLGRVLELYRVHPALCSFLGSCMGQWTTVLRHPGCGGLSGSSDLIKISRGIFQGDSLSPLWFCLALNPLSAILKDSKLGYHLRRESEPISHLLYMDDLKLYASKKTDLMELLKITGNFSNDIGMEFGVDKCAVIHVQRGRVEDSFNLQLSEDISLRSLSEMDSYKYLGMSQALSIAEQDMKQSLGDRFFARLIKVLKSLLSGGNKVRAFNGWVMPVLTYSFGILRWTQSELDALDRKVRRLLTAYRMHHPRSSVMRLYIPRKCGGRGFLNAKTLHNREVCNLRQYFLSVSVVMYRDVAAIDRGLTPLSLANGNWRRPQVLSTSDRTAIWKGKELHGRFYRALTGPDVDQLTSVTWLRFSNLFGETEGFVFAIMDEVIMTNNYRKHILKDGTVDICRACHRPGESIRHVVSGCSRLANGEYLHRHNQVARIIHQQLALKYGLVDSEVPYYQYQPLPVLESGHITLYWDRSVITDRTIVANKPDIVIIDRSMRRVMLVDVTIPHDENLVKAEKEKLSKYLDLAHEVTTMWNVDSTIIIPMVVSVNGLIAKSFDKHLEKLSLGSWVKGLIQKAVMLDTARIVRRFLSLEP

SEQ ID NO: 27617 - protein, 1205 aa, Phalera bucephala
MAEPSRRNPVRLCRQRDARSPSARPTPLPGSPASPQPSEDEDFFTPPTSGASSDDAGISATPPTLTSARRGRPPLPARLGPAGHCAPPTAPATGGVVRRMRWTPELNLSVMRAYYGATEGGTILTAYRPKLLSLFQGLHPTVAVTAQRLSDQVRAIQRCKLLDDTVLERLRREALPARTDSNVRGVEEPISLNNFARSEEVNSEQVSVSDQLQEQVRRALEDAFAEYRSAPISLRPCLPRLPMHRRNISLVSALDNVLKPHWETSVDLCDTHSILYCGAVAVCRVAGVRFPNLHRATQPTNTKPFWQCRIERRINMARTLIAKLLCFQAGNNRPRVMRFVAQAFAGTGVAPVDYVAGVAERIDYWKQKVYAWAKRIRRYKARADRYHVNRTFQTNQRSVYQAWERPQERVSDVHLPNAAVMAEFWRKIWSVPVSNSEGEWFDVVGRSCGPIQEMEPVVISREDLACAVRAAPNWKSPGPDGLHAFWLKRLQGSHSRLATQFQEALQLGSLPSFMTSGVTHLIYKSGSTSEPKNYRPITCLPTVYKLLTSILRIKINNHLKAQHILSPTQNGCRGGGSRGTKDLLLIDMAICQQVRRSRKNVSMAWIDYKKAYDSVPHTWLGRVLELYRVHPALCSFLGSCMGQWTTVLRHPGCGGLSGSSDLIKISRGIFQGDSLSPLWFCLALNPLSAILKDSKLGYHLRRESEPISHLLYMDDLKLYASKKTDLMELLKITGNFSNDIGMEFGVDKCAVIHVQRGRVEDSFNVQLSEDISLRSLSEMDSYKYLGMSQALSIAEQDMKQSLKDRFFARLIKVLKSLLSGGNKVRAFNVWVMPVLTYSFGILRWTQSELDALDRKVRRLLTAYRMHHPRSSVMRLYIPRKCGGRGFLNAKTLHNREVCNLRQYFLSVSVVMYRDVAAIDRGLTPLSLANENWRRPQVLSISDRTAIWKGKELHGRFYRALTGPDVDQLASVNWLRFSNLFGETEGFVFAIMDEVIMTNNYRKHILKDGTVDICRACHRPGESIRHVVSGCSRLANGEYLHRDNQVARIIHQQLALKYGLVDSEVPYYQYQPLPVLESGHITLYWDRSIITDRTIVANKPDIVIIDRSMRRVMLVDVTIPHDENLVKAEKEKLSKYLDLAHEVTAMWNVDSTIIIPMVVSVNGLIAKSFDKHLEKLSLGSWVKGLIQKAVMLDTARIVRRFFSLEP

SEQ ID NO: 27618 - protein, 1204 aa, Phalera bucephala
MAEPSRRNPVRLCRQRDARSPSARPTPLPGSPTSPQPSEDEDFFTPPTSGASSDDAGISASPPTLTSVRRGRPPLPARLGPAGHCAPPTAPATGGVVRRMRWTPELNLSVMRAYYGATEGGTILTAYRPKLLSLFQGLHPTVAVTAQRLSDQVRAIQRCKLLDDTVLERLHREALPARTESNVRSVEDPISLNNFARSEEVNSEQASVSDQLQEQVRRALEDAFAEYRSAPISLRPCLPRLPMHRRNISLVSALDNVLKPHWETSVDFCDTHSILYCGAVAVCRVAGVRFPNLHRATQPTNAKPLWQCRIERRINMARTLIAKLLCFQAGNNRPRVVRFVTQAFAGTRVAPVDYVAGVAERIDYWKQKVYAWAKRIRRYKARADRYHVNRTFQTNQRSVYQAWERPQERVTDVHLPNAAVMAEFWRKIWSVPVTHSEGEWFDVVGRSCGPIQEMEPVVISREDLACAVRAAPNWKSPGPDGLHAFWLKRLQGSHSRLATQFQEALQLGSLPSFMTSGVTHLIHKSGSTSEPKNYRPITCLPTVYKLLTSILRIKINNHLKAQHILSPTQNGCKGGSRGTKDLLLIDIAICQQVRRSRKNVSMAWIDYKKAYDSVPHTWLGRVLELYRVHPALCSFLGSCMRQWTTVLRHPGCGGLSGSSDLIKISRGIFQGDSLSPLWFCLALNPLSAILKDSKLGYHLRRESEPISHLLYMDDLKLYASKKTDLMELLKITGNFSNDIGMEFGVDKCAVIHVQRGRVEDSFNLQLSEDISLRSLSEMDSYKYLGMSQALSIAEQDMKQSLRDRFFARLIKVLKSLLSGGNRVRAFNGWVMPVLTYSFGILRWTQSELDALDRKVRRLLTAYRMHHPRSSVMRLYIPRKCGGRGFLNAKTLHNREVCNLRQYFLSVSVVMYRDVAAIDRGLTPLSLANGNWRRPQVLSTSDRTAIWKGKELHGRFYRALTGPDVDQLASVTWLRFSNLFGETEGFVFAIMDEVIMTNNYRKHILKDGTVDICRACHRPGESIRHVVSGCSRLANGEYLHRHNQVARIIHQQLALKYGLVDSEVPYYQYQPLPVLESGHITLYWDRSVITDRTIVANKPDIVIIDRSMRRVMLVDVTIPHDENLVKAEKEKLSKYLDLAHEVTAMWNVDSTIIIPMVVSVNGLIAKSFDKHLEKLSLGRWVKGLIQKAVMLDTARIVRRFLSLEP

SEQ ID NO: 27619 - protein, 1204 aa, Phalera bucephala
MAEPSRRNPVRLCRQRDARSPSARPTPLPGSPTSPQPSEDEDFFTPPTSGASSDDAGISASPPTLTSARRGRPPLPARLGPAGHCAPPTAPATGGVVRRMRWTPELNLSVMRAYYGATEGGTILTAYRPKLLSLFQGLHPTVAVTAQRLSDQVRAIQRCKLLDDTVLERLHREALPARTESNVRSVEDPISLNNFARSEEVNSEQVSVSDQLQEQVRRALEDAFAEYRSAPISLRPCLPRLPMHRRNISLVSALDNVLKPHWETSVDLCDTHSILYCGAVAVCRVAGVRFPNLHRATQPTNAKPLWQCRIERRINMARTLIAKLLCFQAGNNRPRVVRFVTQAFAGTRVAPVDYVAGVAERIDYWKQKVYAWAKRIRRYKARADRYHVNRTFQTNQRSVYQAWERPQEKVTDVHLPNAAVMAEFWRKIWSVPVTHSEGEWFDVVGRSCGPIQEMEPVVISREDLACAVRAAPNWKSPGPDGLHAFWLKRLQGSHSRLATQFQEALQLGSLPSFMTSGVTHLIHKSGSTSEPKNYRPITCLPTVYKLLTSILRIKINNHLKAQHILSPTQNGCKGGSRGTKDLLLIDIAICQQVRRSRKNFSMAWIDYKKAYDSVPHTWLGRVLELYRVHPALCSFLGSCMRQWTTVLRHPGCGGLSGSSDLIKISRGIFQGDSLSPLWFCLALNPLSAILKDSKLGYHLRRESEPISHLLYMDDLKLYASKKTDLMELLKITGNFSNDIGMEFGVDKCAVIHVQRGRVEDSFNLQLSEDISLRSLSEMDSYKYLGMSQALSIAEQDMKQSLRDRFFARLIKVLKSLLSGGNRVRAFNGWVMPVLTYSFGILRWTQSELDALDRKVRRLLTAYRMHHPRSSVMRLYILRKCGGRGFLNAKTLHNREVCNLRQYFLSVSVVMYRDVAAIDRGLTPLSLANGNWRRPQVLSISDRTAIWKGKELHGRFYRALTGPDVDQLASVTWLRFSNLFGETEGFVFAIMDEVIMTNNYRKYILKDGTVDICRACHRPGKSIRHVVSGCSRLANGEYLHRHNQVARIIHQQLALKYGLVDSEVPYYQYQPLPVLESGHITLYWDRSVITDRTIVANKPDIVIIDRSMRRVMLVDVTIPHDENLVKAEKEKLSKYLDLAHGVTAMWNVDSTIIIPMVVSVNGLIAKSFDKHLEKLSLGRWVKGLIQKAVMLDTARIVRRFLSLEP

SEQ ID NO: 27620 - protein, 1204 aa, Phalera bucephala
MAEYPRRNPVRRCRQRIAQGHSARPSPLRGSPNSPQSSENELYFTPPTSGASSDETEPPASSHPLRPERRGRPPLPACIGPAEHCAPPTAPATGGVVRRMRWTSELNMSVMRAYYGATKGETILTAYRPKLLSLFQELHPTVAVTAQRLSDQVRAIQRCKLLDDTVLERLRSETCPARTESDLRSFEEPISLDSFARSEEVNSGQVSVGDQLQEQVRRALKDAFAEYRSAPISLRPCLPRLPMHRHNISLVGALDNVLKSHWETSVDLCDTHSILYCGAVAVCRVAGVRFPNLHRATQPTNAKPFWQCRIERRINMARTLIAKLLCFQAGNNRPRVVRFVAQAFAGTGVAPVDYMARVTERIDYWKQKVYAWANRIRRYRERADRYHVNRTFEVNQRSVYQAWERPQERVTDVHLPDAATMAEFWRKIWSVPVSHSEGEWFDVVGRSCEPIQEMEPVVITRDDVACAVSAAPNWKSPGPDGLHAFWLKRLQGSHARLATQFQEALELGSLPSLLTTGVTHLIHKSGSTLEPKNYRPITCLPTVYKLLTSILRTKINNHLKAQHILSPTQNGCKGGSWGTKDLLLIDMAICQQVRRSRKNVSMAWIDYKKAYDSVPHTWLRRVLELYKVHPALCSFLGLCMGQWTTVLRHPGYGGLSGSSDLIKISRGIFQGDSLSPLWFCLALNPLSAILKNSKLGYHLRRGSEPISHLLYMDDLKLYASKKTDLMELLKITGNFSNDIGMEYGVDKCAVIHVQRGRVEDSFNLQLSEDISLRSLSEMDSYKYLGMSQALSIAEQDMKQSLKDRFFARLMKVLKSLLSGGNRVRAFNGWVMPVLTYSFGILRWTQSELDALDRKVRRLLTAYRMHHPRSSVMRLYIPRRCGGRGFLNAKTLHNREVCNLRQYFLSVSVVMYRDVAAIDRGLTPLSLANGNWRRPQVLSISDRTAIWKGKELHGRFYRALTGPDVDQLASVTWLRFSNLFGETEGFVFAIMDEVIMTNNYRKHILKDGTVDICRACHRPGESIRHVVSGCSRLANGEYLHRHNQVAKIIHQQLALKYDLVDSEVPYYQYQPLPVLESGHITLYWDRSIITDRTIVANKPDIVIIDRSMRRVMLVDVTIPHDENLVKAEKEKISKYLDLAHEVTAMWNVDSTIIIPMVVSVNGLIAKSFDKHLEKLSLGSWVKGLIQKVVVLDTARIVRRFLSLEP

SEQ ID NO: 27621 - protein, 962 aa, Phalera bucephala
MHRRNISLVSALDNVLKPHWETSVDLCDTHSILYCGAVAVCRVAGVRFPNLHRATQPTNTKPFWQCRIERRINMARTLIAKLLCFQAGNNRPRVVRFVTQAFAGTRVAPVDYVAGVAERIDYWKQKVYAWAKRIRRYKARADRYHVNRTFQTNQRSVYQAWERPQERVTDVHLPNAAVMAEFWRKIWSVPVTHSEGEWFDVVGRSCGPIQEMEPVVISREDLACAVRAAPNWKSPGPDGLHAFWLKRLQGSHSRLATQFQEALQLGSLPSFMTSGVTHLIHKSGSTSEPKNYRPITCLPTVYKLLTSILRIKINNHLKAQHILSPTQNGCKGGSRGTKYLLLIDIAICQQVRRSRKNVSMAWIDYKKAYDSVPHTWLGRVLELYRVHPALCSFLGSCMRQWTTVLRHPGCGGLSGSSDLIKISRGIFQGDSLSPLWFCLALNPLSAILKDSKLGYHLRRESEPISHLLYMDDLKLYASKKTDLMELLKITGNFSNDIGMEFEVDKCAVIHVQRGRVEDSFNLQLSEDISLRSLSEMDSYKYLGMSQALSIAEQDMKQSLKDRFFARLIKVLKSLLSGGNKVRAFNGWVMPVLTYSFGILRWTQSELDALDRKVRRLLTAYRMHHPRSSVMRLYIPRKCGGRGFLNAKTLHNREVCNLRQYFLSVSVVMYRDVAAIDRGLTPLSLANGNWRRPQVLSTSDRTAIWKGKELHGRFYRALTGPDVDQLASVTWLRFSNLFGETEGFVFAIMDEVIMTNNYRKHILKDGTVDICRACHRPGESIRHVVSGCSRLANGEYLHRHNQVARIIHQQLALKYGLVDSEVPYYQYQPLPVLESGHITLYWDRSVITDRTIVANKPDIVIIDRSMRRVMLVDVTIPHDENLVKAEKEKLSKYLDLAHEVTTMWNVDSTIIIPMVVSVNGLIAKSFDKHLEKLSLGSWVKGLIQKAVMLDTARIVRRFLSLEP

SEQ ID NO: 27622 - protein, 1204 aa, Phalera bucephala
MAEYPRRNPVRRCRQRIAQGHSARPSPLRGSPNSPQSSENELYFTPPTSGASSDETEPPASSHPLRPERRGRPPLPACIGPAEHCAPPTAPATGGVVRRMRWTSELNMSVMRAYYGATKGETILTAYRPKLLSLFQELHPTVAVTAQRLSDQVRAIQRCKLLDDTVLERLRSETCPARTESDLRSFEEPISLDNFARSEEVNSGQVSVGDQLQEQVRRALKDAFAEYRSAPISLRPCLPRLPMHRHNISLVGALDNVLKSHWETSVDLCDTHSILYCGAVAVYRVAGVRFPNLHRATQPTNAKPFWQCRIERRINMARTLIAKLLCFQAGNNRPRVVRFVAQAFAGTGVAPVDCMARVTERIDYWKQKVYAWANRIRRYRERADRYHVNRTFEVNQKSLYQAWERPQERVTDVHLPDAATMAEFWRKIWSVPVSHSEGEWFDVVGRSCEPIQEMEPVVITRDDVACAVRAAPNWKSPGPDGLHAFWLKRLQGSHARLATQFQKALELGSLPSLLTTGVTHLIHKSGSTLEPKNYRPITCLPTVYKLLTSILRTKINNHLKAQHILSPTQNGCKGGSRGTKDLLLIDMAICQQVRRSRKNVSMAWIDYKKAYDSVPHTWLGRVLELYKVHPALCSFLGLCMGQWTTVLRHPGYGGLSGSSDLIKISRGIFQGDSLSPLWFCLALNPLSAILKNSKLGYHLRRGSEPISHLLYMDDLKLYASKKTDLMELLKITGNFSNDIGMEFGVDKCAVIHVQRGRVEDSFNLQLSEDISLRSLSEMDSYKYLGMSQALSIAEQDMKQSLKDRFFARLMKVLKSLLSGGNKVRAFNGWVMPVLTYSFGILRWTQSELDALDRKVRRLLTAYRMHHPRSSVMRLYIPRRCGGRGFLNAKTLHNREVCNLRQYFLSVSVVMYRDVAAIDRGLTPLSLANGNWRRPQVLSISDRTAIWKGKELHGRFYRALTGPDVDQLASVTWLRFSNLFGETEGFVFAIMDEVIMTYNYRKHILKDGTVDICRACHRPGESIRHVVSGCSRLANGEYLHRHNQVAKIIHQQLALKYDLVDSEVPYYQYQPLPVLESGHITLYWDRSIITDRTIVANKPDIVIIDRSMRRVMLVDVTIPHDENLVKAEKEKISKYLDLAHEVTAMWNVDSTIIIPMVVSVNGLIAKSFDKHLEKLSLGSWVKGLIQKVVVLDTARIVRRFLSLEP

SEQ ID NO: 27623 - protein, 1200 aa, Eilema depressum
MLTRSRTRNNANAPTTSPDSSLSSAAQPLASEPAASSSSSSDEFFSPPTSPPPVRRPGRGRPPASLEPRRPPASNRAPAAGGEVRRMRWTNSINENVMRAFYAATEGGTNLTAYRARMLPLFQVLEPTVNVSAQRLSDQVRAIQRCHLLDDSVLERLRSDSRSSPGASTSSQPLTQHEHFISQVNEESVSHVSEEVVDTGVTHVSTVCIDIIRSALECAMREYRSMPFDYRPRLPRLPTHKKNIALVCALDSLLSDYFDNSEDLSDTHSILYCAAVAACRVANVKFHRTILTTRPKSAVPAWQSRIERRIAETRALIGKLICFRSGNTRPRVMRFVTRAFSGTDIRPREFLSRVTERIDFLKQKIYAWANRIRRYKRRVDRFSQNRTFQRDERWVYRSWERPDSNGTDMRRPDDDATNTFWRSIWSTPVSHTEGDWMRVVERSCESIGTMEPVTISDEDVTNAVRLLPNWRSAGPDGLHNFWLKWFRSSHGRLAMQFQSCLESGSLPAFITTGVTHLLHKSGSTTDPKNYRPITCLPTVYKLLTSILREKISSHLIDNSIMSISQNGCRSGARGTKELLIIDMAICQQARRHRKDLATCWIDYKKAYDSVPHTWLLRVLELYKIDTTLCTFMKTCMGQWRTVLCYPGCRQICEDSGLIKIERGIFQGDSLSPLWFCLALNPLSTILDSSGLGCRLQRDGQVISHLLYMDDLKLFAPNNLHLIELLKLTETFSNSIRMDFGVDKCAVMHVKRGRIVESDSVELSDSTKLRALSATDTYKYLGMSQALGISEAGMKQSLQERFFGRLKKVLKSLLSGGNKVRACNGWVMPVLMYSFGILRWTQTELEALDRKVRAHLTAYRMHHPRSSVMRLYIPRKCGGRGFLNAKTLHNREVCNLREYFLHNDADMHRDVVMVDNGLTPLGLAKENWRKPAVLSINDRKDVWKGKELHGRFYRALHGPEIDIPASLSWLRFGDLFGETEGFVFAIMDEVVMTNNYRRYIIKDGTVDICRACHRPGESLRHIISGCSRLANGEYLHRHNQVARIIHQQLALKYNLVESEVPYYRYVPDPVLENGHITLYWDRSIITDRTIVANKPDIVIIDRLERRAIIVDITIPHDENLMKAEKEKQIKYLDLAHEIVDMWDVDSAIIVPIVVSVHGLIAKSLDQHLKRLSLDGWLKGLMQKAVLLGTARIVRKFLSLEP

SEQ ID NO: 27624 - protein, 1094 aa, Phalera bucephala
MRAYYGATEGGTILTAYRPKLLSLFQGLHPTVAVTAQRLSDQVRAIQRCKLLDDTVLERLHREALPARTESNVRSVEDPISLNNFARSEEVNSEQVSVSDQLQEQVRRALEDAFAEYRSAPISLRPCLPRLPMHRRNISLVSALDNVLKPHWETSVDLCDTHSILYCGAVAVCRVAGVRFPNLHRATQPTNAKPLWQCRIERRINMARTLIAKLLCFQAGNNRPRVVRFVTQAFAGTRVAPVDYVAGVAERIDYWKQKVYAWAKRIRRYKARADRYHVNRTFQTNQRSVYQAWERPQERVTDVHLPNAAVMAEFWRKIWSVPVTHSEGEWFDVVGRSCGPIQEMEPVVISREDLACAVRAAPNWKSPGPDGLHAFWLKRLQGSHSRLATQFQEALQLGSLPSFMTSGVTHLIHKSGSTSEPKNYRPITCLPTVYKLLTSILRIKINNHLKAQHILSPTQNGCKGGSRGTKDLLLIDIAICQQVRRSRKNVSMAWIDYKKAYDSVPHTWLGRVLELYRVHPALCSFLGSCMRQWTTVLRHPGCGGLSGSSDLIKISRGIFQGDSLSPLWFCLALNPLSAILKDSKLGYHLRRESEPISHLLYMDDLKLYASKKTDLMELLKITGNFSNDIGMEFGVDKCAVIHVQRGRVEDSFNLQLSEDISLRSLSEMDSYKYLGMSQALSIAEQDMKQSLGDRFFARLIKVLKSLLSGGNRVRAFNGWVMPVITYSFGILRWTQSELDALDRKVRRLLTAYRMHHPRSSVMRLYIPRKCGGRGFLNAKTLHNREVCNLRQYFLSVSVVMYRDVAAIDRGLTPLSLANGNWRRPQVLSTSDRTAIWKGKELHGRFYRALTGPDVDQLASVTWLRFSNLFGETEGFVFAIMDEVIMTNNYRKYILKDGTVDICRACHRPGESIRHVVSGCSRLANGEYLHRHNQVARIIHQQLALKYGLVDSEVPYYQYQPLPVLESGHITLYWDRSVITDRTIVANKPDIVIIDRSMRRVMLVDVTIPHDENLVKAEKEKLSKYLDLAHEVTAMWNVDSTIIIPMVVSVNGLIAKSFDKHLEKLSLGSWVKGLIQKAVMLDTARIVRRFLSLEP

SEQ ID NO: 27625 - protein, 962 aa, Phalera bucephala
MHRRNISLVSALDNVLKPHWETSVDLCDTHSILYCGAVAVCRVAGVRFPNLHRATQPTNAKPLWQCRIERRINMARTLIAKLLCFQAGNNHPRVVRFVTQAIAGTRVAPVDFVAGVAERIDYWKQKVYAWANRIRRYKARADRYHVNRTFQTNQRSVYQAWERPQERVTDVHLPNAAVMAEFWRKIWSVPVTHSEGEWFDVVGRSCGPIQEMEPVVISREDLACAVRAAPNWKSPGPDGLHAFWLKRLQGSHSRLATQFQEALQLGSLPSFMTSGVTHLIHKSGSTSEPKNYRPITCLPTVYKLLTSILRIKINNHLKAQHILSPTQNGCKGGSRGTKDLLLIDIAICQQVRRSRKNVSMAWIDYKKAYDSVPHTWLGRVLELYRVHPALCSFLGSCMRQWTTVLRHPGCGGLSGSSDLIKISRGIFQGDSLSPLWFCLALNPLSAILKDSKLGYHLRRESEPISHLLYMDDLKLYASKKTDLMELLKINGNFSNDIGMEFGVDKCAVIHVQRGRVEDSFNLQLSEDISLRSLSEMDSYKYLGMSQALSIAEQDMKQSLRDRFFARLIKVLKSLLSGGNRVRAFNGWVMPVLTYSFGILRWTQSELDPLDRKVRRLLTAYRMHHPRSSVMRLYIPRKCGGRGFLNAKTLHNREVCNLRQYFLSVSVVMYRDVAAIDRGLTPLSLANGNWRRPQVLSTSDRTAIWKGKELHGRFYRALTGPDVDQLASVTWLRFSNLFGETEGFVFAIMDEVIMTNNYRKYILKDGTVDICRACHRPGESIRHVVSGCSRLANGEYLHRHNQVARIIHQQLALKYGLVDSEVPYYQYQPLPVLESGHITLYWDRSVITDRTIVANKPDIVIIDRSMRRVMLVDVTIPHDENLVKAEKEKLSKYLDLAHEVTAMWNFDSTIIIPVVVSVNGLIAKSFDKHLEKLSLGRWVKGLIQKAVMLDTARIVRRFLSLEP

SEQ ID NO: 27626 - protein, 1204 aa, Phalera bucephala
MAEYPRRNPVRRCRQRIAQGHSARPSPLRGSPNSPQSSENELYFTPPTSGASSDETEPPASSHPLRPERRGRPPLPACIGPAEHCAPPTAPATGGVVRRMRWTSELNMSVMRAYYGATKGETILTAYRPKLLSLFQELHPTVAVTAQRLSDQVRAIQRCKLLDDTVLERLRSETCPARTESDLRSFEEPISLDNFARSEEVNSGQVSVGDQLQEQVRRALKDAFAEYRSAPISLRPCLPRLPMHRHNISLVGALDNVLKSHWETSVDLCDTHSILYCGAVAVCRVAGVRFPNLHRATQPTNAKPFWQCRIERRINMARTLIAKLLCFQAGNNRPRVVRFVAQAFAGTGVAPVDYMARVTERIDYWKQKVYAWANRIRRYRERADRYHVNRTFEVNQRSVYQAWERPQERVTDVHLPDAATMAEFWRKIWSVPVSHSEGEWFDVVGRSCEPIQEMEPVVITRDDVACAVRAAPNWKSPGPDGLHAFWLKRLQGSHARLATQFQEALELGSLPSLLTTGVTHLIHKSGSTLEPKNYRPITCLPTVYKLLTSILRTKINNHLKAQHILSPTQNGCKGGSRGTKDLLLIDMAICQQVRRSRKNVSMAWIDYKKAYDSVPHTWLRRVLELYKVHPALCSFLGLCMGQWTTVLRHPGYGGLSGSSDLIKISRGIFQGDSLSPLWFCLALNPLSAILKNSKLGYHLRRGREPISHLLYMDDLKLYASKKTDLMELLKITGNFSNDIGMEFGVDKCAVIHVQRGRVEDSFNLQLSEDISLRSLSEMDSYKYLGMSQALSIAEQDMKQSLKDRFFARLMKVLKSLLSGGNRVRAFNGWVMPVLTYSFGILRWTQSELDALDRKVRRLLTAYRMHHPRSSVMRLYIPRRCGGRGFLNAKTLHNREVCNLRQYFLSVSVVMYRDVAAIDRGLTPLSLANGNWRRPQVLSISDRTAIWKGKELHGRFYRALTGPDVDQLASVTWLRFSNLFGETEGFVFAIMDEVIMTNNYRKHILKDGTVDICRACHRPGESIRHVVSGCSRLANGEYLHRHNQVAKIIHQQLALKYDLVDSEVPYYQYQPLPVLESGHITLYWDRSIITDRTIVANKPDIVIIDRSMRRVMLVDVTIPHDENLVKAEKEKISKYLDLAHEVTAMWNVDSTIIIPMVVSVNGLIAKSFDKHLEKLSLGSWVKGLIQKVVVLDTARIVRRFLSLEP

SEQ ID NO: 27627 - protein, 1204 aa, Phalera bucephala
MAEPSRRNPVRLCRQRDARSPSARPTPLPGSPTSPQPSEDEDFFTPPTSGASSDDAGISASPPTSTSARRGRPPLPARLGPAGHCAPPTAPATGGVVRRMRWTPELNLSVMRAYYGATEGGTILTAYRPKLLSLFQGLHPTVAVTAQRLSDQVRAIQRCKLLDDTVLERLHREALPARTESNVRSVEDPISLNNFARSEEVNSEQVSVSDQLQEQVRRALEDAFAEYRSAPISLRPCLPRLPMHRRNISLVSALDNVLKPHWETSVDLCDTHSILYCGAVAVCRVAGVRFPNLHRATQPTNAKPLWQCRIERRINMARTLIAKLLCFQAGNNRPRVVRFVTQAFAGTRVAPVDYVAGVAERIDYWKQKVYAWAKRIRRYKARADRYHVNRTFQTNQRSVYQAWERPQERVTDVHLPNAAVMAEFWRKIWSVPVTHSEGEWFDVVGRSCGPIQEMEPVVISREDLACAVRAAPNWKSPGPDGLHAFWLKRLQGSHSRLATQFQEALQLGSLPSFMTSGVTHLIHKSGSTSEPKNYRPITCLPTVYKLLASILRIKINNHLKAQHILSPTQNGCKGGSRGTKDLLLIDIAICQQVRRSRKNVSMAWIDYKKAYDSVPHTWLGRVLELYRVHPVLCSFLGSCMRQWTTVLRHPGCGGLSGSSDLIKISRGIFQGDSLSPLWFCLALNPLSAILKDSKLGYHLRRESEPISHLLYMDDLKLYASKKTDLMELLKITGNFSNDIGMEFGVDKCAVIHVQRGRVEDSFNLQLSEDISLRSLSEMDSYKYLGMSQALSIAEQDMKQSLSDRFFARLIKVLKSLLSGGNKVRAFNGWVMPVLTYSFGILRWTQSELDALDRKVRRLLTAYRMHHPRSSVMRLYIPRKCGGRGFLNAKTLHNREVCNLRQYFLSVSVVMYRDVAAIDRGLTPLSLANGNWRRPQVLSTSDRTAIWKGKELHGRFYRALTGPDVDQLASVTWLRFSNLFGETEGFVFAIMDEVIMTNNYRKHILKDGTVDICRACHRPGESIRHVVSGCSRLANGEYLHRHNQVARIIHQQLALKYGLVDSEVPYYQYQPLPVLESGHITLYWDRSVITDRTIVANKPDIVIIDRSMRRVMLVDVTIPHDENLVKAEKEKLSKYLDLAHEVTAMWNVDSTIIIPMVVSVNGLIAKSFDKHLEKLSLGSWVKGLIQKAVMLDTARIVRRFLSLEP

SEQ ID NO: 27628 - protein, 1105 aa, Phalera bucephala
MRWTSELNMSVMRAYYGATKGETILTAYRPKLLSLFQELHPTVAVTAQRLSDQVRAIQRCKLLDDTVLERLRSETCPARTESDLRSFEEPISLDNFARSEEVNSGQVSVGDQLQEQVRRALKDAFAEYRSAPISLRPCLPRLPMHRHNISLVGALDNVLKSHWETSVDLCDTHSILYCGAVAVCRVAGVRFPNLHRATQPTNAKPFWQCRIERRINMARTLIAKLLCFQAGNNRPRVVRFVAQAFAGTGVAPVDCMARVTERIDYWKQKVYAWANRIRRYRERADRYHVNRTFEVNQKSVYQAWERPQERVTDVHLPDAATMAEFWRKIWSVPVSHSEGEWFDVVGRSCEPIQEMEPVVITRDDVACAVRAAPNWKSPGPDGLHAFWLKRLQGSHARLATQFQEALKLGSLPSLLTTGVTHLIHKSGSTLEPKNYRPITCLPTVYKLLTSILRTKINNHLKAQHILSPTQNGCKGGSRGTKDLLLIDMAICQQVRRSRKNVSMAWIDYKKAYDSVPHTWLRRVLELYKVHPALCSFLGLCMEQWTTVLRHPGYGGLSGSSDLIKISRGIFQGDSLSPLWFCLALNPLSAILKNSNLGYHLRRGSEPISHLLYMDDLKLYASKKTDLMELLKITGNFSNDIGMEFGVDKCAVIHVQRGRVEDSFNLQLSEDVSLRSLSEMDSYKYLGMSQALSIAEQDMKQSLKDRFFARLIKVLKSLLSGGNRVRAFNGWVMPVLTYSFGILRWTQSELNALDRKVRRLLTAYRMHHPRSSVMRLYIPRRCGGRGFLNAKTLHNREVCNLRQYFLSVSVVMYRDVAAIDRGLTPLSLANGNWRRPQVLSISDRTAIWKGKELHGRFYRALTGPDVDQLASVTWLRFSNLFGETEGFVFAIMDEVIMTNNYRKHILKDGTVDICRACHRPGESIRHVVSGCSRLANGEYLHRHNQVAKIIHQQLALKYDLVDSEVPYYQYQPLPVLDSGHITLYWDRSIITDRTIVANKPDIVIIDRSMRRVMLVDVTIPHDENLVKAEKEKISKYLDLAHEVTAMWNVDSTIIIPMVVSVNGLIAKSFDKHLEKLSLGSWVKGLIQKVVVLDTARIVRRFLSLEP

SEQ ID NO: 27629 - protein, 889 aa, Phalera bucephala
MARTLIAKLLCFQAGNNRPRVMRFVAQAFAGTGVAPVDYGAGVAERIDYWKQKVYAWAKRIRRYKARADRYHVNRTFQTNQRSVYQAWERPQERVTDVHLPNAAVMAEFWRQIWSVPVSHSEGEWFDVVGRSCGPIQEMEPVVISREDLACAVRAAPNWKSPGPDGLHAFWLKRLQGSHSRLATQFQEALQLGSLPSFMTSGVTHLIYKSGSTSEPKNYRPITCLPTVYKLLTSILRIKINNHLKAQHILSPTQNGCEGGSRGTKDLLLIDMAICQQVRRSRKNVSMAWIDYKKAYDSVPHTWLGRVLELYRVHPALCSFLGSCMRQWTTVLRHPGCGGLSGSSDLIKISRGIFQGDSLSPLWFCLALNPLSAILMDSKLGYHLRRESEPISHLLYMDDLKLYASKKTDLMELLKITGNFSNDIGMEFGVDKCAVIHVQRGRVEDSFNLQLSEDIALRSLSEMDSYKYLGMSQALSVAEQDMKQSLKDRFFARLIKVLKSLLSGGNKVRAFNGWVMPVLTYSFGILRWTQSELDALDRKVRRLLTAYRMHHPRSSVMRLYIQRKCGGRGSLNAKTLHNREVCNLRQYFLSVSVVMYRDVAAIDRGLTPLSLANENWRRPQVLRISDRTAIWKGKELHGRFYRALTGPDVDQLASVNWLRFSNLFGETEGFVFAIMDEVIMTNNYRKHILKDGTVDICRACHRPGESIRHVVSGCSRLANGKYLHRHNQVARIIHQQLALKYGLVDSEVPYYQYQPLPVLESGHITLYWDRSIITDRTIVANKPDIVIIDRSMRRVMLVDVTIPHDENLVKAEKEKLSKYLDLAHEVTAMWNVDSTIIIPMVVSVNGLIAKSFDKHLEKLSLGSWVRGLIQKAVMLDTARIVRRFLSLEP

SEQ ID NO: 27630 - protein, 1204 aa, Phalera bucephala
MAEPSRRNPVRLCRQRDARSPSARPTPLPGSPASPQPSEDEDFFTPPTSGASSDDAGISATPPTLTSARRGRPPLPACLGPAGHCAPPTAPATGGVVRRMRWTPELNLSVMRAYYGATEGGTILTAYRPKLLSLFQGLHPTVAVTAQRLSDQVRAIQRCKLLDDTVLERLRREALPARTDSNVRGVEEPISLNNFARSEEVNSEQVSVSDQLQEQVRRALEDAFAEYRSAPISLRPCLPRLPMHRRNISLVSALDNVLKPHWETSVDLCDTHSILYCGAVAVCRVAGVRFPNLHRSTQPTNTKPFWQCRIERRINMARTLIAKLLCFQAGNNRPRVMRFVAQAFAGTGVAPVDYVAGVAERIDYWKQKVYAWAKRIRRYKARADRYHVNRTFQTNQRSVYQAWERPQERVSDVHLPNAAVMAEFWRKIWSVPVSHSEGEWFDVVGRSCGPIQEMEPVVISREDLACAVRAAPNWKSPGPDGLHAFWLKRLQGSHSRLATQFQEALQLGSLPSFMTSGVTHLIYKSGSTSEPKNYRPITCLPTVYKLLTSILRIKINNHLKAQHILSPTQNGCKGGSWGTKDLLLIDMAICQQVRRSRKNVSMAWIDYKKAYDSVPHTWLGRVLELYRVHPALCSFLGSCMGQWTTVLRHPGCGGLSGSSDLIKISRGIFQGDSLSPLWFCLALNPLSAILKDSKLGYHLRRESEPISHLLYMDDLKLYASKKTDLMELLKITGNFSNDIGMEFGVDKCAVIHVQRGRVEDSFNLQLSEDISLRSLSEMDSYKYLGMSQALSIAEQDMKQSLKDRFFARLIKVLKSLLSGGNKVRAFNGWVMPVLTYSFGILRWTQSELDALDRKVRRLLTAYRMHHPRSSVMRLYIPRKCGGRGLLNAKTLHNREVCNLRQYFLSVSVVMYRDVAAIDRGLTPLSLANENWRRPQVLSISDRTAIWKGKELHGRFYRALTGPDVDQLASVNWLRFSNLFGETEGFVFAIMDEVIMTNNYRKHILKDGTVDICRACHRPGESIRHVVSGCSRLANGEYLHRHNQVARIIHQQLALKYGLVDSEVPYYQYQPLPVLESGHITLYWDRSIITDRTIVANKPDIVIIDRSMRRVMLVDVTIPHDENLVKAEKEKLSKYLDLAHEVTAMWNVDSTIIIPMVVSVNGLIAKSFDKHLEKLSLGSWVKGLIQKAVMLDTARIVRRFLSLEP

SEQ ID NO: 27631 - protein, 1207 aa, Phalera bucephala
MAEPSRRNPERLCRQRDARSPSARPTPLPGSPTSPTSPQPSEDEDFFTPPTSGDSSDDAGISASPPTLKSARRGRPPLPARLGPAGHCAPPTAPATGGVVRRMRWTPELNLSVMRAYYGATEGGTILTAYRPKLLSLFQGLHPTVAVTAQRLSDQVRAIQRCKLLDDTVLERLHREALPARTESNVRSVEDPISLNNFARSEEVNSEQVSVSDQLQEQVRRALEDAFAEYRSALISLRPCLPRLPMHRRNISLVSALDNVLKPHWETSVDLCDTHSILYCGAVAVCRVAGVRFPNLHGATQPTNAKPLWQCRIERRINMARTLIAKLLCFQAGNNRPRVVHFVTQAFAGTRVAPVDYVAGVAERIDYWKQKVYAWAKRIRRYKARADRYHVNRTFQTNQRSVYQAWERPQERVTDVHLPNAAVMAEFWRKIWSVPVTHSEGEWFDVVGRSCGPIQEMEPVVISREDLACAVRAAPNWKSPGPDGLHAFWLKRLQGSHSRLATQFQEALQLGSLPSFMTSGVTHLIHKSGSTSEPKNYRPITCLPTVYKLLTSILRIKINNHLKAQHILSPTQNGCKGGSRGTKDLLLIDIAICQQVRRSRKNVSMAWIDYKKAYDSVPHTWLGRVLELYRVHPALCSFLGSCMRQWTTVLRHPGCGGLSGSSDLIKISRGIFQGDSLSPLWFCLALNPLSAILKDSKLGYHLRRESEPISHLLYMDDLKLYASKKTDLMELLKITGNFSNDIGMEFGVDKCAVIHVQRGRVEDSFNQQLSEDISLRSLSEMDSYKYLGMSQALSIAEQDMKQSLRDRFFARLIKVLKSLLSGGNRVRAFNGWVMPVLTYSFGILRWTQSELDALDRKVRRLLTAYRMHHPRSSVMRLYIPRKCGGRGFLNAKTLHNREVCNLRQYFLSVSVVMYRDVAAIDRGLTPLSLANGNWRRPQVLSTSDRTAIWKGKELHGRFYRALTGPDVDQLASVTWLSFSNLFGETEGFVFAIMDEVIMTNNYRKYILKDGTVDICRACHRPGESIRHVVSGCSSLANGEYLHRHNQVARIIHQQLALKYGLVDSEVPYYQYQPLPVLESGHITLYWDRSVITDRTIVANKPDIVIIDRSMRRVMLVDVTIPHDENLVKAEKEKLSKYLDLAHEVTAMWNVDSTIIIPMVVSVNGLIAKSFDKHLEKLSLGSWVKGLIQKAVMLETARIVRRFLSLEP

SEQ ID NO: 27632 - protein, 1194 aa, Junonia zonalis
MKKARGQLAQPSSEVNSPNSESQSSSSDNDYKTPLSTSESEKNEVDPPVRTTKRRRVAHPPQEGLESQGRRAPARTPAASGAVRRMKWSQKMNESVMRAYYGATGGGINLTAYRSTMLSMFQALEPTVTVTAQRLSDQVRAIQRCHLLDESVLERLRSNLQQINAVSDSHSVQQPRYEQIEATDNISNSWPPNSVDLSVSNQDDEHMRRTLEDAILKYRPMPFNLRPRIPRLPIHKRNITIVGVVDKMLQQYLNNSQDLYDTCSIMYCGAVAVCNLALVKFKTNKIIPISNTVPAWQARIENRISSTRTIIGKLISFKSGNNRPRIMRYVHQAFAGTNIRSSEYMDSVTERIDFFKQKIFAWAKRIRRYKKRVSRYRQNRMFQSDQRKVYRDWEQCNDTVASSALPPSEVTSEFWRSIWSAPIEHTEGEWMSAVRKECESLPQMEPVTISPEDISCAIRTSSNWKCPGPDGLHNFWLKNFHSSHSVLASQFQNALVSGTLPTFLTTGTTSLLYKSGCTADPKNYRPITCLSTTYKLLTSILAAKINKHITANNILAPAQNGCRSGSRGTKELLLIDMTICQQARRNRKNLCAAWIDYKKAYDSVPHTWLVGIMELYKIDATLYSFLRSCMGQWITYLRHPGSTDISGSTEPIRIKRGIFQGDSLSPLWFCLALNPLSTLLENSGLGFRLRRGSTIISHLLYMDDLKLYASKKSDLVKLLQITETFSSCIGMEFGIDKCAVIHVERGRVVSSEHIQLTQTLFLRSLDVGENYKYLGMSEALGIDDGSMKQLVKERFFGRLKKVLNSFLSGGNKVRAFNSWVMPLLVYTFGILRWTQTELDSLDRQVRKQLTTYRMHHPRSSVMRLYIPRKCGGRGFLNAKNLHNREVYNLRNYFLGISGGMHKDVVAVDKGLTPLSLGKENWRRPIVLDTHDRMTVWKGKELHGRFYRALMSSDVDQASSVSWLQYGDLFGETEGFVCAIMDEVIKTNNYRKFIMKDGTADVCRACHRPGESLRHIISGCCHLANGEYLHRHNQVARIIHQQLALRYGLVDIEVPYYRYNPAPVLENGNALLYWDRSIITDRHIPANKPDIVIVDRSARLAIIVDITIPHDDNLVKAEKEKLSKYLDLAHEITAMWSVDSTIIVPVVVSVNGLFAKSFDQHLKKLSLGCWIKGRLQKAVLLETARIVRRFLTLES

SEQ ID NO: 27633 - protein, 1204 aa, Phalera bucephala
MAEPSRRNPVRLCRQRDARSPSARPTPLPGSPTSPQPSEDEDFFTPPTSGASSDDAGISASPPTITSARRGRPPLPARLGPAGHCAPPTAPATGGVVRRMRWTPELNLSVMRAYYGATEGGTILTAYRPKLLSLFQGLHPTVAVTAQRLSDQVRAIQRCKLLDDTVLERLHREALPARTESNVRSVEDPISLNNFARSEEVNSEQVSVSDQLQEQVRRALEDAFAEYRSAPISLRPCLPRLPMHRRNISLVSALDNVLKPHWETSVDLCDTHSVLYCGAVAVCRVAGVRFPNLHRATQPTNAKPLWQCRIERRINMARTLIAKLLCFQAGNNRPRVVRFVTQAFAGTRVAPVDYVAGVAERIDYWKQKVYAWAKRIRRYKARADRYHVNRTFQTNQRSVYQAWERPQERVTDVHLPNAAVMAEFWRKIWSVPVTHSEGEWFDVVGRSCGPIQEMEPVVISREDLACAVRTAPNWKSPGPDGLHAFWLKRLQGSHSRLATQFQEALQLGSLPSFMTSGVTHLIHKSGSTSEPKNYRPITCLPTVYKLLTSILRIKINNHLKAQHILSPTQNGCKGGSRGTKDLLLIDIAICQQVRRSRKNVSMAWIDYKKAYDSVPHTWLGRVLELYRVHPALCSFLGSCMRQWTTVLRHPGCGGLSGSSDLIKISRGIFQGDSLSPLWFCLALNPLSAILKDSKLGYHLRRESEPISHLLYMDDLKLYASKKTDLMELLKITGNFSSDIGMEFGVDKCAVIHVQRGRVEDSFNLQLSEDISLRSLSEMDSYKYLGMSQALSIAEQDMKQSLRDRFFARLIKVLKSLLSGGNRVRAFNGWVMPVLTYSFGILRWTQSELDALDRKVRRLLTAYRMHHPRSSVMRLYIPRKCGGRGFLNAKTLHNREVCNLRQYFLSVSVVMYRDVAAIDRGLTPLSLANGNWRRPQVLSTSDRTAIWKGKELHGRFYRALTGPDVDQLASVTWLRFSNLFGETEGFVFAIMDEVIMTNNYRKYILKDGTVDICRACHRPGESIRHVVFGCSRLANGEYLHRHNQVARIIHQQLALKYGLVDSEVPYYQYQPLPVLESGHITLYWDRSVITDRTIVANKPDIVIIDRSMRRVMLVDVTIPHDENLVKAEKEKLSKYLDLAHEVTAMWNVDSTIIIPMVVSVNGLIAKSFDKHLEKLSLGSWVKGLIQKAVMLDTARIVRRFLSLEP

SEQ ID NO: 27634 - protein, 1187 aa, Phalera bucephala
MPGHLAHAQHLCPARPPRPSLRRMKIFSHRRHLGPLATMPGYRRLHLHQHLLGSRPPLPARLGPAGHCAPPTAPATGGVVRRMRWTPELNLSVMRAYYGATEGGTILTAYRPKLLSLFQGLHPTVAVTAQRLSDQVRAIQRCKLLDDTVLERLHREALPARTESNVRSVEDPISLNNFARSEEVNSEQVSVSDQLQEQVRRALEDAFAEYRSAPISLRPCLPRLPMHRRNISLVSALDNVLKPHWEISVDLCDTHSILYCGAVAVCRVAGVRFPNLHRATQPTNAKPLWQCRIERRINMARTLIAKLLCFQAGNNRPRVVRFVAQAFAGTRVAPVDYVAGVAERIDYWKQKVYAWAKRIRRYKARADRYHVNRTFQTNPRSVYQAWERPQERVTDVHLPNAAVMAEFWRKIWSVPVTHSEGEWFEFIGRSCGPIQEMEPVVISREDLACAVRAAPNWKSPGPDGLHAFWLKRLQGSHSRLATQFQEALQLGSLPSFMTSGVTHLIHKFGSTSEPKNYRPITCLPTVYKLLTSILRIKINNHLKAQHILSPTQTGCKGGSRGTKDLLLIDIAICQQVRRSRKNVSMAWIDYKKAYNSVPHTWLGRVLELYRVHPALCSFLGSCMRQWTTVLRHPGCGGLSGSSDLIKISRGIFQGDSLSPLWFCLALNPLSAILKDSKLGYHLRRESEPISHLLYMDDLKLYASKKTDLMELLKITGNFSNDIGMEFGVDKCAVIHVQRGRVEDSFNLQLSEDISLRSLSEMDSYKYLGMSQALSIAEQDMKQSLSDRFFARLIKVLKSLLSGGNKVRAFNGWVMPVLTYSFGILRWTQSELDALDRKVRRLLTAYRMHHPRSSVMRLYIPRKCGGRGFLNAKTLHNREVCTLRQYFLSVSVVMYRDVAAIDRGLTPLSLANGNWRRPQVLSTSDRTAIWKGKELHGRFYRALTGPDVDQLASVTWLRFSNLFGETEGFVFAIMDEVIMTNNYRKHILKDGTVDICRACHRPGESIRHVVSGCSRLANGEYLHRHNQVARIIHQQLALKYGLVDSEVPYYQYQPLPVLESGHITLYWDRSVITDRTIVANKPDIVIIDRSMRRVMLVDVTIPHDENFVKAEKEKLSKYLDLAHEVTTMWNVDSTIIIPMVVSVNGLIAKSFDKHLEKLSLGRWVKGLIQKAVMLDTARIVRRFLSLEP

SEQ ID NO: 27635 - protein, 889 aa, Phalera bucephala
MARTLIAKLLCFQAGNNRPRVVRFVTQAFAGTRVAPVDYVAGVAERIDYWKQKVYAWAKRIRRYKARADRYHVNRTFQTNQRSVYQAWERPQERVTDVHLPNAAVMAEFWRKIWSVPVTHSEGEWFDVVGRSCGPIQEMEPVVISREDLACAVRAAPNWKSPGPDGLHAFWLKRLQGSHSRLATQFQEALQLGSLPSFMTSGVTHLIHKSGSTSEPKNYRPITCLPTVYKLLTSILRIKINNHLKAQHILSPTQNGCKGGSRGTKDLLLIDIAICQQVRRSRKNVSMAWIDYKKAYDSVPHTWLGRVLELYRVHPALCSFLGSCMRQWTTVLRHPGCGGLSGSSDLIKISRGIFQGDSLSPLWFCLALNPLSAILKDSKLGYHLRRESEPISHLLYMDDLKLYASKKTDLMELLKITGNFSNDIGMEFGVDKCAVIHVQRGRVEDSFNLQLSEDISLRSLSEMDSYKYLGMSQVLSIAEQDMKQSLRDRFFARLIKVLKSLLSGGNRVRAFNGWVMPVLTYSFGILRWTQSELDALDRKVRRLLTAYRMHHPRSSVMRLYIPRKCGGRGFLNAKTLHNREVCNLRQYFLTVSVVMYRDVAAIDRGLTPLSLANGNWRRPQVLSTSDRTAIWKGKELHGRFYRALTGPDVDQLASVTWLRFSNLFGETEGFVFAIMDEVIMTNNYRKYILKDGTVDICRACHRPGESIRHVVSGCSRLANGEYLHRHNQVARIIHQQLALKYGLVDSEVPYYQYQPHPVLESGHITLYWDRSVITDRTIVANKPDIVIIDRSMRRVMLVDVTIPHDENLVKAEKEKLSKYLDLAHEVTAMWNVDSTIIIPMVVSVNGLIAKSFDKHLEKLSLGRWVKGLIQKAVMLDTARIVRRFLSLEP

SEQ ID NO: 27636 - protein, 1204 aa, Phalera bucephala
MAEPSRRNPVRLCRQRDARSPSARPTPLPGSPTSPQPSEDEDFFTPPTSGASSDDAGISASPPTLTSARRGRPPLPARLGPAGHCAPPTAPATGGVVRRMRWTPELNLSVMWAYYGATEGGTILTAYRPKLLSLFQGLHPTVAVTAQRLSDQVRAIQRCKLLDDTVLERLHREALPARTESNVRSVEDPISLNNFARSEEVNSEQVSVSDQLQEQVRRALEDAFAEYRSAPISLRPCLPRLPMHRRNISLVSALDNVLKPHWETSVDLCDTHSILYCGAVAVCRVAGVRFPNLHRATQPTNAKPLWQCRIERRINMARTLIVKLLCFQAGNNRPRVVRFVTQAFAGTRVAPVDYVAGVAERIDYWKQKVYAWAKRIRRYKARADRYHVNRTFQTNQRSVYQAWERPQERVTDVHLPNAAVMAEFWRKIWSVPVTHSEGEWFDVVGRSCGPIQEMEPVVISREDLACAVRAAPNWKSPGPDGLHAFWLKRLQGSHSRLATQFQEALQLGSLPSFMTSGVTHLIHKSGSTSEPKNYRPITCLPTVYKLLTSILRIKINNHLKAQHILSPTQNGCKGGSWGTKDLLLIDIAICQQVRRSRKNVSMAWIDYKKAYDSVPHTWLGRVLELYRVHPALCSFLGSCMGQWTTVLRHPGCGGLSGSSDLIKISRGIFQGDSLSPLWFCLALNPLSAILKDSKLGYHLRRESEPISHLLYMDDLKLYASKKTDLMELLKITGNFSNDIGMEFGVDKCAVIHVQRGRVEDSFNLQLSEDISLRSLSEMDSYKYLGMSQALSIAEQDMKQSLRDRFFARLIKVLKSLLSGGNRVRAFNGWVMPVLTYSFGILRWTQSELDALDRKVRRLLTAYRMHHPRSSVMRLYIPRKCGGRGFLNAKTLHNREVCNLRQYFLSVSVVMYRDVAAIDRGLTPLSLANGNWRRPQVLSTSDRTAIWKGKELHGRFYRALTGPDVDQLASVTWLRFSNLFGETEGFVFAIMDEVIMTNNYRKYILKDGTVDICRACHRPGESIRHVVSGCSRLANGEYLHRHNQVARIIHQQLALKYGLVDSEVPYYQYQPLPVLDSGHITLYWDRSVITDRTIVANKPDIVIIDRSMRRVMLVDVTIPHDENLVKAEKEKLSKYLDLAHEVTAMWNVDLTIIIPMVVSVNGLIAKSIDKHLEKLSLGRWVKGLIQKAVMLDTARIVRRFLSLEP

SEQ ID NO: 27637 - protein, 1200 aa, Phalera bucephala
MAEPSRRNPVRLCRQRDARSPSARPTPLPGSPTSPQPSEDEDFFTPPTSGASSDDAGISASPPTLTSARRGRPPLPARLGPAGHCAPPTAPATGGVVRRMRWTPELNLSVMRAYYGATEGGTILTAYRPKLLSLFQGLHPTVAVTAQRLSDQVRAIQRCKLLDDTVLERLHREALPARTESNVRSVEDPISLNNFARSEEVNSEQVSVSDQLQEQVRRALEDAFAEYRSAPISLRPCLPRLPMHRRNISLVSALDNVLKPHWETSVDLCDTHSILYCGAVAVCRVAGVRFPNLHRATQPTNAKPLWQCRIERRINMARTLIAKLLCFQAGNNRPRVVRFVTQAFAGTRVAPVDYVAGVAERIDYWKQKVYAWAKRIRRYKARADRYHVNRTFQTNQRSVYQAWERPQERVTDVHLPNAAVMAEFWRKIWSVPVTHSEGEWFDVVGRSCGPIQEMEPVVISREDLACAVRAAPNWKSPGPDGLHAFWLKRLQGSHSRLATQFQEALQLGSLPSFMTSGVTHLIHKSGSTLEPKNYRPITCLPTVYKLLTSILRIKINNHLKAQHILSPTQNQSRGTKDLLLIDIAICQQVRRSRKNVSMAWIDYKKAYDSVPHTWLGRVLELYRVHPALCSFLGSCMRQWTTVLRHPGCGGLSGSSDLIKISRGIFQGDSLSPLWFCLALNPLSAILKDSKLGYHLRRESEPISHLLYMDDLKLYASKKTDLMELLKITGNFSNDIGMEFGVDKCAVIHVQRGRVEDSFNLQLSEDISLRSLSEMDSYKYLGMSQALSIAEQDMKQSLRDRFFARLIKVLKSLLSGGNRVRAFNGWVMPVLTYSFGILRWTQSELDALDRKVRRLLTAYRMHHPRSSVMRLYIPRKCGGRGFLNAKTLHNREVCNLRQYFLSVSVVMYRDVAAIDRGLTALSLANGNWRRPQVLSTSDRTAIWKGKELHGRFYRALTGPDVDQLASVTWLRFSNLFGETEGFVFAIMDEVIMTNNYRKYILKDGTVDICRACHRPGESIRHVVSGCSRLANGEYLHRHNQVARIIHQQLALKYGLVDSEVPYYQYQPLPVLESGHITLYWDRSVITDRTIVANKPDIVIIDRSMRRVMLVDVTIPHDENLVKAEKEKLSKYLDLAHEVTAMWNVDSTIIIPMVVSVNGLIAKSFDKHLEKLSLGSWVKGLIQKAVMLDTARIVRRFLSLEP

SEQ ID NO: 27638 - protein, 1204 aa, Phalera bucephala
MAEPSRRNPVRLCRQRDARSPSARPTPLPGSPTSPQPSEDEDFFTPPTSGASSDDAGISASPPTLKSARRGRPPLPARLGPAGHCAPPTAPATGGVVRRMRWTPELNLSVMRAYYGATEGGTILTAYRPKLLSLFQGLHPTVAVTAQRLSGQVRAIQRCKLLDDTVLERLHREALPARTESNVRSVEDPISLNNFARSEEVNSEQVSVSDQLQEQVRRALEDAFAEYRSAPISLRPCLPRLPMHRRNISLVSALDNVLKPHWKTSVDLCDTHSILYCGAVAVCRVAGVRFPNLHRATQPTNAKPLWQCRIERRINMARTLITKLLCFQAGNNRPRVVRFVTQAFAGTRVAPVDYVAGVAERIDYWKQKVYAWAKRIRRYKARADRYHVNRTFQTNQRSVYQAWERPQERVTDVHLPNAAVMAEFWRKIWSVPVTHSEGEWFDVVGRSCGPIQEMEPVVISREDLACAVRAAPNWKSPGPDGLHAFWLKRLQGSHSRLATQFQEALQLGSLPSFMTSGVTHLIHKSGSTSEPKNYRPITCLPTVYKLLTSILRIKINNHLKAQHILSPTQNGCKGGSRGTKDLLLIDIAICQQVRRSRKNVSMAWIDYKKAYDSVPHTWLGRVLELYRVHPALCSFLGSCMRQWTTVLRHPGCGGLSGSSDLIKISRGIFQGDSLSPLWFCLALNPLSAILKDSKLGYHLRRESEPISHLLYMDDLKLYASKKTDLMELLKITGNFSNDIGMEFGVDKCAVIHVQRGRVEDSFNLQLSEDISLRSLSEMDSYKYLGMSQALSIAEQDMKQSLRDRFFARLIKVLKSLLSGGNRVRAFNGWVMPVLTYSFGILRWTQSELDALDRKVRRLLTAYRMHHPRSSVMRLYIPRKCGGRGFLNAKTLHNREVCNLRQYFLSVSVVMYRDVAAIDRGLTPLSLANGNWRRPQVLSTSDRTAIWKGKELHGRFYRALTGPDVDQLASVTWLRFSNLFGETEGFVFAIMDEVIMTNNYRKYILKDGTVDICRACHRPGESIRHVVSGCSRLANGEYLHRHNQVARIIHQQLALKYGLVDSEVPYYQYQPLPVLESGHITLYWDRSVIRDRTIVANKPDIVIIDRSMRRVMLVDVTIPHDENLVKAEKEKLSKYLDLAHEVTAMWNVDSTIIIPMVVSVNGLIAKSFDKHLEKLSLGSWVKGLIQKAVMLETARIVRRFLSLEP

SEQ ID NO: 27639 - protein, 1088 aa, Phalera bucephala
MVLQREEPSSPLTDRNCCLCFRGFTRLSPLLRNDYRIKYVPSSGASCWMTQCLSDCTAKHFLLVLNPTCEVLKISLNNFARSEEVNSEQVSVSDQLQEQVRRALEDAFAEYRSAPISLRPCLPRLPMHRRNISLVSALDNVLKPHWETSVDLCDTHSILYCGAVAVCRVAGVRFPNLHRATQPTNAKPLWQCRIERRINMARTLIAKLLCFQAGNNRPRVVRFVTQAFAGTRVAPVDYVAGVAERIDYWKQKVYAWAKRIRRYKARADRYHVNRTFQTNQRSVYQAWERPQERVTDVHLPNAAVMAEFWRKIWSVPVTHSEGEWFDVVGRSCGPIQEMEPVVISREDLACAVRAAPNWKSPGPDGLHAFWLKRLQGSHSRLATQFQEALQLGSLPSFMTSGVTHLIHKSGSTSEPKNYRPITCLPTVYKLLTSILRIKINNHLKAQHILSPTQNGCKGGSRGTKDLLLIDIAICQQVRRSRKNVSMAWIDYKKAYDSVPHTWLGRVLELYRVHPALCSFLGSCMRQWTTVLRHPGCGGLSGSSDLIKISRGIFQGDSLSPLWFCLALNPLSAILKDSKLGYHLRRESEPISHLLYMDDLKLYASKKTDLMELLKITGNFSNDIGMEFGVDKCAVIHVQRGRVEDSFNLQLSEDTSLRSLSEMDSYKYLGMSQALSIAEQDMKQSLRDRFFARLIKVLKSLLSGGNRVRAFNGWVMPVLTYSFGILRWTQSELDALDRKVRRLLTAYRMHHPRSSVMRLYIPRKCGGRGFLNAKTLHNREVCNLRQYFLSVSVVMYRDVATIDRGLTPLSLANGNWRRPQVLSTSDRTAIWKGKELHGRFYRALTGPDVDQLASVTWLRFSNLFGETEGFVFAIMDEVIMTNNYRKYILKDGTVDICRACHRPGESIRHVVSGCSRLANGEYLHRHNQVARIIHQQLALKYGLVDSEVPYYQYQPLPVLESGHITLYWDRSVITDRTIVANKPDIVIIDRSMRRVMLVDVTIPHDENLVKAEKEKLSKYLDLAHEVTAMWNVDSTIIIPMVVSVNGLIAKSFDKHLEKLSLGSWVKGLIQKAVMLDTARIVRRFLSLEP

SEQ ID NO: 27640 - protein, 1204 aa, Phalera bucephala
MAEPSRRNPVRLCRQRDARSPSARPTPLPGSPTSPQPSEDEDFFTPPTSGASSDDAGISASPPTLTSARRGRPPLPARLGPAGHCAPPTAPATGGVVRRMRWTPELNLSVMRAYYGATEGGTILTAYRPKLLSLFQGLHPTVAVTAQRLSDQVHAIQRCKLLDDTVLERLHREALPARTESNVRSVEDPISLNNFARSEEVNSEQVSVSDQLQEQVRRALEDAFAEYRSAPISLRPCLPRLPMHRRNISLVSALDNVLKPHWETSVDLCDTHSILYCGAVAVCRVAGVRFPNLHRATQPTNAKPLWQCRIERRINMARTLIAKLLCFQAGNNRPRVVRFVTQAFAGTRVAPVDYVAGVAERIDYWKQKVYAWAKRIRRYKARADRYHVNRTFQTNQRSVYQAWERPQERVTDVHLPNAAVMAEFWRKIWSVPVTHSEGEWFDVVGRSCGPIQEMEPVVISREDLACAVRAAPNWKSPGPDGLHAFWLKRLQGSHSRLATQFQEALQLGSLPSFMTSGVTHLIHKSGSTSEPKNYRPITCLPTVYKLLTSILRIKINNHLKAQHILSPTQNGCKGGSQGTKDLLLIDIAICQQVRRSRKNVSMAWIDYKKAYDSVPHTWLGRVLELYRVHPALCSFLGSCMRQWTTVLRHPGCGGLSGSSDLIKISRGIFQGDSLSPLWFCLALNPLSAILKDSKLGYHLRRESEPISHLLYMDDLKLYASKKTDLMELLKITGNFSNDIGMEFGVDKCAVIHVQRGRVEDSFNLQLSEDISLRSLSEMDSYKYLGMSQALSIAEQDMKQSLRDRFFARLIKVLKSLLSGGNRVRAFNGWVMPVLTYSFGILRWTQSELDALDRKVRRLLTAYRMHHPRSSVMRLYIPRKCGGRGFLNAKILHNREVCNLRQYFLSVSVVMYRDVAAIDRGLTPLSLANGNWRRPQVLSTSDRTAIWKGKELHGRFYRALTGPDVDQLASVTWLRFSNLFGETEGFVFAIMDEVIMTNNYRKYILKDGTVDICRACHRPGESIRHVVSGCSRLANGEYLHRHNQVARIIHQQLALKYGLVDSEVPYYQYQPLPVLESGHITLYWDRSVITDRTIVANKPDIVIIDRSMRRVMLVDVTIPHDENLVKAEKEKLSKYLDLAHEVTAMWNVDSTIIIPMVVSVNGLIAKSFDKHLEKLSLGRWVKGLIQKAVMLDTARIVRRFLSLEP

SEQ ID NO: 27641 - protein, 1204 aa, Phalera bucephala
MAEYPRRNPVRRCRQRIAQGHSARPSPLRGSPNSPQSSENELYFTPPTSGASSDETEPPASSHPLRPERRGRPPLPACIGPAEHCAPPTAPATGGVVRRMRWTSELNMSVMRAYYGATKGETILTAYRPKLLSLFQELHPTVAVTAQRLSDQVRAIQRCKLLDDTVLERLRSETCPARTESDLRSFEEPISLDNFARSEEVNSGQVSVGDQLQEQVRRALKDAFAEYRSAPISLRPCLPRLPMHRHNISLVGALDNVLKSHWETSVDLCDTHSILYCGAVAVCRVAGVRFPNLHRATQPTNAKPFWQCRIERRINMARTLIAKLLCFQAGNNRPRVVRFVAQAFAGTGVAPVDCMARVTERIDYWKQKVYAWANRIRRYRERADRYHVNRTFEVNQKSLYQAWERPQERVTDVHLPDAATMAEFWRKIWSVPVSHSEGEWFDVVGRSCEPIQEMEPVVITRDDVACAVRAAPNWKSPGPDGLHAFWLKRLQGSHARLATQFQEALELGSLPSLLTTGVTHLIHKSGSTLEPKNYRPITCLPTVYKLLTSILRTKINNHLKAQHILSPTQNGCKGGSRGTKDLLLIDMAICQQVRRSRKNVSMAWIDYKKAYDSVPHTWLRRVLELYKVHPALCSFLGLCMGQWTTVLRHPGYGGLSGSSDLIKISRGIFQGDSLSPLWFCLALNPLSAILKNSKLGYHLRRGSEPISHLLYMDDLKLYASKKTDLMELLKITGNFSNDIGMEFGVDKCAVIHVQRGRVEDSFNLQLSEDISLRSLSEMDSYKYLGMSQALSIAEQDMKQSLKDRFFARLMKVLKSLLSGGNKVRAFNGWVMPVLTYSFGILRWTQSELDALDRKVRRLLTAYRMHHPRSSVMRLYIPRRCGGRGFLNAKTLHNREVCNLRQYFLSVSVVMYRDVAAIDRGLTPLSLANGNWRRPQVLSISDRTAIWKGKELHGRFYRALTGPDVDQLASVTWLRFSNLFGETEGFVFAIMDEVIMTNNYRKHILKDGTVDICRACHRPGESIRHVVSGCSRLANGEYLHRHNQVAKIIHQQLALKYDLVDSEVPYYQYQPLPVLESGHITLYWDRSIITDRTIVANKPDIVIIDRSMRRVMLVDVTIPHDENLVKAEKEKISKYLDLAHEVTAMWNVDSTIIIPMVVSVNGLIAKSFDKHLEKLSLGSWVKGLIQKVVVLDTARIVRRFLSLEP

SEQ ID NO: 27642 - protein, 1203 aa, Clostera curtula
MERRINPRRQCREPYEANARITSAAVSSNRVQSSDEEYFTPPGTASSSEDEPTPSPSLSRRPARRGRPPLPASLGSTGHRALPKAPATGGVVRRMRWTNNLNESVMRAYYGATDGGTNLTAYRSRLLALFQELHPDVTVTAQRLSDQVRAIQRLNLLEQPVLERLRLETLPPQPVSSVQVTTPTAACLLPPTSVQQLDLGQIEEVSLNDQYNEQLRRILEETIEEYRLIPMTSRPRIPRLPMHKRNMALVSALDSLLMDKLNSVGDLTELHFILYCGAVAVCRVAGVTFPKNSTASRHPECKPAWQYRIEKRITAARTLIAKLYCFMTGNTRPRVMRYVIQAFAGTGVRQCDYAACVTERIDYFKQKVYAWAKRIRRYRERADRFNQNRLFQNDQKIIYRNWERPQPPTADLSTPDADTMLAFWRNIWSRPVDHLEGQWIGVVGRACEQITQMEPVHIELDDVISAIRSAPNWKSPGPDGLHNFWIKKVCSCHARLATLFQAALEAGSLPDFMTTGVTHLIHKSGRISEPTNYRPITCLPTIYKLLTSIIKFKIVNHILANNILASNQNGCNAGSRGTKDLLLIDMAICQQVRRSKKNISMAWIDYKKAYDSVPHSWLMRVLDLYKVDANLCLFLSSCMRQWSTVLYHPGHRHFFEASERIWIKRGIFQGDSLSPLWFCLALNPLSILLNDSMPGYRLHRGGKTISHLLYMDDLKLYAPKQSDLMALLKVTETFSSAISMEFGVDKCAVINVQKGRVVNSENLQLSENVILRSLCESDTYKYLGMSEALGIADSDVKQQLKTRFLGRLTKVLKSLLSGGNKVRAFNCWVIPVIAYSFGILRWTQSELDALDRMVRRQLTAFRMHHPRSSVMRLYIPRRCGGRGFLNVKSLHNREVCNLRDYFLRVDDEMHRDVVKVDSGLTALSMAKQNWRRPQVLSISERKAIWKGKELHGRFYSALTGPEIDQLASVSWLRFGNLFGETEGFVFAIMDEVVKTNNYRKYIIKDGTVDICRACHCPGESIRHVVSGCSRLANGEYLHRHNQVAGIIHQQLALRYGIVESEVPYYQYKPEPVLSNNHVTLYWDRSIVTDRTIMANKPDIVVIDRSTRRAMLIDITIPHDVNLVKAEHEKISKYLDLSHEVGAMWNMDSTIIVPIVISVHGLMAKSFDQHLQKLSLGSWVKSLIQKAVLLDTARIVRRFLTLDP

SEQ ID NO: 27643 - protein, 1204 aa, Phalera bucephala
MAEPSRRNPVRLCRQRDARSPSARPTPLPGSPTSPQPSEDEDFFTPPTSGASSDDAGISASPPTLTSARRGRPPLPARLGPAGHCAPPTAPATGGVVRRMRWTPELNLSVMRAYYGATEGGTILTAYRPKLLSLFQGLHPTVAVTAQRLSDQVRAIQRCKLLDDIVLERLHREALPARTESNVRSVEDPISLNNFARSEEVNSEQVSVSDQLQEQVRRALEDAFAEYRSAPISLRPCLPRLPMHRRNISLVSALDNVLKPHWETSVDLCDTHSILYCGAVAVCRVAGVRFPNLHRATQPTNAKPLWQCRIERRINMARTLIAKLLCFQAGNNRPRVVRFVTQAFAGTRVAPVDYVAGVAERIDYWKQKVYAWAKRIRRYKARADRYHVNRTFRTNQRSVYQAWERPQERVTDVHLPNAAVMAEFWRKIWSVPVTHSEGEWFDVVGRSCGPIQEMEPVVISREDLACAVRAAPNWKSPGPDGLHAFWLKRLQGSHSRLATQFQEALQLGSLPSFMTSGVTHLIHKSGSTSEPKNYKPITCLPTVYKLLTSILRIKINNHLKAQHILSPTQNGCKGGSRGTKGLLLIDIAICQQVRRSRKNVSMAWIDYKKAYDSVPHTWLGRVLELYRVHPALCSFLGSCMRQWTTVLRHPGCGGLSGSSDLIKISRGIFQGDSLSPLWFCLALNPLSAILKDSKLGYHLRRESEPISHLLYMDDLKLYASKKTDLMELLKITGNFSNDIGMEFGVDKCAVIHVQRRRVEDSFNLQLSEDISLRSLSEMDSYKYLGMSQALSIAEQDMKQSLRDRFFARLIKVLKSLLSGGNRVRAFNGWVMPVLTYSFGILRWTQSELDALDRKVRRLLTAYRMHHPRSSVMRLYIPRKCGGRGFLNAKTLHNREVCNLRQYFLSVSVVMYRDVAAIDRGLTPLSLANGNWRRPQVLSTSDRTAIWKGKELHGRFYRALTGPDVDQLASVTWLRFSNLFGETEGFVFAIMDEVIMTNNYRKYILKDGTVDICRACHRPGESIRHVVSGCSRLANGEYLHRHNQVARIIHQQLALKYGLVDSEVPYYQYQPLPVLESGHITLYWDRSVITDRTIVANKPDIVIIDRSMRRVMLVDVTIPHDENLVKAEKEKLSKYLDLAHEVTAMWNVDSTIIIPMVVSVNGLIAKSFDKHLEKLSLGSWVKGLIQKAVMLDTARIVRRFLSLEP

SEQ ID NO: 27644 - protein, 1154 aa, Phalera bucephala
MAEPSRRNPVRLCRQRDARSPSARPTPLPGSPTSPQPSEDEDFFTPPTSGASSDDAGISASPPTLTSARRGRPPLPARLGPAGHCAPPTAPATGGVVRRMRWTPELNLSVMRAYYGATEGGTILTAYRPKLLSLFQGLHPTVAVTAQRLSDQVRAIQRCKLLDDTVLERLHREALPARTESNVRSVKDPISLNNFARSEEVNSEQVSVSDQLQEQVRRALEDAFAEYRSAPISLRPCLPRLPMHRRNISLVSALDNVLKPHWETSVDLCDTHSILYCGAVAVCRVAGVRFPNLHRATQPTNAKPLWQCRIERRINMARTLIAKLLCFQAGNNRPRVVRFVTQAFAGTRVAPVDYVAGGAERIDYWKQKVYAWAKRIRRYKARADRYHVNRTFQTNQRSVYQAWERPQERVTDVHLPNAAVMAEFWRKIWSVPVTHSEGEWFDVVGRSCGPIQEMEPVVISREDLACAVRAAPNWKSPGPDGLHAFWLKRLQGSHSRLATQFQEALQLGSLPSFMTSGVTHLIHKSGSTSEPKNYRPITCLPTVYKLLTSILRIKINNHLKAQHILSPTQNGCKGGSRGTKDLLLIDIAICQQVRRSRKNVSMAWIDYKKAYDSVPHTWLGRVLELYRVHPALCSFLGSCMRQWTTVLRHPGCGGLSGSSDLIKISRGIFQGDSLSPLWFCLALNPLSAILKDSKLGYHLRRESEPISHLLYMDDLKLYASKKTDLMELLKITGNFSNDIGMEFGVDKCAVIHVQRGRVEDSFNLQLSEDISLRSLSEMDSYKYLGMSQALSIAEQDMKQSLRDRFFARLIKVLKSLLSGGNRVRAFNGWVMPVLTYSFGILRWTQSELDALDRKVRRLLTAYRMHHPRSSVMRLYIPRKCGGRGFLNAKTLHNREVCNLRQYFLSVSVVMYRDVAAIDRGLTPLSLANGNWRRPQVLSTSDRTAIWKGKELHGRFYRALTGPDVDQLASVTWLRFSNLFGGTEGFVFAIIDEVIMTNNYRKYILKDGTVDICRACHRPGESIRHVVSGCSRLANGEYLHRHNQVARIIHQQLALKYGLVDSEVPYYQYQPLPVLESGHITLYWDRSVITDRTIVANKPDIVIIDRSMRRVMLVDVTIPHDENLVKAEKEKLSLPPCGMLIQLSLFRWSFQSTAL

SEQ ID NO: 27645 - protein, 1200 aa, Phalera bucephala
MAEPSRRNPVRLCRQRDARSPSARPTPLPGSPASPQPSEDEDFFTPPTSGASSDDAGISATPPTLTSARRGRPPLPARLGPAGHCAPPTAPATGGVVRRMRWTLSVMRAYYGATEGGTILTAYRPKLLSLFQGLHPTVAVTAQRLSDQVRAIQRCKLLDDTVLERLRREALPARTDFNVRSVEEPISLNNFARSEEVNSEQVSVSDQLQEQVRRALEDAFAEYRSAPISLRPCLPRLPMHRRNISLVSALDNVLKPHWETSVDLCDTHSILYCGAVAVCRVAGVRFPNLHRATEPTNTKPFWQCRIERRINMARTLIAKLLCFQAGNNRPRVMRFVAQAFAGTGVAPVDYVAGVAERIDYWKQKVYAWAKRIRRYKARADRYHVNRTFQTNQRSVYQAWERPQERVTDVHLPNAAVMAEFWRKIWSVPVSHSEGEWFDVVGRSCGPIQEMEPVVISREDLACAVRAAPNWKSPGPDGLHAFWLKRLQGSHSRLATQFQEALQLGSLPSFMTSGVTHLIYKSGSTSEPKNYRPITCLPTVYKLLTSILRIKINNHLKAQHILSPTQNGCKGGSRGTKDLLLIDMAICQQVRRSRKNVSMAWIDYKKAYDSVPHTWLGRVLELYRVHPALCSFLGSCMRQWTTVLRHPGCGGLSGSSDLIKISRGIFQGDSLSPLWFCLALNPLSAILKDSKLGYHLRRESEPISHLLYMDDLKLYASKKTDLMELLKITGNFSNDIGMEFGVDKCAVIHVQRGRVEDSFNLQLSEDISLRSLSEMDSYKYLGMSQALSIAEQDMKQSLKDRFFARLIKVLKSLLSGGNKVRAFNGWVMPVLTYSFGILRWTQSELDALDRKVRRLLTAYRMHHPRSSVMRLYIPRKCGGRGFLNAKTLHNREVCNLRQYFLSVSVVMYRDVAAIDRGLTPLSLANENWRRPQVLSISDRTAICKGKELHGRFYRALTGPDVDQLASVNWLRFSNLFGETEGFVFAIMDEVIMTNNYRKHILKDGTVDICRACHRPGESIRHVVSGCSRLANGEYLHRHNQVARIIHQQLALKYGLVDSEVPYYQYQPLPVLESGHITLYWDRPIITDRTIVANKPDIVIIDRSMRRVMLVDVTIPHDENLVKAEIEKLSKYLDLAHEVTAMWNVDSTIIIPMVVSVNGLIAKSFDKHLEKLSLGSWVKGLIQKAVMLDTARIVRRFLSLEP

SEQ ID NO: 27646 - protein, 1204 aa, Phalera bucephala
MAEPSRRNPVRLCRQRDARSPSARPTPLPGSPTSPQPSEDEDFSTPPTSGASSDDAGISASPPTLTSARRGRPPLPARLGPAGHCAPPTAPATGGVVRRMRWTPELNLSVMRAYYGATEGGTILTAYRPKLLSLFQGLHPTVAVTAQRLSDQVRAIQRCKLLDDTVLERLHREALPARTESNVRSVEDPISLNNFARSEEVNSEQVSVSDQLQEQVRRALEDAFAEYRSAPISLRPCLPRLPMHRRNISLVSALDNVLKPHWETSVDLCDTHSILYCGAVAVCRVAGVRFPNLHRATQPTNAKPLWQCRIERRINMARTLIAKLLCFQAGNNRPRVVRFVTQAFAGTRVAPVDYVAGVAERIDYWKQKVYAWAKRIRRYKARADRYHVNRTFQTNQRSVYQAWERPQERVTDVHLPNAAVMAEFWRKIWSVPVSHSEGEWFDVVGRSCGPIQEMEPVVISREDLACAVRAAPNWKSPGPDGLHAFWLKRLQGSHSRLATQFQEALQLGSLPSFMTSGVTHMIHKSGSTSEPKNYRPITCLPTVYKLLTSILRIKINNHLKAQHILSPTQNGCKGGSRGTKDLLLIDMAICQQVRRSRKNVSMAWIDYKKAYDSVPHTWLGRVLELYRVHPALCSFLGSCMRQWTTVLRHPGCGGLSGSSDLIKISRGIFQGDSLSPLWFCLALNPLSAILKDSKLGYHLRRESEPISHLLYMDDLKLYASKKTDLMELLKITGNFSNDIGMEFGVDKCAVIHVQRGRVKDSFNLQLSEDISLRSLSEMDSYKYLGMSQALSIAEQDMKQSLRDRFFARLIKVLKSLLSGGNKVRAFNGWVMPVLTYSFGILRWTQSELDALDRKVRRLLTAYRMHHPRSSVMRLYIPRKCGGRGFLNAKTLHNREVCNLRQYFLSVSVVMYRDVAAIDRGLTPLSLANGNWRRPQVLSTSDRTAIWKGKELHGRFYRALTGPDVDQLASVTWLRFSNLFGETEGFVFAIMDEVIMTNNYRKHILKDGTVDICRACHRPGESIRHVVSGCSRLANGEYLHRHNQVARIIHQQLALKYGLVDSEVPYYQYQPLPVPESGHITLYWDRSVITDRTIVANKPDIVIIDRSMRRVMLVDVTIPHDENLVKAEKEKLSKYLDLAHEVTTMWNVDSTIIIPMVVSVNGLIAKSFDKHLEKLSLGSWVKGLIQKAVMLDTARIVRRFLSLEP

SEQ ID NO: 27647 - protein, 962 aa, Phalera bucephala
MHRHNISLVGALDNVLKSHWETSVDLCDTHSILYCGAVAVCRVAGVRFPNLHRATQPTNAKPFWQCRIERRINMARTLIAKLLCFQAGNNRPRVVRFVAQAFAGTGVAPVDCMARVTERIDYWKQKVYAWANRIRRYRERADRYHVNRTFEVNQKSLYQAWERPQERVTDVHLPDAATMAEFWRKIWSVPVSHSEGEWFDVVGRSCEPIQEMEPVVITRDDVACAVRAAPNWKSPGPDGLHAFWLKRLQGSHARLATQFQEALELGSLPSLLTTGVTHLIHKSGSTLEPKNYRPITCLPTVYKLLTSILRTKINNHLKAQHILSPTQNGCKGGSRGTKDLLLIDMAICQQVRRSRKNVSMAWIDYKKAYDSVPHTWLGRVLELYKVHPALCSFLGLCMGQWTTVLRHPGYGGLSGSSDLIKISRGIFQGDSLSPLWFCLALNPLSAILKNSNLGYHLRRGSEPISHLLYMDDLKLYASKKTDLMELLKITGNFSNDIGMEFGVDKCAVIHVQRGRVEDSFNLQLSEDISLRSLSEMDSYKYLGMSQALSIAEQDMKQSLKDRFFARLMKVLKSLLSGGNKVRAFNGWVMPVLTYSFGILRWTQSELDALDRKVRRLLTAYRMHHPQSSVMRLYIPRRCGGRGFLNAKTLHNREVCNLRQYFLSVSVVMYRDVAAIDRGLTPLSLANGNWRRPQVLSISDRTAIWKGKELHGRFYRALTGPDVDQLASVTWLRFSNLFGETEGFVFAIMDEVIMTNNYRKHILKDGTVDICRACHRPGESIRHVVSGCSRLANGEYLHRHNQVAKIIHQQLALKYDLVDSEVPYYQYQPLPVLESGHITLYWDRSIITDRTIVANKPDIVIIDRSMRRVMLVDVTIPHDENLVKAEKEKISKYLDLAHEVTAMWNVDSTIIIPMVVSVNGLIAKSFDKHLEKLSLGSWVKGLIQKVVVLDTARIVRRFLSLEP

SEQ ID NO: 27648 - protein, 889 aa, Phalera bucephala
MARTLIAKLLCFQAGNNRPRVVRFVAQAFAGTGVAPVDCMARVTERIDYWKQKVYAWANRIRRYRERADRYHVNRTFEVNQKSLYQAWERPQERVTDVHLPDAATMAEFWRKIWSVPVSHSEGEWFDVVGRSCEPIQEMEPVVITRDDVACAVRAAPNWKSPGPDGLHAFWLKRLQGSHARLATQFQEALELGSLPSLMTTGVTHLIHKSGSTLEPKNYRPITCLPTVYKLLTSILRTKINNHLKAQHILSPTQNGCKGGSRGTKDLLLIDMAICQQVRRSRKNVSMAWIDYKKAYDSVPHTWLRRVLELYKVHPALCSFLGLCMGQWTTVLRHPGYGGLSGSSDLIKISRGIFQGDSLSPLWFCLALNPLSAILKNSKLGYHLRRGSEPISHLLYMDDLKLYASKKTDLMELLKITGNFSNDIGMEFGVDKCAVIHVQRGRVEDSFNLQLSEDISLRSLSEMDSYKYLGMSQALSIAEQDMKQSLKDRFFARLMKVLKSLLSGGNKVRAFNGWVMPVLTYSFGILRWTQSELDALDRKVRRLLTAYRMHHPRSSVMRLYIPRRCGGRGFLNAKTLHNREVCNLRQYFLSVSVVMYRDVAAIDRGLTPLSLANGNWRRPQVLSISDRTAIWKGKELHGRFYRALTGPDVDQLASVTWLRFSNLFGETEGFVFAIMDEVIMTNNYRKHILKDGTVDICRACHRPGESIRHVVSGCSRLANGEYLHRHNQVAKIIHQQLALKYDLVDSEVPYYQYQPLPVLESGHITLYWDRSIITDRTIVANKPDIVIIDRSMRRVMLVDVTIPHDENLVKAEKEKISKYLDLAHEVTAMWNVDSTIIIPMVVSVNGLIAKSFDKHLEKLSLGSWVKGLIQKAVVLDTARIVRRFLSLEP

SEQ ID NO: 27649 - protein, 889 aa, Phalera bucephala
MARTLIAKLLCFQAGNNRPRVMRFVAQAFAGTGVAPVDYVAGVAERIDFWKQKVYAWAKRIRRYKARADRYHVNRTFQTNQRSVYKAWERPQERVTDVHLPNAAVMAEFWRKIWSVPVSHSEGEWFDVVGRSCGPIQEMEPVVISREDLACAVRAAPNWKSPGPDGLHAFWLKRLQGSHSRLATQFQEALQLGSLPSFMTPGVTHLIHKSGSTSEPKNYRPITCLPTVYKLLTSILRIKINNHLKAQHILSPTQNGCKGGSRGTKDLLLIDMAICQQVRRSRKNVSMAWIDYKKAYDSVPHTWLARVLELYRVHPALCSFLASCMGQWTTVLRHPGSGGLSGSSDLIKISRGIFQGDSLRPLWFCLALNPLSAIRKDSKLGYHLRRESEPISHLLYMDDLKLYASKKTDLMELLKLTGNFSNDIGMEFGVDKCAVIHVQRGRVEDSFNLQLSEDISLRSLSEMDSYKYLGMSQALSIAEQDMKQSLKDRFFARLIKVLKSLLSGGNKVRAFNGWVMPVLTYSFGILRWTQSELDALDRKVRRLLTAYRMRHPRSSVMRLYIPRKCGGRGFLNAKTLHNHEVCNLRQYFLSVSVVMYRDVAAIDRGLTPLSLANENWRRPQVLSILDRTAIWKGKELHGRFYRALTGPDVDQLASVAWLRFSNLFGETEGFVFAIMDEVIMTNNYRKHILKDGTVDICRACHRPGESIRHVVSGCSRLAKGEYLHRHNQVARIIHQQLALKYGLVDSEVPYYQYQPLLVLESGHITLYWDRSIITDRTIVANKPDIVIIDRSMRRVMLVDVTIPHDEDLVKAEKEKLSKYLDLAHEVTAMWNVDSTIIIPMVVSVNGLIAKSFDKHLEKLSLGTWVKGLIQKAVMLDTARIVRWFLSLEP

SEQ ID NO: 27650 - protein, 1203 aa, Clostera curtula
MERRINPRRQCREPYETNARITSAAVSSNRVQSSDEEYFTPPGTASSSEDEPTPSPSLSRRPARRGRPPLPASLGSTGHRALPTAPATGGVVRRMRWTNNLNESVMRAYYGATDGGTNLTAYRSRLLALFQELHPDVTVTAQRLSDQVRAIQRLNLLEQPVLERLRLEALPPQSVSSVQVTTPTAACLLPPTSVEQLDLGQIEEVSLNDQYNEQLRRILEETIEEYRLIPMTSRPRIPRLPMHKRNMALVSALDSLLMDKLNSVGDLTELHFILYCGAVAVCRVAGVTFPKSSTASRQPECKPTWQYRIEKRITAARTLIAKLYCFMTGNTRPRVMRYVIQAFAGTGVRQCDYAACVTERIDYFKQKVYAWAKRIRRYRERADRFNQNRLFQNDQKIIYRNWERPQPPTADLSTPDADTMLAFWRNIWSRPVDHLEGQWIGVVGRACEQITQMEPVHIDLNDVISAIRSAPNWKSPGPDGLHNFWIKKVCSCHARLATLFQAALEAGSLPHFMTTGVTHLIHKSGRISEPKNYRPITCLPTIYKLLTSIIKFKIVNHILANNILASNQNGCNAGSRGTKDLLLIDMAICQQVRRSKKNISMAWIDYKKAYDSVPHSWLMRVLDLYKVDANLCLFLSSCMRQWSTVLYHPGHRHFFEPSERIWIKRGIFQGDSLSPLWFCLALNPLSILLNDSMPGYRLHRGGKTISHLLYMDDLKLYAPKQSDLMALLQVTETFSSAISMEFGVDKCAVINVQKGRVVNSENVQLSENVVLRSLCESDTYKYLGMSEALGIADSDVKQQLKTRFLGRLTKVLKSLLSGGNKVRAFNCWVIPVIAYSFGILRWTQSELDALDRMVRRQLTAFRMHHPRSSVMRLYIPRRCGGRGFLNVKSLHNREVCNLRDYFLRVDDEMHRDVVKVDSGLTALSMAKQNWRRPQVLSVSERKAIWKGKELHGRFYSALTGPEIDQLASVSWLRFGNLFGETEGFVFAIMDEVVKTNNYRKYIIKDGTVDICRACHCPGESIRHVVSGCSRLANGEYLHRHNQVAGIIHQQLALRYGIVESEVPYYQYKPEPVLSNNHVTLYWDRSIVTDRTIMANKPDIVVIDRSTRRAMLIDITIPHDVNLVKAEHEKISKYLDLSHEVGAMWNMDSTIIVPIVISVHGLIAKSFDQNLQKLSLGSWVKSLIQKAVLLDTARIVRRFLTLDP

SEQ ID NO: 27651 - protein, 1197 aa, Clostera curtula
MTTRRNPSRRCKQAAPLGARPPSPCLSSRSSNDEYFTPTPGPSSDESEVPTTSAPRRPVRRGRPPLPARLGPSDQAGPSTAPATGSAVRTRMRWSHQLNEDVMRAYYGATKGGTALTSYRSKMLSLFQAVHPTVTVTAQRLADQVRAIQRLGLLDAPVLEQLRDEIQPALSEPALGDVTVVPRDTRTISEPDINMPEPVCIKDQDIERLRRTLENVIGEYRVMPIFDRPKLPRLPLNAHNVSIVNAYDNILQTYLDSSTDLTDTYSILYCGAVAACREAGIGVLAPNQNIRPAAAAPRWKLRIERRITAARTIIAKLYCFQAGNVRPRIMRFVNQAFAGTGISSNNYSSHILDRIDFWKQKVYAWAKRIKRYSTTTERYSINKIFQSDQRSVYRKWQNPKSQIPDINLPNIDHMSTFWENIWSNPINYSENEWFNVVRRACENIPEMAPVSITANDVKSAISWAPNWKSPGPDRLHAYWIKSYRSSHERLATQYQQALESGNIPEFMTTGLTHLIHKSGSTSDPKNFRPITCLPIIYKILTSILRTKINAHVTANDILSPTQNGCKAKSRGTKDLLLIDMAISQQVRRNKRNVFMAWIDYKKAYDSVPHSWLKRVLKLYKIHPTLCAFLSSCMEQWSTILLHPGHINSFDSSNLVKIKRGIFQGDSLSPLWFCLALNPLSTLLKCSGLGYRLRKENEAISHLLYMDDLKLYASKKPDLMELLKITDNFSKSIGMEFGVDKCAVLNIQRGRIVNSECLQVSRNVSLRCLSESETYKYLGMSEALGVADADMKQVLKERFYSRLTKVLKSLLSGGNKVRAFNSWVMPVLTYSFGILRWTQTELDAVDRKVRRLLTAYRMHHPRSSVMRMYIPRKCGGRGFLNAKDLHNREIYNLREYFLKVNVDMYQNVVAIDKGLTPLSLATANWMKPKVMSISDRTAIWKDKELHGRFYRALTGSDVDQLASVDWLRFGNLFGETEGFVFAIMDEVMMTNNYRKHILKDGTVDICRACHRPGESIRHIVSGCSRLANGEYLHRHNQVAKIIHQQLAFKYGLVSTEVPYYQYQPQPVLENDHVTLYWDRSIITDRYIAGNKPDIVVIDRSTRHVRLVDITIPHDENLVKAEKEKMIKYLDLAHEVTAMWSAESTSIIPIVISVHGLISKSFDGHLNQLSISGWVKRLMQKAVLLETARIVRRFLSLQH

SEQ ID NO: 27652 - protein, 1015 aa, Clostera curtula
MAPRDPFPESDANVHEQVSISHQDIERLRSTLENVINEYRSMPIFDRPQLPRLPLNPYNISLVNAFDQILKTYIDSSSDLTNTHSILYCGAVAACYEAGVRFPASYQNARPVGSPPLWKQRIERRITAARTIIAKLYCFQAGNTRPKIMRFVKQAFAGTEINSNNYLSHIIERIDYWKQKVYAWAKRIKRYSIRMERYSINKIFQRDQRSIYRKWHLKDQTPDKQLPNIDEMSTFWRNIWSNPINHSENECFEVVRRACENISEMSPVLITATDVKSAVGWAPNWKSPGPDRLHAYWIKSYRSSHERLATQFQQALESGNVPNFMTTGLTHLIHKSGSTSDPKNFRPITCLPIIYKILTSILRTKINAHVMDNNILSPSQNGCKAKSRGTKDLLLIDMAISQQVRRNKRNVFMAWIDYKKAYDSVPHSWLKKILNLYRIHPTLCDFLSTCMEQWSTILLHPGHVNYFDSSNLVKIKRGIFQGDSLSPLWFCLALNPLSTLLKCSGLGYRLRKENEAISHLLYMDDLKLYASKKPDLMELLKITDNFSKSIGMEFGVDKCAVLNIQRGRIVNSECLQVSRNVSLRCLSESETYKYLGMSEALGIADADMKQVLKERFYSRLTKVLKSLLSGGNKVRAFNSWVMPVLAYSFGILRWTQTELDAVDRKVRRLLTAHRMHHPRSSVMRMYISRKCGGRGFLNAKDLHNREIHNLREYFLKVNVDMYRNVVAIDKGLTPLSLAIENWRKPKVMSISDRTAIWKDKELHGRFYRALTGSDVDQLASVDWLRFGNLFGETEGFVFAIMDEVMMTNNYRKHILKDGTVDICRACHRPGESIRHIVSGCSRLANGEYLHRHNQVAKIIHQQLAFKYGLVSTEVPYYQYQPQPVLENDHVTLYWDRSIITDRYIAANKPDIVIIDRSTRRVKLVDITIPHDENLVKAEKEKMIKYLDLAHEVTAMWSAESTSIIPIVLSVHGLISKSFDGHLNQLSISGWVKRLMQKAVLLETARIVRRFLSLKH

SEQ ID NO: 27653 - protein, 973 aa, Clostera curtula
MTSRPRIPRLPMHKRNMALVSALDSLLMDKLNSVGDLTELHFILYCGAVAVCRVAGVTFPKSSTASRQPECKPTWQYRIEKRITAARTLIAKLYCFMTGNTRPRVMRYVIQAFAGTGVRQCDYAACVTERIDYFKQKVYAWAKRIRRYRERADRFNQNRLFQNDQKIIYRNWERPQPPTADLSTPDADTMLAFWRNIWSRPVDHLEGQWIGVVGRACEQITQMEPVHIDLNDVISAIRSAPNWKSPGPDGLHNFWIKKVCSCHARLATLFQAALEAGSLPHFMTTGVTHLIHKSGRISEPKNYRPITCLPTIYKLLTSIIKFKIVNHILANNILASNQNGCNAGSRGTKDLLLIDMAICQQVRRSKKNISMAWIDYKKAYDSVPHSWLMRVLDLYKVDANLCLFLSSCMRQWSTVLYHPGHRHFFEPSERIWIKRGIFQGDSLSPLWFCLALNPLSILLNDSMPGYRLHRGGKTISHLLYMDDLKLYAPKQSDLMALLQVTETFSSAISMEFGVDKCAVINVQKGRVVNSENVQLSENVVLRSLCESDTYKYLGMSEALGIVDSDVKQQLKTRFLGRLTKVLKSLLSGGNKVRAFNCWVIPVIAYSFGILRWTQSELDALDRMVRRQLTAFRMHHPRSSVMRLYIPRRCGGRGFLNVKSLHNREVCNLRDYFLRVDDEMHRDVVKVDSGLTALSMAKQNWRRPQVLSVSERKAIWKGKELHGRFYSALTGPEIDQLASVSWLRFGNLFGETEGFVFAIMDEVVKTNNYRKYIIKDGTVDICRACHCPGESIRHVVSGCSRLANGEYLHRHNQVAGIIHQQLALRYGIVESEVPYYQYKPEPVLSNNHVTLYWDRSIVTDRTIMANKPDIVVIDRSTRRAMLIDITIPHDVNLVKAEHEKISKYLDLSHEVGAMWNMDSTIIVPIVISVHGLIAKSFDQNLQKLSLGSWVKSLIQKAVLLDTARIVRRFLTLDP

SEQ ID NO: 27654 - protein, 962 aa, Phalera bucephala
MHRRNISLVSALDNVLKPHWETSVDLCDTHSILYCGAVAVCRVAGVRFPNLHRATQPTNAKPLWQCRIERRINMARTLIAKLLCFQAGNNRPRVVRFVTQAFAGTRVAPVDYVTGVAERIDYWKQKVYAWAKKIRRYKARADRYHVNRTFQTNQRSVYQAWVRPQERVTDVHLPNAAVMAEFWRKIWSVPVTHSEGEWFDVVGRSCGPIQEMEPVVISREDLACAVRAAPNWKSPGPDGLHAFWLKRLQGSHSRLATQFQEALQLGSLPSFMTSGVTHLIHKSGSTSEPKNYRPITCLPTVYKLLTSILRIKINNYLKAQHILSPTQNGCKGGSRGTKDLLLIDIAICQQVRRSRKNVSMAWIDYKKAYDSVPHTWLGRVLELYRVHPALCSFLGSCMRQWTTVLRHPGCGGLSGSSDLIKISRGIFQGDSLSPLWFCLALNPLSAILKDSKLGYHLRRESEPISHLLYMDDLKLYASKKTDLMELLKITGNFSNDIGMEFGVDKCAVIHVQRGRVEDSFNLQLSEDISLRSLSEMDSYKYLGMSQALSIAEQDMKQSLRDRFFARLIKVLKSLLSGGNRVRAFNGWVMPVLTYSFGILRWTQSELDALDRKVRRLLTAYRMHHPRSSVMRLYIPRKCGGHGFLNAKTLHNREVCNLRQYFLSVSVVMYRDVAAIDRGLTPLSLANGNWRRPQVLSTSDRTAIWKGKELHGRFYRALTGPDVDQLASVTWLRFSNLFGETEGFVFAIMDEVIMTNNYRKYILKDGTVDICRACHRPGESIRHVVSGCSRLANGEYLHRHNQVARIIHQQLALKYGLVDSEVPYYQYQPLPVLESGHITLYWDRSVITDRTIVANKPDIVIIDRSMRRVMLVDVTIPHDENLVKAEKEKLSKYLDLAHEVTAMWNVDSTIIIPMVVSVNGLIAKSFDKHLEKLSLGRWVKGLIQKAVMLDTARIVRRFLSLEP

SEQ ID NO: 27655 - protein, 840 aa, Phalera bucephala
MHRRNISLVSALDNVLKPHWETSVDLCDTHSILYCGAVAVCRVAGVRFPNLHRATQPTNTKPFWQCRIERRINMARTLIAKLLCFQAGNNRPRVMRFVAQAFAGTGVAPVDYVAGVAERIDYWKQKVYAWAKRIRRYKARADRYHVNRTFQTNQRSVYQAWERPQERVTDVHLPNAAVMAEFWRKIWSVPVTHSEGEWFDVVGRSCGPIQEMEPVVISREDLACAVRAAPNWKSPGPDGLHAFWLKRLQGSHSRLATQFQEALQLGSLPSFMTSGVTHLIYKSGSTSEPKNYRPITCLPTVYKLFTSILRIKINNHLKAQHILSPTQNGCKGGSRGTKDLLLIDMAICQQVRRSRKNVSMAWIDYKKAYDSVPHTWLGRVLELYRVHPALCSFLGSCMGQWTTVLRHPGCGGLSGSSDLIKISRGIFQGNSLSPLWFCLALNPLSAILKDSKLGYNLRRESEPISHLLYMDDLKLYASKKTDLMELLKITGNFSNDIGMEFGVDKCAVIHVQRGRVEDSFNLQLSEDISLRSLSEMDSYKYLGMSQALSIAEQDMKQSLKDRFFARLIKVLKSLLSGGNKVRAFNGWVMPVLTYSFGILRWTQSELDALDRKVRRLLTAYRMHHPRSSVMRLYIPRKSGGRGFLNAKTLHNREVCNHRQYFLSVSVVMYRDVAAIDRGLTPLSLANENWRRPQVLSISDRTAIWKGKELHGRFYQALTGPDVDQLASVNWLRFSNLFGETEGFVFAIMDEVIMTNNYRKHILKDGTVDICRACHRPGESIRHVVSGCSRLANGEYLHRHNQVARIIHQQLALKYGLVDSEVPYYQYQPLPVLESGHITLY

SEQ ID NO: 27656 - protein, 1163 aa, Phalera bucephala
MVSINVYTVFSNNNNNNNASSHPLRPERRGRPPLPACIGPAEHCAPPTAPATGGVVRRMRWTSELNMSVMRAYYGATKGETILTAYRPKLLSLFQELHPTVAVTAQRLSDQVRAIQRCKLLDDTVLERLRSETCPARTESDLRSFEEPISLDSFARSEEVNSGQVSVGDQLQEQVRRALKDAFAEYRSAPISLRPCLPRLPMHRHNISLVGALDNVLKSHWETSVDLCDTHSILYCGAMAVCRVAGVRFPNLHRATQPTNAKPFWQCRIERRINMARTLIAKLLCFQAGNNRPRVVRFVAQAFAGTGVAPVDYMARVTERIDYWKQKVYAWANRIRRYRERADRYHVNRTFEVNQRSVYQAWERPQERVTDVHLPDAATMAEFWRKIWSVPVSHSEGEWFDVVGRSCEPIQEMEPVVITRDDVACAVSAAPNWKSPGPDGLHAFWLKRLQGSHARLATQFQEALELGSLPSLLTTGVTHLIHKSGSTLEPKNYRPITCLPTVYKLLTSILRTKINNHLKAQHILSPTQNGCKGGSRGTKDLLLIDMAICQQVRRSRKNVSMAWIDYKKAYDSVPHTWLRRVLELYKVHPALCSFLGLCMGQWTTVLRHPGYGGLSGSSDLIKISRGIFQGDSLSPLWFCLALNPLSAILKNSKLGYHLRRGSEPISHLLYMDDLKLYASKKTDLMELLKITGNFSNDIGMEFGVDKCAVIHVQRGRVEDSFNLQLSEDISLRSLSEMDSYKYLGMSQALSIAEQDMKQSLKDRFFARLMKVLKSLLSGGNRVRAFNGWVMPVLTYSFGILRWTQSELDALDRKVRRLLTAYRMHHPRSSVMRLYIPRRCGGRGFLNAKTLHNREVCNLRQYFLSVSVVMYRDVAAIDRGLTPLSLANGNWRRPQVLSISDRTAIWKGKELHGRFYRALTGPDVDQLASVTWLRFSNLFGETEGFVFAIMDEVIMTNNYRKHILKDGTVDICRACHRPGESIRHVVSGCSRLANGEYLHRHNQVAKIIHQQLAPKYDLVDSEVPYYQYQPLPVLESGHITLYWDRSIITDRTIVANKPDIVIIDRSMRRVMLVDVTIPHDENLVKAEKEKISKYLDLAHEVTAMWNVDSTIIIPMVVSVNGLIAKSFDKHLEKLSLGSWVKGLIQKVVVLDTARIVRRFLSLEP

SEQ ID NO: 27657 - protein, 1012 aa, Phalera bucephala
MRGQPTTSPPPSKMPRLPLPRSRLVLSQTDAFAEYRSAPISLRPCLPRLPMHRHNISLVGALDNVLKSHWETSVDLCDTHSILYCGAVAVCRVAGVRFPNLHRATQPTNAKPFWQCRIERRINMARTLIAKLLCFQAGNNRPRVVRFVAQAFAGTGVAPVDCMARVTERIDYWKQKVYAWANRIRRYRERADRYHVNRTFEVNQKSLYQAWERPQERVTDVHLPDAAMMAEFWRKIWSVPVSHSEGEWFDVVGRSCEPIQEMEPVVITRDDVACAVRAAPNWKSPGPDGLHAFWLKRLQGSHARLATQFQEALELGSLPSLLTTGVTHLIHKSGSTLEPKNYRPITCLPTVYKLLTSILRTKINNHLKAQHILSPTQNGCKGGSRGTKDLLLIDMAICQQVRRSRKNVSMAWIDYKKAYDSVPHTWLRRVLELYKVHPALCSFLGLCMGQWTTVLRHPGYGGLSGSSDLIKISRGIFQGDSLSPLWFCLALNPLSAILKNSKLGYHLRRGSEPISHLLYMDDLKLYASKKTDLMELLKITGNFSNDIGMEFGVDKCAVIHVQRGRVEDSFNLQLSEDISLRSLSEMDSYKYLGMSQALSIAEQDMKQSLKDRFFARLMKVLKSLLSGGNKVRAFNGWIMPVLTYSFGILRWTQSELDALDRKVRRLLTAYRMHHPRSSVMRLYIPRRCGGRGFLNAKTLHNREVCNLRQYFLSVSVVMYRDVAAIDRGLTPLSLANGNWRRPQVLSISDRTAIWKGKELHGRFYRALTGPDVDQLASVTWLRFSNLFGETEGFVFAIMDEVIMTNNYRKHILKDGTVDICRACHRPGESIRHVVSGCSRLANGEYLHRHNQVAKIIHQQLALKYDLVDSEVPYYQYQPLPVLESGHITLYWDRSIITDRTIVANKPDIVIIDRSMRRVMLVDVTIPHDENLVKAEKEKISKYLDLAHEVTAMWNVDSTIIIPMVVSVNGLIAKSFDKHLEKLSLGSWVKGLIQKVVVLDTARIVRRFLSLEP

SEQ ID NO: 27658 - protein, 1204 aa, Phalera bucephala
MAEPSRRNPVRLCRQRDARSPSARPTPLPGSPTSPQPPEDEDFFTPPTSGASSDDAGISASPPTLTSARRGRPPLPARLGPAGHCAPPTAPATGGVVRRMRWTPELNLSVMRAYYGATEGGTILTAYRPKLLSLFQGLHPTVAVTAQRLSDQVRAIQRCKLLDDTVLERLRREALPARTDFNVRSVEEPISLNNFARLEEINSEQVSVSDQLQEQVRRALEDAFAEYRSAPISLRPCLPRLPMHRRNISLVSALDNVLKPHWETSVDLCDTHSILYCGAVAVCRVAGVRFPNLHRATQPTNTKPFWQCRIERRINMARTLIAKLLCFQAGNNRPRVVRFVTQAFAGTRVAPVDYVAGVAERIDYWKQKVYAWAKRIRRYKARADRYHVNRTFQTNQRSVYQAWERPQERVTDVHLPNAAVMAEFWRKIWSVPVTHSEGEWFDVVGRSCGPIQEMEPVVISREDLACAVRAAPNWKSPGPDGLHAFWLKRLQGSHSRLATQFQEALQLGSLPSFMTSGVTHLIHKSGSTSEPKNYRPITCLPTVYKLLTSILRIKINNHLKAQHILSPTQNGCKGGSRGTKDLLLIDIAICQQVRRSRKNVSMAWIDYKKAYDSVPHTWLGRVLELYRVHPALCSFLGSCMRQWTTVLRHPGCGGLSGSSDLIKISRGIFQGDSLSPLWFCLALNPLSAILKDSKLGYHLRRESEPISHLLYMDDLKLYASKKTDLMELLKITGNFSNDIGMEFGVDKCAVIHVQRGRVEDSFNLQLSEDISLRSLSEMDSYKYLGMSQALSIAEQDMKQSLKDRFFARLIKVLKSLLSGGNKVRAFNGWVMPVLTYSFGILRWTQSELDALDRKVRRLLTAYRMHHPRSSVMRLYIPRKCGGRGFLNAKTLHNREVCNLRQYFLSVSVVMYRDVAAIDRGLTPLSLANGNWRRPQVLSTSDRTAIWKGKELHGRFYRALTGPDVDQLASVTWLRFSNLFGETEGFVFAIMDEVIMTNNYRKHILKDGTVDICRACHRPGESIRHVVSGCSRLANGEYLHRHNQVARIIHQQLALKYGLVDSEVPYYQYQPLPVLESGHITLYWDRSVITDRTIVANKPDIVIIDRSMRRVMLVDVTIPHDENLVKAEKEKLSKYLDLAHEVTTMWNVNSTIIIPMVVSVNGLIAKSFDKHLEKLSLGSWVKGLIQKAVMLDTARIVRRFLSLEP

SEQ ID NO: 27659 - protein, 1204 aa, Phalera bucephala
MAEPSRRNPVRLCRQRDARSPSARPTPLPGSPTSPQPSEDEDFFTPPTSGASSDDAGISASPPTLTSARRGRPPLPARLGPAGHCAPPTAPATGGVVRRMRWTPELNLSVMRAYYGATEGGTILTAYRPKLLSLFQGLHPTVAVTAQRLSDQVRAIQRCKLLDDTVLERLHREALPARTESNVRSVEDPISLNNFARLEEVNSEQASVSDQLQEQVRRALEDAFAEYRSAPISLRPCLPRLPMHRRNISLVSALDNVLKPHWETSVDLCDTHSILYCGAVAVCRVAGVRFPNLHRATQPTNAKSLWQCRIERRINMARTLIAKLLCFQAGNNRPRVVRFVTQAFAGTRVAPVDYVAGVAERIDYWKQKVYAWAKRIRRYKARADRYHVNRTFQTNQRSVYQAWERPQERVTDVHLPNAAVMAEFWRKIWSVPVTHSEGEWFDVVGRSCGPIQKMEPVVISREDLACAVRAAPNWKSPGPDGLHAFWLKRLQGSHSRLATQFQEALQLGSLPSFMTSGVTHLIHKSGSTSEPKNYRPITCLPTVYKLLTSILRIKINNHLKAQHILSPTQNGCKGGSRGTKDLLLIDIAICQQVRRSRKNVSMAWIDYKKAYDSVPHTWLGRVLELYRVHPALCSFLGSCMRQWTTVLRHPGCGGLSGSSDLIKISRGIFQGDSLSPLWFCLALNPLSAILKDSKLGYHLRRESEPISHLLYMDDLKLYASKKTDLMELLKITGNFSNDIGMEFGVDKCAVIHVQRGRVEDSFNLQLSEDISLRSLSEMDSYKYLGMSQALSIAEQDMKQSLRDRFFARLIKVLKTLLSGGNRVRAFNGWVMPVLTYSFGILRWTQSELDALDRKVRRLLTAYRMHHPRSSVMRLYIPRKCGGRGFLNAKTLHNREVCNLRQYFLSVSVVMYRDVAAIDRGLTPLSLANGNWRRPQVLSTSDRTAIWKGKELHERFYRALTGPDVDQLASVTWLRFSNLFGETEGFVFAIMDEVIMTNNYRKYILKDGTVDICRACHRPGESIRHVVSGCYRLANGEYLHRHNQVARIIHQQLALKYGLVDSEVPYYQYQPLPVLESGHITLYWDRSVITDRTIVANKPDIVIIDRSMRRVMLVDVTIPHDENLVKAEKEKLSKYLDLAHEVTAMWNVDSTIIIPMVVSVNGLIAKSFDKHLEKLSLGRWVKGLIQKAVMLDTARIVRRFLSLEP

SEQ ID NO: 27660 - protein, 1204 aa, Phalera bucephala
MAEPSRRNPVRLCRQRDARSPSARPTPLPGSPTSPQPSEDEDFFTPPTSGASSDDAGISASPPTLKSARRGRPPLPARLGPAGHCAPPTAPATGGVVRRMRWTPELNLSVMRAYCGATEGGTILTAYRPKLLSLFQGLHPTVAVTAQRLSDQVRAIQRCKLLDDTVLERLHREALPARTESNVRSVEDPISLNNFARSEEVNSEQVSVSDQLQEQVRRALEDAFAEYRSAPISLRPCLPRLPMHRRNISLVSALDNVLKPHWETSVDLCDTHSILYCGAVAVCRVAGVRFPNLHRATQPTNAKPLWQCRIERRINMARTLIAKLLCFQARNNRPRVVRFVTQAFAGTRVAPVDYVAGVAERIDYWKQKVYAWAKRIRRYKARADRYHVNRTFQTNQRSVYQAWERPQERVTDVHLPNAAVMAEFWRKIWSVPVTHSEGEWFDVVGRSCGPIQEMEPVVISREDLACAVRAAPNWKSPGPDGLHAFWLKRLQGSHSRLATQFQEALQLGSLPSFMTSGVTHLIHKSGSTSEPKNCRPITCLPTVYKLLTSILRIKINNHLKAQHILSPTQNGCKGGSRGTKDLLLIDIAICQQVRRSRKNVSMAWIDYKKAYDSVPHTWLGRVLELYRVHPALCSFLGSCMRQWTTVLRHPGCGGLSGSSDLIKISRGIFQGDSLSPLWFCLALNPLSAILKDSKLGYHLRRESEPISHLLYMDDLKLYASKKTDLMELLKITGNFSNDIGMEFGVDKCAVIHVQRGRVEDSFNLQLSEDISLRSLSEMDSYKYLGMSQALSIAEQDMKQSLRDRFFARLIKVLKSLLSGGNRVRAFNGWVMPVLTYSFGILRWTQSELDALDRKVRRLLTAYRMHHPRSSVMRLYIPRKCGGRGFLNAKTLHNREVCNLRQYFLSVSVVMYRDVAAIDRGLTPLSLANGNWRRPQVLSTSDRTAIWKGKELHGRFYRALTGPDVDQLASVTWLRFSNLFGETEGFVFAIMDEVIMMNNYRKYILKDGTVDICRACHRPGESIRHVVSGCSRLANGEYLHRHNQVARFIHQQLALKYGLVDSEVPYYQYQPLPVLESGHITLYWDRSVITDRTIVANKPDIVIIDRSMRRVMLVDVTIPHDENLVKAEKEKLSKYLDLAHEVTAMWNVDSTIIIPMVVSVNGLIAKSFDKHLEKLSLGSWVKGLIQKAVMLETARIVRRFLSLEP

SEQ ID NO: 27661 - protein, 962 aa, Phalera bucephala
MHRRNISLVSALDNVLKPHWETSVHLCDTHSILYCGAVAVCRVAGVRFPNLHRATQPTNTKPFWQCRIERRINMARTLIAKLLCFQAGNNRPRVMRFVAQAFAGTGVAPVDYVAGVAERIDYWKQKVYAWAKRIRRYKARADRYHVNRTFQTNQRSVYQAWERPQERVTDVHLPNAAVMAEFWRKIWSVPVSHSEGEWFDVVGRSCGPIQEMEPVVISREDLACAVRAAPNWKSPGPDGLHAFWLKRLQGSHSRLATQFQEALQLGSLPSFMTSGVTHLIYKSGSTSEPKNYRPITCLPTVYKLLTSILRIKINNHLKAQHILSPTQNGCKGGSRGTKDFLLIDMAICQQVRRSRKNVSMAWIDYKKAYDSVPHTWLGRVLELYRVHPALCSFLGSCMRQWTTVLRHPGCGGLSGSSDLIKISRGIFQGDSLSPLWFCLALNPLSAILKDSKLGYHLRRESEPISHLLYMDDLKLYASKKTDLMELLKITGNFSNDIGMEFGVDKCAVIHVQRGRVEDSFNLQLSEDISLRSLSEMDSYKYLGMSQALSIAEQDMKQSLKDRFFARLIKVLKSLLSGGNKVRAFNGWVMPVLTYSFGILRWTQSELDALDRKVRRLLTAYRMHQPRSSVMRLYIPRKCGGRGFLNAKTLHNREVCNLRQYFLSVSVVMYRDVGAIDRGLTPLSLANENWRRPQVLSISDRTAIWKGKELHGRFYRALTGPDVDQLASVNWLRFSNLFGETEGFVFAIMDEVIMTNNYRKHILQVGTVDICRACHRPGESIRHVVSGCSRLANGEYLHRHNQVARIIHQQLALKYGLVDSEVPYYQYQPLPVLESGRITLYWDRSIITDRTIVANKPDIVIIDRSMRRVMLVDVTIPHDENLVKAEKENLSKYLDLAHEVTAMWNVDSTIIIPMVVSVNGLIAKSFDKHLEKLSLGSWVKGLIQKAVMLDTARIVRRFLSLEP

SEQ ID NO: 27662 - protein, 1105 aa, Bombyx mori
MRWNENINMNVMRAYYEATEGETNLSAYRSKMFSVFQTLCPTVNVSTQRLSDQVRAIQRLRLLDQSLLDRLRYEALPVPIEPQENQVVTDTVAPIIQHDEEIQVQVCASNQDYERLSSALEDSIQEYRLVSSCSRPRLPRLPMHRRNVSLVGALDSILKPYLESSTDLIDTHSLLYCGAVAVCRVAEVKSPNLTQTAYRPPTKPQWQCRIEKRIDRARILIAKLMCFQKGNTRPRVMCFVDQAFAGTGISSNEYMTCIIERIDFWKQKVYAWASRIRRYRLRSERYHLNRVFQRDQRSVYRNWELSQSQVTNEPYNVNEEDMSTFWKNIWSIPIGHSEGEWIQTVRRECESYKEMDPITISAIDVSRAVRSMPNWKSPGPDGLHSYWIKWIRSSHERLAAQFQQALEMGSLPDFMTSGITYLIYKSGNTSDPKNYRPITCLPTIYKLLTSILRIKIQNHIFNNNILSPNQNGCKAGSRGTKDLLLIDMTITQQVRRGKRNVHMAWIDYKKAYDSVPHTWLMRVLELYKINPILCSFLSSCMGQWSTFLSQPGQMTSSAAPNLIRIKRGIFQGDSLSPLWFCLALNPLSTLLKDSTLGYRLRRGAEAISHLLFMDDLKLFASKKPDLMSLLKITDSFSKAIGMEFGVDKCAFIDVQRGKVVSSDCLLLNHSVVLKSLCESETYKYLGMFEVLNIVDADMKQSFRDRFFGRLIKVLKSHLSGGNKIRAFNGWVMPMLTYSFGILRWTQSELDVLDRKVRRLLTTYRMHHPRSSVMRLYIPRKCGGRGILNAKDLHNREIYNLREYFLKMNVNMYRDVVAVDKGLTPLSLANGNWKRLKVEGISDRITVWRSKELHGRFYRALTGPDVDQLASVAWLRFSNLFGETEGFIFAIMDEVIMTNNYRKYILKDGTVDICRACHRPGESIRHIVSGCSRFANGEYLHRHNQVARIIHQQLALKYGFLDSAVPYYQYQPQPVLDNGHVTLYWDRSIITDRYIVANKPDIVIIDRSARRAVLVDVTIPHDENLVKAEKDKLIKYLDLAHETTAMWHVDSTIIVPIVVSVHGLIAKSFDQHLKKLSLSSWVKGLIQKAVILDTARIVRRFLTLES

SEQ ID NO: 27663 - protein, 1203 aa, Clostera curtula
MERRINPRRQCREPYETNARITSAAVSSNRVQSSDEEYFTPPGTASSSEDEPTPSPSLSRRPARRGRPPLPASLGSTGHRALPTAPATGGVVRRMRWTNNLNESVMRAYYGATDGGTNLTAYRSRLLALFQELHPDVTVTAQRLSDQVRAIQRLNLLEQPVLERLRLEALPPQSVSSVQVTTPTAACLLPPTSVEQLDLGQIEEVSLNDQYNEQLRRILEETIEEYRLIPMTSRPRIPRLPMHKRNMALVSALDSLLMDKLNSVGDLTELHFILYCGAVAVCRVAGVTFPKSSTASRQPECKPAWQYRIEKRITAARTLIAKLYCFMTGNTRPRVMRYVIQAFAGTGVRQCDYAACVTERIDYFKQKVYAWAKRIRRYRERDDRFNQNRLFQNDQKIIYRNWERPQPPTADLSTPDADTMLAFWRNIWSRPVDHLEGQWIDVVGRACEQITQMEPVHIDLNDVISAIRSAPNWKSPGPDGLHNFWIKKVCSCHARLATLFQAALEAGSLPHFMTTGVTHLIHKSGRISEPKNYRPITCLPTIYKLLTSIIKFKIVNHILANNILASNQNGCNAGSRGTKDLLLIDMAICQQVRRSKKNISMAWIDYKKAYDSVPHSWLMRVLDLYKVDANLCLFLSSCMRQWSTVLYHPGHRHFFEPSERIWIKRGIFQGDSLSPLWFCLALNPLSILLNDSMPGYRLHRGGKTISHLLYMDDLKLYAPKQSDLMALLQVTETFSSAISMEFGVDKCAVINVQKGRVVNSENLQLSENVVLRSLCESDTYKYLGMSEALGIADSDVKQQLKTRFLGRLTKVLKSLLSGGNKVRAFNCWVIPVIAYSFGILRWTQSELDALDRMVRRQLTAFRMHHPRSSVMRLYIPRRCGGRGFLNVKSLHNREVCNLRDYFLRVDDEMHRDVVKVDSGLTALSMAKQNWRRPQVLSVSERKAIWKGKELHGRFYSALTGPEIDQLASVSWLRFGNLFGETEGFVFAIMDEVVKTNNYRKYIIKDGTVDICRACHCPGESIRHVVSGCSRLANGEYLHRHNQVAGIIHQQLALRYGIVESEVPYYQYKPEPVLSNNHVTLYWDRSIVTDRTIMANKPDIVVIDRSTRRAMLIDITIPHDVNLVKAEHEKISKYLDLSHEVGAMWNMDSTIIVPIVISVHGLIAKSFDQHLQKLSLGSWVKSLIQKAVLLDTARIVRRFLTLDP

SEQ ID NO: 27664 - protein, 1031 aa, Phalera bucephala
MDSGIKSECHAGLLWCYRGRNHPHRLPSEIVVSVSGLHPTVAVTAQRLSDQVRAIQRCKLLDDTVLERLHREALPARTESNVRSVEDPISLNNFARSEEVNSEQVSVSDQLQEQVRRALEDAFAEYRSAPISLRPCLPRLPMHRRNISLVSALDNVLKPHWETSVDLCDTHSILYCGAVAVCRVAGVRFPNLHLATQPTNAKPLWQCRIERRINMARTLIAKLLCFQAGNNRPRVMRFVTQAFAGTGVAPVDYVAGVAERIDYWKEKVYAWAKRIRRYKARADRYHVNRTFQTNQRSVYQAWERPQERVTDVHLPNAAVMAEFWRKIWSVPVTHSEGEWFDVVGRSCGPIQEMEPVVISREDLACAVRAAPNWKSPGPDGLHAFWLKRLQGSHSRLATQFQEALQLGSLPSFMTSGVTHLIHKSGSTSEPKNYRPITCLPTVYKLLTSILRIKINNHLKAQHILSPTQNGCKGGGGSRGTKDLLLIDIAICQQVRRSRKNVSMAWIDYKKAYDSVPHTWLGRVLELYRVHPALCSFLGSCMRQWTTVLRHPGCGGLSGSSDLIKISGGIFQGDSLSPLWFCLALNPLSAILKDSKLGYHLRRESEPISHLLYMDDLKLYASKKTDLMELLKITGNFSNDIGMEFGVDKCAVIHVQRGRVEDSFNLQLSEDISLRSLSEMDSYKYLGMSQALSIAEQDMKQSLKDRFFARLIKVLKSLLLGGNKVRAFNGWVMPVLTYSFGILRWTQSELDALDRKVRRLLTAYRMHHPQSSVMRLYIPRKCGGRGFLNAKTLHNREVCNLRQYFLSVSVVMYRDVAAIDRGLTPLSLANGNWRRPQVLSTTDRTAIWKGKELHGRFYRALTGPDVDQLASVTWLRFSNLFGETECFVFAIMDEVIMTNNYRKHILKDGTVDIYRACHSPGESIRHVVSGCSRLANGEYLHRHNQVARIIHQQLALKYGLVDSEVPYYQYQPLPVLESGHITLYWDRSVITDRTIVANKPDIVIIDRSMRRVMLVDVTIPHDENLVKAEKEK

SEQ ID NO: 27665 - protein, 1105 aa, Phalera bucephala
MRWTPELNLSVMRAYYGATEGGTILTAYRPKLLSLFQGLHPTVAVTAQRLSDQVRAIQRCKLLDDTVLERLHREALPARTESNVRSVEDPISLNNFARSEEVNSEQVSVSDQLQEQVRRALEDAFAEYRSAPISLRPCLPRLVMHRRNISLVSALDNVLKPHWETSVDLCDTHSILYCGAVAVCRVAGVRFPNLHRATQPTNAKPLWQCRIERRISMARTLIAKLLCFQAGNNRPRVVRFVTQAFAGTRVAPVDYVAGVAERIDYWKQKVYAWAKRIRRYKARADRYHVNRTFQTNQRSVYQAWERPQERVTDVHLPNAAVMAEFWRKIWSVPVIHSEGEWFDVVGRSCGPIQEMEPVVISREDLACAVRAAPNWKSPGPDGLHAFWLKRLQGSHSRLATQFQEALQLGSLPSFMTSGVTHLIHKSGSTSEPKNYRPITCLPTVYKLLTSILRIKINNHLKAQHILSPTQNGCKGGSRGTKDLLLIDIAICQQVRRSRKNVSMAWIDYKKAYDSVPHTWLGRVLELYRVHPALCSFLGSCMGQWTTVLRHPGCGGLSGSSDLIKISRGIFQGDSLSPLWFCLALNPLSAILKDSKLGYHLRRESEPISHLLYMDDLKLYASKKTDLMELLKITGNFSNDIGMEFGVDKCAVIHVQRGRVEDSFNLQLSEDISLRSLSEMDSYKYLGMSQALSIAEQDMKQSLRYRFFARLIKVLKSLLSGGNRVRAFNGWVMPVLTYSFGILRWTQSELDALDRKVRRLLTAYRMHHPRSSVMRLYIPRKCGGRGFLNAKTLHNREVCNLRQYFLSVSVVMYRDVAAIDRGLTPLSLANGNWRRPQVLSTSDRTAIWKGKELHGRFYRALTGPDVDQLASVTWLRFSNLFGETEGFVFAIMDEVIMTNNYRKHILKDGTVDICRACHRPGESIRHVVSGCSRLANGEYLHRHNQVARIIHQQLALKYGLVDSEVPYYQYQPLPVLESGHITLYWDRSVITDRTIVANKPDIVIIDRSMRRVMLVDVTIPHDENLVKAEKEKLSKYLDLAHEVTAMWNVDSTIIIPMVVSVNGLIAKSFDKHLEKLSLGSWVKGLIQKAVMLDTARIVRRFLSLEP

SEQ ID NO: 27666 - protein, 1229 aa, Phalera bucephala
MNKTHFSRIPCNIHYIIIIIITQQYMAEYPRRNPVRRCRQRIAQGHSARPSPLRGSPNSPQSSENELYFTPPTSGASSDETEPPASSHPLRPERRGRPPLPACIGPAEHCAPPTAPATGGVVRRMRWTSELNMSVMRAYYGATKGETILTAYRPKLLSLFQELHPTVAVTAQRLSDQVRAIQRCKLLDDTVLERLRSETCPARTESDLRSFEEPISLDNFARSEEVNSGQVSVGDQLQEQVRRALKDAFAEYRSAPISLRPCLPRLPMHRHNISLVGALDNVLKSHWETSVDLCDTHSILYCGAVAVCRVAGVRFPNLHRATQPTNAKPFWQCRIERRINMARTLIAKLLCFQAGNNRPRVVRFVAQAFAGTGVAPVDCMARVTERIDYWKQKVYAWANRIRRYRERADRYHVNRTFEVNQKSLYQAWERPQERVTDVHLPDAATMAEFWRKIWSVPVSHSEGEWFDVVGRSCEPIQEMEPVVITRDDVACAVRAAPNWKSPGPDGLHAFWLKRLQGSHARLATQFQEALELGSLPSLLTTGVTHLIHKSGSTLEPKNYRPITCLPTVYKLLTSILRTKINNHLKAQHILSPTQNGCKGGSRGTKDLLLIDMAICQQVRRSRKNVSMAWIDYKKAYDSVPHTWLRRVLELYKVHPALCSFLGLCMGQWTTVLRHPGYGGLSGSSDLIKISRGIFQGDSLSPLWFCLALNPLSAILKNSKLGYHLRRGSEPISHLLYMDDLKLYASKKTDLMELLKITGNFSNDIGMEFGVDKCAVIHVQRGRVEDSFNLQLSEDISLRSLSEMDSYKYLGMSQALSIAEQDMKQSLKDRFFARLMKVLKSLLSGGNKVRAFNGWVMPVLTYSFGILRWTQSELDALDRKVRRLLTAYRMHHPRSSVMRLYIPRRCGGRGFLNAKTLHNREVCNLRQYFLSVSVVMYRDVAAIDRGLTPLSLANGNWRRPQVLSISDRTAIWKGKELHGRFYRALTGPDVDQLASVTWLRFSNLFGETEGFVFAIMDEVIMTNNYRKHILKDGTVDICRACHRPGESIRHVVSGCSRLANGEYLHRHNQVAKIIHQQLALKYDLVDSEVPYYQYQPLPVLESGHITLYWDRSIITDRTIVANKPDIVIIDRSMRRVMLVDVTIPHDENLVKAEKEKISKYLDLAHEVTAMWNVDSTIIIPMVVSVNGLIAKSFDKHLEKLSLGSWVKGLIQKVVVLDTARIVRRFLSLEP

SEQ ID NO: 27667 - protein, 1214 aa, Phalera bucephala
MAEYPRRNPVRRCRQRIAQGHSARPSPLRGSPNSPQSSENELYFTPPTSGASSDETEPPASSHPLRPERRGRPPLPACIGPAEHCAPPTAPATGGVVRRMRWTSELNMSVMRAYYGATKGETILTAYRPKLLSLFQELHPTVAVTAQRLSDQVRAIQRCKLLDDTVLERLRSETCPARTESDLRSFEEPISLDNFARSEEVNSGQVSVGDQLQEQVRRALKDAFAEYRSAPISLRPCLPRLPMHRHNISLVGALDNVLKSHWETSVDLCDTHSILYCGAVAVCRVAGVRFPNLHRATQPTNAKPFWQCRIERRINMARTLIAKLLCFQAGNNRPRVVRFVAQAFAGTGVAVPECLCCVASPVDCMARVTERIDYWKQKVYAWANRIRRYRERADRYHVNRTFEVNQKSLYQAWERPQERVTDVHLPDAATMAEFWRKIWSVPVSHSEGEWFDVVGRSCEPIQEMEPVVITRDDVACAVRAAPNWKSPGPDGLHAFWLKRLQGSHARLATQFQEALELGSLPSLLTTGVTHLIHKSGSTLEPKNYRPITCLPTVYKLLTSILRTKINNHLKAQHILSPTQNGCKGGSRGTKDLLLIDMAICQQVRRSRKNVSMAWIDYKKAYDSVPHTWLRRVLELYKVHPALCSFLGLCMGQWTTVLRHPGYGGLSGSSDLIKISRGIFQGDSLSPLWFCLALNPLSAILKNSKLGYHLRRGSEPISHLLYMDDLKLYASKKTDLMELLKITGNFSNDIGMEFGVDKCAVIHVQRGRVEDSFNLQLSEDISLRSLSEMDSYKYLGMSQALSIAEQDMKQSLKDRFFARLMKVLKSLLSGGNKVRAFNGWVMPVLTYSFGILRWTQSELDALDRKVRRLLTAYRMHHPRSSVMRLYIPRRCGGRGFLNAKTLHNREVCNLRQYFLSVSVVMYRDVAAIDRGLTPLSLANGNWRRPQVLSISDRTAIWKGKELHGRFYRALTGPDVDQLASVTWLRFSNLFGETEGFVFAIMDEVIMTNNYRRHILKDGTVDICRACHRPGESIRHVVSGCSRLANGEYLHRHNQVAKIIHQQLALKYDLVDSEVPYYQYQPLPVLESGHITLYWDRSIITDRTIVANKPDIVIIDRSMRRVMLVDVTIPHDENLVKAEKEKISKYLDLAHEVTAMWNVDSTIIIPMVVSVNGLIAKSFDKHLEKLSLGSWVKGLIQKVVVLDTARIVRRFLSLEP

SEQ ID NO: 27668 - protein, 1204 aa, Phalera bucephala
MAEPSRRNPVRLCRQRDARSPSARPTPLPGSPTSPQPSEDEDFFTPPTSGASSDDAGISASPPTLTSARRGRPPLPARLGPAGHCAPPTAPATGGVVRRMRWTPELNLSVMRAYYGATEGGTILTAYRPKLLSLFQGLHPTVAVTAQRLSDQVRAIQRCKLLDDTVLERLHREALPARTESNVRSVEDPISLNNFARSEEVNSEQVSVSDQLQEQVRRALEDAFAEYRSAPISLRPCLPRLPMHRRNISLVSALDNVLKPHWETSVDLCDTHSILYCGAVAVCRVAGVRFPNLHRATQPINAKPLWQCRIERRINMARTLIAKLLCFQAGNNRPRVVRFVTQAFAGTRVAPVDYVAGVAERIDYWKQKVYAWAKRIRRYKARADRYHVNRTFQTNQRSVYQAWERPQERVTDVHLPNAAVMAEFWRKIWSVPVTHSEGEWFDVVGRSCGPIQEMEPVVISREDLACAVRAAPNWKSPGPDGLHAFWLKRLQGSHSRLATQFQEALQLGSLPSFMTSGVTHLIHKSGSTSEPKNYRPITCLPTVYKLLTSILRIKINNHLKAQHILSPTQTGCKGGSRGTKDLLLIDIAICQQVRRSRKNVSMAWIDYKKAYDSVPHTWLGRVLKLYRVHPALCSFLGSCMRQWTTVLRHPGCGGLSGSSDLIKISRGIFQGDSLSPLWFCLALNPLSAILKDSKLGYHLRRESEPISHLLYMDDLKLYASKKTDLMELLKITGNFSNDIGMEFEVDKCAVIHVQRGRVEDSFNLQLSEDISLRSLSEMDSYKYLGMSQALSIAEQDMKQSLRDRFFARLIKVLKSLQSGGNRVRAFNGWVMPVLTYSFGILRWTQSELDALDRKVRRLLTAYRMHHPRSSVMRLYIPRKCGGRGFLNAKTLHNREVCNLRQYFLSVSVVMYRDVAAIDRGLTPLSLANGNWRRPQVLSTSDRTAIWKGKELHGRFYRALTGPDVDQLASVTWLRFSNLFGETEGFVFAIMDEVIMTNNYRKHILKDGTVDICRACHRPGESIRHVVSGCSRLANGEYLHRHNQVARIIHQQLALKYGLVDSEVPYYQYQPLPVLESGHITLYWDRSVITDRTIVANKPDIVIIDRSMRRVMLVDVTIPHDENLVKAEKEKLSKYLDLAHEVTTMWNVDSTIIIPMVVSVNGLIAKSFDKHLEKLSLGSWVKGLIQKAVMLDTARIVRRFLSLEP

SEQ ID NO: 27669 - protein, 1194 aa, Junonia vestina
MKKARGQLAQPSSEVNSPNSESQSSSSDNDYKTPLSTSESEKNEVDPPVRTTKRRRVAHPPQEGLESQGRRAPARTPAASGAVRRMKWSQKMNESVMRAYYGATGGGINLTAYRSTMLSMFQALEPTVTVTAQRLSDQVRAIQRCHLLDESVLERLRSNLQQINAVSDSHSVQQPRYEQIEATDNISNSWPPNSVDLSVSNQDDEHMRRTLEDAILKYRPMPFNLRPRIPRLPIHKRNITIVGVVDKMLQQYLNNSQDLYDTCSIMYCGAVAVCNLALVKFKTNKIIPISNTVPAWQARIENRISSTRTIIGKLISFKSGNNRPRIMRYVHQAFAGTNIRSSEYMDSVTERIDFFKQKIFAWAKRIRRYKKRVSRYRQNRMFQSDQRKVYRDWEQCNDTVASSAFPPSEVTSEFWRSIWSAPIEHTEGEWMSAVRKECESLPQMEPVTISPEDISCAIRTSSNWKCPGPDGLHNFWLKNFHSSHSVLASQFQNALVSGTLPTFLTTGTTSLLYKSGCTADPKNYRPITCLSTTYKLLTSILAAKINKHITANNILAPAQNGCRSGSRGTKELLLIDMTICQQARRNRKNLCAAWIDYKKAYDSVPHTWLVGIMELYKIDATLYSFLRSCMGQWITYLRHPGSTDISGSTEPIRIKRGIFQGDSLSPLWFCLALNPLSTLLENSGLGFRLRRGSTIISHLLYMDDLKLYASKKSDLVKLLQITETFSSCIGMEFGIDKCAVIHVERGRVVSSEHIQLTQTLFLRSLDVGENYKYLGMSEALGIDDGSMKQLVKERFFGRLKKVLNSFLSGGNKVRAFNSWVMPLLVYTFGILRWTQTELDSLDRQVRKQLTTYRMHHPRSSVMRLYIPRKCGGRGFLNAKNLHNREVYNLRNYFLGISGDMHKDVVAVDKGLTPLSLGKKNWRRPIVLDTHDRMTVWKGKELHGRFYRALMSSDVDQASSVSWLQYGDLFGETEGFVCAIMDEVIKTNNYRKFIMKDGTADVCRACHRPGESLRHIISGCCHLANGEYLHRHNQVARIIHQQLALRYGLVDIEVPYYRYNPAPVLENGNALLYWDRSIITDRHIPANKPDIVIVDRSARLAIIVDITIPHDDNLVKAEKEKLSKYLDLAHEITAMWSVDSTIIVPVVVSVNGLFAKSFDQHLKKLSLGCWIKGRLQKAVLLETARIVRRFLTLES

SEQ ID NO: 27670 - protein, 1203 aa, Clostera curtula
MERRINPRRQCREPYEANARITSAAVSSNRVQSSDEEYFTPPGTASSSEDEPTPSPSLSRRPARRGRPPLPASLGSTGHRALPTVPATGGVVRRMRWTNNLNESVMRAYYGATDGGTNLTAYRSRLLALFQELHPDVTVTAQRLSDQVRAIQRLNLLEQPVLERLRLETLPPQPVSSVQVTTPTAACLLPPASVEQLDLGQIEEVSLNDQYNEQLRRILEETIEAYRLIPMTSRPRIPRLPMHKRNMALVSALDSLLMDKLNSVGDLTELHFILYCGAVAVCRVAGVSFPKNSTASRHPECRPAWQYRIEKRITAARTLIAKLYCFMTGNTRPRVMRYVIQAFAGTGVRQCDYAACVTERIDYFKQKVYAWAKRIRRYRERADRFNQNRLFQNDQKIIYRNWERPQPPTADLSTPDADTMLAFWRNIWSRPVDHLEGQWIGVVSRACEQITQMEPVHIDLNDVISAIRSAPNWKSPGPDGLHNFWIKKVCSCHARLATLFQAALEAGSLPDFMTTGVTHLIHKSGRISEPTNYRPITCLPTIYKLLTSIIKFKIVNHILANNILASNQNGCNAGSRGTKDLLLIDMAICQQVRRSKKNISMAWIDYKKAYDSVPHSWLMRVLDLYKVDANLCLFLSSCMRQWSTVLYHPGHRRFFEASERIWINRGIFQGDSLSPLWFCLALNPLSIVLNDSMPGYRLHRGGKTISHLLYMDDLKLYAPKQSDLMALLKVTETFSSAISMEFGVDKCAVINVQKGRVVNSENLQLSENVILRSLCESDTYKYLGMSEALGIADSDVKQQLKTRFLGRLTKVLKSLLSGGNKVRAFNCWVIPVIAYSFGILRWTQSELDALDRMVRRQLTAFRMHHPRSSVMRLYIPRRCGGRGFLNVKSLHNREVCNLRDYFLRVDDEMQRDVVKVDSGLTALSMAKQNWRRPQVLSISERKAIWKGKELHGRFYSALTGPEIDQLASVSWLRFGNLFGETEGFVFAIMDEVVKTNNYRKYIIKDGTVDICRACHCPGESIRHVVSGCSRLANGEYLHRHNQVAGIIHQQLALRYGIVESEVPYYQYKPEPVLSNNHVTLYWDRSIVTDRTIMANKPDIVVIDRSTRRAMLIDITIPHDVNLVKAEHEKISKYLDLSHEVGAMWNMDSTIIVPIVISVHGLMAKSFDQHLQKLSLGSWVKSLIQKAVLLDTARIVRRFLTLDP

SEQ ID NO: 27671 - protein, 1204 aa, Phalera bucephala
MAEPSRRNPVRLCRQRDARSPSARPTPLPGSPTSPQPSEDEDFFTPPTSGASSDHAGISAFPPTITSARRGRPPLPARLGPAGHCAPPTAPATGGVVRRMRWTPELNLSVMRAYYGATEGGTMLTAYRPKLLSLFQGLHPTVAVTAQRLSDQVRAIQRCTLLDDTVLERLHREALPARTESNVRSVEDPISLNNFARSEEVNSEQVSVSDQLQEQVRRALEDAFAEYRSAPISLRPCLPRLPMHRRNISLVSALDNVLKPHWETSVDLCDTHSILYCGAVAVCRVAGVRFPNLHRATQPTNAKPLWQCRIERRINMARTLIAKLLCFQAGNNRPRVVRFVTQAFAGTRVAPVDYVAGVAERIDYWKQKVYAWAKRIRRYKARADRYHVNRTFQTNQRSVYQAWERPQERVTDVHLPNAAVMAEFWRKIWSVPVTHSEGEWFDVVGRSCGPIQEMEPVVISREDLACAVRAAPNWKSPGPDGLHAFWLKRLQGSHSRLATQFQEALQLGSLPSFMTSGVTHLIHKSGSTSEPKNYRPITCLPTVYKLLTSILRIKINNHLKAQHILSPTQNGCKGGSRGTKDLLLIDIAICQQVRRSRKNVSMAWIDYKKAYDSVPHTWLGRVLELYRVHPALCSFLGSCMRQWTTVLRHPGCGGLSGSSDLIKISRGIFQGDSLSPLWFCLALNPLSAILKDSKLGYHLRRESEPISHLLYMDDLKLYASKKTDLMELLKITGNFSNDIGMEFGVDKCAVIHVQRGRVEDSFNLQLSEDISLRSLSEMDSYKYLGMSQALSIAEQDMKQSLRDRFFARLIKVLKSLLSGGNRVRAFNGWVMPVLTYSFGILRWTQSELDALDRKVRRLLTAYRMHHPRSSVMRLYIPRKCGGRGFLNAKTLHNREVCNLRQYFLSVSVVMYRDVAAIDRGLTPLSLANGNWRRPQVLSTSDRTAIWKGKELHGRFYRALTGPDVDQLASVTWLRFSNLFGETEGFVFAIMDEVIMTNNYRKYILKDGTVDICRACHRPGEYIRHVVSGCSRLANGEYLHRHNQVARIIHQQLALKYGLVDSEVPYYQYQPLPVLESGHITLYWDRSVITDRTIVANKPDIVIIDRSMRRVMLVDVTIPHDENLVKAEKEKLSKYLDLAHEVTAMWNVDSTIIIPMVVSVNGLIAKSFDKHLEKLSLGSWVKGLIQKAVMLDTALIVRRFLSLEP

SEQ ID NO: 27672 - protein, 1204 aa, Phalera bucephala
MAEPSRRNPVRLCRQRDARSPSARPTPLPGSPTSPQPSEDEDFFTPPTSGASSDDAGISASPPTLTSARRGRPPLPARLGPAGHCAPPTAPATGGVVRRMRWTPELNLSVMRAYYGATEGGTILTAYRPKLLSLFRGLHPTVAVTAQRLSDQVRAIQRCKLLDDTVLERLRREALPARTDFNVRSVEEPISLNNFARSEEVNSEQVSVSDQLQEQVRRALEDAFAEYRSAPISLRPCLPRLPMHRRNISLVSALDNVLKPHWETSVDLCDTHSILYCGAVAVCRVAGVRFPNLHRATQPTNTKPFWQCKIERRINMARTLIAKLLCFQAGNNRPRVVRFVTQAFAGTRVAPVDYVAGVAERIDYWKQKVYAWAKRIRRYKARADRYHVNRTFQTNQRSVYQAWERPQERVTDVHLPNAAVMAEFWRKIWSVPVTHSEGEWFDVVGRSCGPIQEMEPVVISREDLACAVRAAPNWKSPGPDGLHAFWLKRLQGSHSRLATQFQEALQLGSLPSFMTSGVTHLIYKSGSTSEPKNYRPITCLPTVYKLLTSILRIKINNHLKAQHILSPTQNGCKGGSRGTKDLLLIDIAICQQVRRSRKNVSMAWIDYKKAYDSVPHTWLGRVLELYRVHPALCSFLGSCMRQWTTVLRHPGCGGLSGSSDLIKISRGIFQGDSLSPLWFCLALNPLSAILKDSKLGYHLRRESEPISHLLYMDDLKLYASKKTDLMELLKITGNFSNDIGMEFGVDKCAVIHVPRGRVEDSFNLQLSEDISLRSLSEMDSYKYLGMSQALSIAEQDMKQSLKDRFFARLIKVLKSLLSGGNKVRAFNGWVMPVLTYSFGILRWTQSELDALDRKVRRLLTAYRMHHPRSSVMRLYIPRKCGGRGFLNAKTLHNREVCNLRQYFLSVSVVMYRDVAAIDRGLTPLSLANGNWRRPQVLSTSDRTAIWKGKELHGRFYRALTGPDVDQLASVTWLRFSNLFGETEGFVFAIMDEVIMTNNYRKHILKDGTVDICRTCHRPGESIRHVVSGCSCLANGEYLHRHNQVARIIHQQLALKYGLVDSEVPYYQYQPLPVLESGHITLYWDRSVITDRTIVANKPDIVIIDRSMRRVMLVDVTIPHDENLVKAEKEKLSKYLDLAHEVTTMWNVNSTIIIPMVVSVNGLIAKSFDKHLEKLSLGSWVKGLIQKAVMLDTARIVRRFLSLEP

SEQ ID NO: 27673 - protein, 1204 aa, Phalera bucephala
MAEPSRRNPVRLCRQRDARSPSARPTLLPGSPTSPQPSEDEDFFTPPTSGASSDDAGISASPPTLTSAWRGRPPLPARLGPAGHCAPPTAPATGGVVRRMRWTPELNLSVMRAYYGATEGGTILTAYRPKLLSLFQGLHPTVAVTAQRLSDQVRAIQRCKLLDDTVLERLHREALPARTESNVRSVEDPISLNNFARSEEVNSEQASVSDQLQEQVRRALEDAFAEYRSAPISLRPCLPRLPMHRRNISLVSALDNVLKPHWETSVDLCDTHSILYCGAVAVCRVAGVRFPNLHRATQPTNAKPLWQCRIERRINMARTLIAKLLCFQAGNNRPRVVRFVTQAFAGTRVAPVDYVAGVAERIDYWKQKVYAWAKRIRRYKARADRYHVNRTFQTNQRSVYQAWERPQERVTDVHLPNAAVMAEFWRKIWSVPVTHSEGEWFDVVGRSCGPIQEMEPVVISREDLACAVRAAPNWKSPGPDGLHAFWLKRLQGSHSRLATQFQEALQLGSLPSFMTSGVTHLIHKSGSTSEPKNYRPITCLPTVYKLLISILRIKINNHLKAQHILSPTQNGCKGGSRGTKDLLLIDIAICQQVRRSRKNVSMAWIDYKKAYDSVPHTWLGRVLELYRVHPALCSFLFSCMRQWTTVLRHPGCGGLSGSSDLIKISRGIFQGDSLSPLWFCLALNPLSAILKDSKLGYHLRRESEPISHLLYMDDLKLYASKKTDLMELLKITGNFSNDIGMEYGVDKCAVIHVQRGRVEDSFNLQLSEDISLRSLSEMDSYKYLGMSQALSIAEQDMKQSLRDRFFARLIKVLKSLLSGGNRVRAFNGWVMPVLTYSFGILRWTQSELDALDRKVRRLLTAYRMHHPRSSVMRLYIPRKCGGRGFLNAKTLHNREVCNLRQYFLSVSVVMYRDVAAIDRGLTPLSLANGNWRRPQVLSTSDRTAIWKGKELHGRFYRALTGPDVDQLASVTWLRFSNLFGETEGFVFAIMDKVIMTNNYRKYILKDGTVDICRACHRPGESIRHVVSGCSRLANGEYLHRHNQVARIIHQQLALKYGLVDSEVPYYQYQPLPVLESGHITLYWDRSVITDRTIVANKPDIVIIDRSMRRVMLVDVTIPHDENLVKAEKEKLSKYLDLAHEVTAMWNVDSTIIIPMVVSVNGLIAKSFDKHLEKLSLGSWVKGLIQKAVMLDTARIVRRFLSLEP

SEQ ID NO: 27674 - protein, 1204 aa, Phalera bucephala
MAEPSRRNPVRLCRQRDARSPSARPTPLPGSPASPQPSEDEDFFTPLTSGASSDDAGISATPPTLTSARRGRPPLPARLGPAGHCAPPTAPATGGVVRRMRWTPELNLSVMRAYYGATEGGTILTAYRPKLLSLFQGLHPTVAVTAQRLSDQVRAIQRCKLLDDTVLERLRREALPARTDFNVRSVEEPISLNNFARSEEVNSQQVSVSDQLQEQVRRALEDAFAEYRSAPISLRPCLPRLPMHRRNISLVSALDNVLKPHWETSVDLCDTHSILYCGAVAVCRVAGVRFPNLHRATQPTNTKPFWQCRIERRINMARTLIAKLLCFQAGNNRPRVMRFVAQAFAGTGVAPVDYVAGVAERIDYWKQKVYAWAKRIRRYKARADRYHVNRTFQTNQRSVYQAWERPQERVTDVHLPNAAVMAEFWRKIWSVPVSHSEGEWFDVVGRSCGPIQEMEPVVISREDLACAVRAAPNWKSPGPDGLHAFWLKRLQGSHSRLATQFQEALQLGSLPSFMTSGVTHLIYKSGSTSEPKNYRPITCLPTVYKLLTSILRIKINNHLKAQHILSPTQNGCKGGSRGTKDLLLIDMAICQQVRRSRKNVSMAWIDYKKAYDSVPHTWLGRVLELDRVHPALCSFLGSCMGQWTTVLRHPGCGGLSGSSDLIKISRGIFQSDSLSPLWFCLALNPLSAILKDSKLGYHLRRESEPISHLLYMDDLKLYASKKTDLMELLKITGNFSNDIGMEFGVDKCAVIHVQRGRVEDSFNLQLSEDISLRSLSEMDSYKYLGMSQALSIAEQDMKQSLKDRFFARLIKVLKSLLSGGNKVRAFNGWVMPVLTYSFGILRWTQSELDALDRKVRRLLTAYRMHHPRSYVMRLYIPRKCGGRGFLNAKTLHNREVCNLRQYFLSVSVVMYRDVAAIDRGLTPLSLANENWRRPQVLSISDRTAIWKGKELHGRFYRALTGPDVDQLASVNWLRFSNLFGETEGFVFAIMDEVIMTNNYRKHILKDGTVDICRACHRPGESIRHVVSGCSRLANGEYLHRHNQVARIIHQQLALKYGLVDSEVPYYQYQPLPVLESGHITLYWDRSIITDRTIVANKPDIVIIDRSMRRVMLVDVTIPHDENLVKAEKEKLSKYLDLAHEVTAMWNVDSTIIIPMVVSVNGLIAKSFDKHLEKLSLGSWVKGLIQKAVMLDTARIVRRFLSLEP

SEQ ID NO: 27675 - protein, 1204 aa, Phalera bucephala
MAEPSRRNPVRLCRQRDARSPSARPTPLPGSPTSPQPSEDEDFFTPPTSGASSNDAGISASPPTSTSARRGRPPLPARLGPAGHCAPPTAPATGGVVRRMRWTPELNLSVMRAYYGATEGGTILTAYRPKLLSLFRGLHPTVAVTAQRLSDQVRAIQRCKLLDDTVLERLHREALPARTESNVRSVEDPISLNNFARSEEVNSEQVSVSDQLQEQVRRALEDAFAEYRSAPIFLRPCLPRLPMHRRNISLVSALDNVLKPHWETSVDLCDTHSILYCGAVAVCRVAGVRFPNLHRATQPTNAKPLWQCRIERRINMARTLIAKLLCFQAGNNRPRVVRFVTQAFAGTRVAPVDYVAGVAERIDYWKQKVYAWAKRIRRYKARADRYHVNRTFQTNQRSVYQAWERPQERVTDVHLPNAAVMAEFWRKIWSVPVTHSEGEWFDVVGRSCGPIQEMEPVVISREDLACAVRAAPNWKSPGPDGLHAFWLKRLQGSHSRLATQFQEALQLGSLPSFMTSGVTHLIHKSGSTSEPKNYRPITCLPTVYKLLTSILRIKINNHLKAQHILSPTQTGCKGGSRGTKDLLLIDIAICQQVRRSRKNVSMAWIDYKKAYDSVPHTWLGRVLELYRVHPALCSFLGSCMGQWTTVLRHPGCGGLSGSSDLIKISRGIFQGDSLSPLWFCLALNPLSAILKDSKLGYHLRRESEPISHLLYMDDLKLYASKKTDLMELLKITGNFSNDIGMEFGVDKCAIIHVQRGRVEDSFNLQLSEDISLRSLSEMDSYKYLGMSQALSIAEQDMKQSLSDRFFARLIKVLKSLLSGGNKVRAFNGWVMPVLTYSFGILRWTQSELDALDRKVRRLLTAYRMHHPRSSVMRLYIPRKCGGRGFLNAKTLHNREVCNLRQYFLSVSVVMYRDVAAIDRGLTPLSLANGNWRRPQVLSTSDRTAIWKGKELHGRFYRALTGPDVDQLASVTWLRFSNLFGETEGFVFAIMDEVIMTNNYRKHILKDGTVDICRACHRPGESIRHVVSGCSRLANGEYLHRHNQVARIIHQQLALKYGLVDSEVPYYQYQPLPVLESGHITLYWDRSVITDRTIVANKPDIVIIDRSMRRVMLVDVTIPHDENLVKVEKEKLSKYLDLAHEVTTMWNVDSTIIIPMVVSVNGLIAKSFDKHLEKLSLGSWVKGLIQKAVMLDTARIVRRFLSLEP

SEQ ID NO: 27676 - protein, 1204 aa, Phalera bucephala
MAEPSRRNPVRLCRQRDARSPSARPTPLPGSPTSPQPSEDEDFFTPPTSGASSDDAGISASPPTLTSARRGRPPLPARLGPAGHCAPPTAPATGGVVRRMRWTPELNLSVMRAYYGATEGGTILTAYRPKLLSLFQGLHPTVAVTAQRLSDQVRAIQRCKLLDDTVLERLRREALPARTDFNVRSVEEPISLNNFARSEEVNSEQVSVSDQLQEQVRRALEDAFAEYRSAPISLRPCLPRLPMHRRNISLVSALDNVLKPHWETSVDLCDTHSILYCGAVAVCRVAGVRFPNLHRATQPTNTKPFWQCRIERRINMARTLIAKLLCFQAGNNRPRVVRFVTQAFADTRVAPVDYVAGVAERIDYWKQKVYAWAKRIRRYKARADRYHVNRTFQTNQRSVYQAWERPQERVTDVHLPNAAVMAEFWRKIWSVPVTHSEGEWFDVVGRSCGPIQEMEPVVISREDLACAVRAAPNWKSPGPDGLHAFWLKRLQGSHSRLATQFQEALQLGSLPSFMTSGVTHLIHKSGSTSEPKNYRPITCLPTVYKLLTSILRIKINNHLKAQHILSPTQNGCRGGSRGTKDLLLIDIAICQQVRRSRKNVSMAWIDYKKAYDSVPHTWLGRVLELYRVHPALCSFLGSCMRQWTTVLRHPGCGGLSGSSDLIKISRGIFQGDSLSPLWFCLALNPLSAILKDSKLGYHLRRESEPISHLLYMDDLKLYASKKTDLMELLKITGNFSNDIGMEFGVDKCAVIHVQRGRVEDSFNLQLSEDISLRSLSEMDSYKYLGMSQALSIAEQDMKQSLKDRFFARLIKVLKSLLSGGNKVRAFNGWVMPVLTYSFGILRWTQSELDALDRKVRRLLTAYRMHHPRSSVMRLYIPRKCGGRGFLNAKTLHNREVCNLRQYFLSVSVVMYRDVAAIDRGLTPLSLANGNWRRPQVLSTSDRTAIWKGKELHGRFYRALTGPDVDQLASVTWLRFSNLFGETEGFVFAIMDEVIMTNNYRKHILKDGTVDICRACHRPGESIRHVVSGCSRLANGEYLHRHNQVARIIHQQLALKYGLVDSEVPYYQYQPLPVLESGHITLYWDRSVITDRTIVANKPDIVIIDRSMRRVMLVDVTIPHDENLVKAEKEKLSKYLDLAHEVTTMWNVNSTIIIPMVVSVNGLIAKSFDKHLEKLSLGSWVKGLIQKAVMLDTARIVRRFLSLEP

SEQ ID NO: 27677 - protein, 1203 aa, Clostera curtula
MERRINPRRQCREPYEANARITSAAVSSNRVQSSDEEYFTPPGTASSSEDEPTPSPSLSRRPARRGRPPLPASLGSTGHRALPKAPATGGVVRRMRWTNNLNESVMRAYYGATDGGTNLTAYRSRLLALFQELHPDVTVTAQRLSDQVRAIQRLNLLEQPVLERLRLETLPPQPVSSVQVTTPTAACLLPPTSVEQLDLGQIEEVSLNDQYNEQLRRILEETIEEYRLIPMTSRPRIPRLPMHKRNMALVSALDSLLMDKLNSVGDLTELHFILYCGAVAVCRVAGVTFPKNSTASRHPECKPAWQYRIEKRITAARTLIAKLYCFMTGNTRPRVMRYVIQAFAGTGVRQCDYAACVTERIDYFKQKVYAWAKRIRRYRERADRFNQNRLFQNDQKIIYRNWERPQPPTADLSTPDADTMLAFWRNIWSRPVDHLEGQWIGVVGRACEQITQMEPVHIELDDVISAIRSAPNWKSPGPDGLHNFWIKKVCSCHARLATLFQAALEAGSLPDFMTTGVTHLIHKSGRISEPTNYRPITCLPTIYKLLTSIIKFKIVNHILANNILASNQNGCNAGSRGTKDLLLIDMAICQQVRRSKKNISMAWIDYKKAYDSVPHSWLMRVLDLYKVDANLCLFLSSCMRQWSTVLYHPGHRHFFEASERIWIKRGIFQGDSLSPLWFCLALNPLSILLNDSMPGYRLHRGGKTISHLLYMDDLKLYAPKQSDLMALLKVTETFSSAISMEFGVDKCAVINVQKGRVVNSENLQLSENVILRSLCESDTYKYLGMSEALGIADSDVKQQLKTRFLGRLTKVLKSLLSGGNKVRAFNCWVIPVIAYSFGILRWTQSELDALDRMVRRQLTAFRMHHPRSSVMRLYIPRRCGGRGFLNVKSLHNREVCNLRDYFLRVDDEMHRDVVKVDSGLTALSMAKQNWRRPQVLSISERKAIWKGKELHGRFYSALTGPEIDQLASVSWLRFGNLFGETEGFVFAIMDEVVKTNNYRKYIIKDGTVDICRACHCPGESIRHVVSGCSRLANGEYLHRHNQVAGIIHQQLALRYGIVESEVPYYQYKPEPVLSNNHVTLYWDRSIVTDRTIMANKPDIVVIDRSTRRAMLIDITIPHDVNLVKAEHVKISKYLDLSHEVGAMWNMDSTIIVPIVISVHGLMAKSFDQHLQKLSLGSWVKSLIQKAVLLDTARIVRRFLTLDP

SEQ ID NO: 27678 - protein, 1204 aa, Phalera bucephala
MAEPSRRNPVRLCRQRDARSPSARPTPLPGSPTSPQPSEDEEFFTPPTSGASSDDAGISASPPTLTSARRGRPPLPARLGPAGHCAPPTAPATGGVVRRMRWTPELNLSVMRAYYGATEGGTILTAYRPKLLSLFQGLHPTVAVTAQRLSDQVRAIQRCKLLDDTVLERLHREALPARTESNVRSVEDPISLNNFARSEEVNSEQVSVSDQLQEQVRRALEDAFAEYRSAPISLRPCLPRLPMHRRNISLVSALDNVLKPHWETSVDLCDTHSILYCGAVAVCRVAGVRFPNLHRATQPTNAKPLWQCRIERRINMARTLIAKLLCFQAGNNRPRVVRFVTQAFAGTRVAPVDYVAGVAERIDYWKQKVYAWAKRIRRYKARADRYHVDRTFQTNQRSVYKAWERPQERVTDVHLPNAAVMAEFWRKIWSVPVTHSEGEWFDVVGRSCGPIQEMEPVVISREDLACAVRAAPNWKSPGPDGLHAFWLKRLQGSHSRLATQFQEALQLGSLPSFMTSGVTHLIHKSGSTSEPKNYRPITCLPTVYKLLTSILRIKINNHLKAQHILSPTQNGCKGGSRGTKDLLLIDIAICQQVRRSRKNVSMAWIDYKKAYDSVPHTWLGRVLELYRVHPALCSFLGSCMRQWTTVLRHPGCGGLSGSSDLIKISRGIFQGDSLSPLWFCLALNPLSGILKDSKLGYHLRRESEPISHLLYMDDLKLYASKKTDLMELLKITGNFSNDIGMEFGVDKCAVIHVQRGRVEDSFNLKLSEDISLRSLSEMDSYKYLGMSQALSIAEQDMKQSLRDRFFARLIKVLKSLLSGGNRVRAFNGWVMPVLTYSFGILRWTQSELDALDRKVRRLLAAYRMHHPRSSVMRLYIPRKCGGRGFLNAKTLHNREVCNLRQYFLSVSVVMYRDVAAIDRGLTPLSLANGNWRRPQVLSTSDRTAIWKGKELHGRFYRALTGPDVDQLASVTWLRFSNLFGETEGFVFAIMDEVIMTNNYRKYILKDGTVDICRACHRPGESIRHVVSGCSRLANGEYLHRHNQVARIIHQQLALKYGLVDSEVPYYQYQPLPVLESGHITLYWDRSVITDRTIVANKPDIVIIDRSMRRVMLVDVTIPHDENLVKAEKEKLSKYLDLAHEVTAMWNVDSTIIIPMVVSVNGLIAKSFDKHLEKLSLGSWVKGLIQKAVMLDTARIVRRFLSLGP

SEQ ID NO: 27679 - protein, 1204 aa, Phalera bucephala
MAEPSRRNPVRLCRQRDARSPSARPTPLPGSPTSPQPSEDEDFFTPPTSGASSDDAGISASPPTLKSARRGRPPLPARLGPAGHCAPPTAPATGGVVRRMRWTPELNLSVMRAYYGATEGGTILTAYRPKLLSLFQGLHPTVAVTAQRLSDQVRAIQRCKLLDDTVLERLHREALPARTESNVRSVEDPISLNNFARSEEVNSEQVSVSDQLQEQVRRALEDAFAEYRSAPISLRPCLPRLPMHRRNISLVSALDNVLKPHWETSVDLCDTHSILYCGAVAVCRVAGVRFPNLHRATQPTNAKPLWQCRIERRINMARTLIAKLLCFQAGNNRPRVVRFVTQAFAGTRVAPVDYVAGVAERIDYWKQKVYAWAKRIRRYKARADRYHVNRTFQTNQRSVYQAWERPQERVTDVHLPNAAVMAEFWRKIWSVPVTHSEGEWFDVVGRSCGPIQEMEPVVISREDLACAVRAAPNWKSPGPDGLHAFWLKRLQGSHSRLATQFQEALQLGSLPSFMTSGVTHLIHKSGSTSEPKNYRPITCLPTVYKLLTSILRIKINNHLKAQHILSPTQNGCKGGSRGTKDLLLIDIAICQQVRRSRKNVSMAWIDYKKAYDSVPHTWLGRVLELYRVHPALCSFLGSCMRQWTTVLRHPGCGGLSGSSDLIKISRGIFQGDSLSPLWFCLALNPLSAILKDSKLGYHLRRESKPISHLLYMDDLKLYASKKTDLMELLKITGNFSNDIGMEFGVDKCAVIHVQRGRVEDSFNLQLSEDISLRSLSEMDSYKYLGMSQALSIAEQDMKQSLRDRFFARLIKVLKSLLSGGNRVRTFNGWVMPVLTYSFGILRWTQSELDALDRKVRRLLTAYRMHHPRSSVMRLYIPRKCGGRGFLNAKTLHNREVCNLRQYFLSVSVVMYRDVAAIDRGLTPLSLANGNWRRPQVLSTSDRTAIWKGKELHGRFYRALTGPDVDQLASVTWLRFSNLFGETEGFVFAIMDEVIMTNNYRKYILKDGTVDICRACHRPGESIRHVVSGCSRLANGEYLHRHNQVARIIHQQLALKYGLVDSEVPYYQYQPLPVLESGHITLYWDRSVITDRTIVANKPDIVIIDRSMRRVMLVDVTIPHDENLVKAEKEKLSKYLDLAHEVTAMWNVDSTIIIPMVVSVNGLIAKSFDKHLEKLSLGSWVKGLIQKAVMLETARIVRRFLSLEP

SEQ ID NO: 27680 - protein, 889 aa, Phalera bucephala
MARTLIAKLLCFQAGNNRPRVVRFVTQAFAGTRVAPVDYVAGVAERIDYWKQKVYAWAKRIRRYKARADRYHVNRTFQTNQRSVYQAWERPQERVTDVHLPNAAVMAEFWRKIWSVPVTHSEGEWFDVVGRSCGPIQEMEPVVISREDLACAVRAAPNWKSPGPDGLHAFWLKRLQGSHSRLATQFQEALQLGSLPSFMTSGVTHLIHKSGSTSEPKNYRPITCLPTVYKLLTSILRIKINNHLKAQHILSPTQTGCKGGSRGTKDLLLIDIAICQQVRRSRKNVSMAWIDYKKAYDSVPHTWLERVLELYRVHPALCSFLGSCMRHRTTVLRHPGCGGLSGSSDLIKISRGIFQGDSLSPLWFCLALNPLSAILKDSKLGYHLRRENEPISHLLYMDDLKLYASKKTDLMELLKITGNFSNDIGMEFGVDKCAVIHVQRGRVEDSFNLQLSEDISLRSLSEMDSYKYLGMSQALSIAEQDMKQSLRDRFFARLIKVLKSLLSGGNKVRAFNGWVMPVLTYSFGILRWTQSELDALDRKVRRLLTAYRMHHPRSSVMRLYIPRKCGGRGFLNAKTLHNREVCNLRQYFLSVSVVMYRDVAAIDRGLTPLSLANGNWRRPQVLSTSDRTAIWKGKELHGRFYRALTGPDVDQLASVTWLRFSNLFGETEGFVFAIMDEVIMTNNYRKHILKDGTVDICRACHRPGESIRHVVSGCSRLANGEYLHRHNQVARIIHQQLALKYGLVDSEVPYYQYQPLPVLESGHITLYWDRSIITDRTIVANKPDIVIIDRSMRRVMLVDVTIPHDENLVKAEKKKLSKYLDLAHEVTTMWNVDSTIIIPMVVSVNGLIAKSFDKHLEKLSLGSWVRGLIQKAVMLDTARIVRRFLSLEP

SEQ ID NO: 27681 - protein, 1204 aa, Phalera bucephala
MAEPSRRNPVRLCRQRDARSPSARPTPLPGSPTSPQPSEDEDFFTPPTSGASSDDAGISASPPTLTSARRGRPPLPARLGPAGHYAPPTAPATGGVVRRMRWTPELNLSVMRAYYGATEGGTILTAYRPKLLSLFQGLHPTVAVTAQRLSDQVRAIQRCKLLDDTVLERLHREALPARTESNVRSVEDPISLNNFARSEEVNSEQVSVSDQLQEQVRRALEDAFAEYRSAPISLRPCLPRLPMHRRNISLVSALDNVLKPHWETSVDLCDTHSILYCGAVAVCRVAGVRFPNLHRATQPTNAKPLWQCRIERRINMARTLIAKLLCFQAGNNRPRVVRFVTQAFAGTRVAPVDYVAGVAERIDYWKQKVYAWAKRIRRYKARADRYHVNRTFQTNQRSVYQAWERPQERVTDVHLPIAAVMAEFWRKIWSVPVTHSEGEWFDVVGRSCGPIQEMEPVVISREDLACAIRAAPNWKSPGPDGLHAFWLKRLQGSHSRLATQFQEALQLGSLPSFMTSGVTHLIHKSGSTSEPKNYRPITCLPSVYKLLTSILRIKINNHLKAQHILSPTQNGCKGGSRGTKDLLLIDIAICQQVRRSRKNVSMAWIDYKKAYDSVPHTWLGRVLELYRVHPALCSFLGSCMRQWTTVLRHPGCGGLSGSSDLIKISRGIFQGDSLSPLWFCLALNPLSAILKDSKLGYHLRRESEPISHLLYMDDLKLYASKKTDLMELLKITGNFSNDIGMELGVDKCAVIHVQRGRVEDSFNLQLSEDISLRSLSEMDSYKYLGMSQALSIAEQDMKQSLRDRFFARLIKVLKSLLSGGNRVRAFNGWVMPVLTYSFGILRWTQSELDALDRKVRRLLTAYRMHHPRSSVMRLYIPRKCGGRGFLNAKTLHNREVCNLRQYFLSVSVVMYRDVAAIDRGLTPLSLANGNWRRPQVLSTSDRTAIWKGKELHGRFYRALTGPDVDQLASVTWLRFSNLFGETEGFVFAIMDEVIMTNNYRKYILKDGTVDICRACHRPGESIRHVVSGCSRLANGEYLHRHNQVARIIHQQLALKYGLVDSEVPYYQYQPLPVLESGHITLYWDRSVITDRTIVANKPDIVIIDRSMRRVMLVDVTIPHDENLVKAEKEKLSKYLDLAHEVTAMWNVDSTIIIPMVVSVNGLIAKSFDKHLEKLSLGSWVKGLIQKAVMLDTARIVRRFLSLEP

SEQ ID NO: 27682 - protein, 962 aa, Phalera bucephala
MHRRNISLVSALDNVLKPHWETSVDLCDTHSILYCGAVAVCRVAGVRFPNLHRATQPTNAKPLWQCRIERRINMARTLIAKLLCFQAGNNRPRVVRFVTQAFAGTRVAPVDYVAGVAERIDYWKQKVYAWAKRIRRYKARADRYHVNRTFQTNQRSVYQAWERPQERVTDVHLPNAAVMAEFWRKIWSVPVTHSEGEWFDVVGRSCGPIQEMEPVVISREDLACAVRAAPNWKSPGPDGLHAFWLKRLQGSHSRLATQFQEALQLGSLPSFMTSGVTHLIHKSGSTSEPKNYRPITCLPTVYKLLTSILRIKINNHLKAQHILSPTQNGCKGGSRGTKDLLLIDIAICQQVRRSRKNVSMAWIDYKKAYDSVPHTWLGRVLELYRVHPALCSFLGSCMGQWTTVLRHPGCGGLSGSSDLIKISRGIFQGDSLSPLWFCLALNPLSAILKDSKLGYHLRRESEPISHLLYMDDLKLYASKKTDLMELLKITGNFSNDIGMEFGVDKCAVIHVQRGRVEDSFNLQLSEDISLRSLSEMDSYKYLGMSQALSIAEQDMKQSLRDRFFARLIKVLKSLLSGGNRVRAFNGWVMPVLTYSFGILRWTQSELDALDRKVRRLLTAYRMHHPRSSVMRLYIPRKCGGRGFLNAKTLHNREVCNLRQYFLSVSVVMYRDVAAIDRGLTPLSLANGNWRRPQVLSTSDRTAIWKGKELHGRFYRALTGPDVDQLASVTWLRFSNLFGETEGFVFAIMDEVIMTNNYRKYILKDGTVDICRACHRPGESIRHVVSGCSRLANGEYLHRHNQVARIIHQQLALKYGLVDSEVPYYQYQPLPVLESGHITLYWDRSVITDRTIVANKPDIVIIDRSMRRVMLVDVTIPHDENLVKAEKEKLSKYLDLAHEVTAMWNVDSTIIIPMVVSVNGLIAKSFDKHLEKLSLGSWVKGLIQKAVMLDTARIVRRFLSLEP

SEQ ID NO: 27683 - protein, 1105 aa, Phalera bucephala
MRWTPELNLSVMRAYYGATEGGTILTAYRPKLLSLFQGLHPTVAVTAQRLSDQVRAIQRCKLLDDTVLERLRREALPARTDSNVRGVEEPISLNNFARSEEVNSEQVSVSDQLQEQVRRALEDAFAEYRSAPISLRPCLPRLPMHRRNISLVSALDNVLKPHWETSVDLCDTHSILYCGAVAVCRVAGVRFPNLHRATQPTNTKPFWQCRIERRINMARTLIAKFLCFQAGNNRPRVMRFVAQAFAGTGVAPVDYVAGVAERIDYWKQKVYAWAKRIRRYKARADRYHVNRTFQTNQRSVYQAWERPQERVSDVHLPNAAVMAEFWRKIWSVPVSHSEGEWFDVVGRSCGPIQEMEPVVISREDLACAVRAAPNWKSPGPDGLHAFWLKRLQGSHSRLATQFQEALQLGSLPSFMTSGVTHLIYKSGSTSEPKNYRPITCLPTVYKLLTSILRIKINNHLKAQHILSPTQNGCKGGSRGTKDLLLIDMAICQQVRRSRKNVSMAWIDYKKAYDSVPHTWLGRVLELYRVHPALCSFLGSCMGQWTTVLRHPGCGGLSGSSDLIKISRGIFQGDSLSPLWFCLALNPLSAILKDSKLGYHLRRESEPISHLLYMDDLKLYASKKTDLMELLKITGNFSNDIGMEFGVDKCAVIHVQRGRVEDSFNLQLSEDISLRSLSEMDSYKYLGMSQALSIAEQDMKQSLKDRFFARLIKVLKSLLSGGNKVRAFNGWVMPVLTYSFGILRWTQSELDALDRKVRRLLTAYRMHHPRSSVMRLYIPRKCGGRGFLNAKTLHNREVCNLRQYFLSVSVVMYRDVAAIDRGLTPLSLANENWRRPQVLSISDRTAIWKGKELHGRFYRALTGPDVDQLASVNWLRFSNLFGETEGFVFAIMDEVIMTNNYRKHILKDGTVDICRACHRPGESIRHVVSGCSRLANGEYLHRHNQVARIIHQQLALKYGLVDSEVPYYQYQPLPVLESGHITLYWDRSIITDRTIVANKPDIVIIDRSMRRVMLVDVTIPHDENLVKAEKEKLSKYLDLAHEVTAMWNVDSTIIIPMVVSVNGLIAKSFDKHLEKLSLGSWVKGLIQKAVMLDTARIVRRFLSLEP

SEQ ID NO: 27684 - protein, 1204 aa, Phalera bucephala
MAEPSRRNPVRLCRQRDARSPSARPTPLPGSPTSPQPSEDEDFFTPPTSGASSDDAGISASPPTLKSARRGRPPLPARLGPAGHCAPPTAPATGGVVRRMRWTPELNLSVMRAYYGATEGGTILTAYRPKLLSLFQGLHPTVAVTAQRLSDQVRAIQRCKLLDDTVLERLHREALPARTESNVRSVEDPISLNNFARSEEVNSEQVSVSDQLQEQVRRALEDAFAEYRSAPISLRPCLPRLPMHRRNISLVSALDNVLKPHWETSVDLCDTHSILYCGAVAVCRVAGVRFPNLHRATQPTNAKPLWQCRIERRINMARTLIAKLLCFQAGNNRPRVVRFVTQAFAGTRVAPVDYVAGVAERIDYWKQKVYAWAKRIRRYKARADRYHVNRTFQTNQRSVYQAWERPQERVTDVHLPNAAVMAEFWRKIWSVPVTHSEGEWFDVVGRSCGPIQEMESVVISREDLACAVRAAPNWKSPGPDGLHAFWLKRLQGSHSRLATQFQEALQLGSLPSFMTSGVTHLIHKSGSTSEPKNYRPITCLPTVYKLLTSILRIKINNHLKAHHILSPTQNGCKGGSRGTKDLLLIDIAICQQVRRSRNNVSMAWIDYKKAYDSVPHTWLGRVLELYRVHPARCSFLGSCMRQWTTVLRHPGCGGLSGSSDLIKISRGIFQGDSLSPLWFCLALNPLSAILKDSKLGYHLRRESEPISHLLYMDDLKLYASKKTDLMELLKITGNFSNDIGMEFGVDKCAVIHVQRGRVEDSFNLQLSEDISLRSLSEMDSYKYLGMSQALSIAEQDMKQSLRDRFFARLIKVLKSLLSGGNRVRAFNGWVMPVLTYSFSILKWTQSELDALDRKVRRLLTAYRMHHPRSSVMRLYIPRKCGGRGFLNAKTLHNREVCNLRQYFLSVSVVMYRDVAAIDRGLTPLSLANGNWRRPQVLSTSDRTAIWKGKELHGRFYRALTGPDVDQLASVTWLRFSNLFGETEGFVFAIMDEVIMTNNYRKYILKDGTVDICRACHRPGESIRHVVSGCSRLANGEYLHRHNQVARIIHQQLALKYGLVDSEVPYYQYQPLPVLESGHITLYWDRSVITDRTIVANKPDIVIIDRSMRRVMLVDVTIPHDENLVKAEKEKLSKYLDLAHEVTAMWNVDSTIIIPMVVSVNGLIAKSFDKHLEKLSLGSWVKALIQKAVMLETARIVRRFLSLEP

SEQ ID NO: 27685 - protein, 1204 aa, Phalera bucephala
MAEPSRRNPVRLCRQRDARSPSARPTPLPGSPTSPQPSEDEDFFTPPTSGASSDDAGISASPPTLTSARRGRPPLPARLGPAGHCAPPTAPATGGVVRRMRRTLELNLSVMRAYYGATEGGTILTAYRPKLLSLFQGLHPTVAVTAQRLSDQVRAIQRCKLLDDTVLERLRREALPARTDFNVRSVEEPISLNNFARSEEVTSEQVSVSDQLQEQVRRALEDAFAEYRSAPISLRPCLPRLPMHRRNISLVSALDNVLKPHWETSVDLCDTHSILYCGAVAVCRVAGVRFPNLHRATQPTNTKPFWQCRIERRINMARTLIAKLLCFQAGNNRPRVVRFVTQAFAGTRVAPVDYVAGVAERIDYWKQKVYAWAKRIRRYKARADRYHVNRTVQTNQRSVYQAWERPQERVTDVHLPNAAVMAEFWRKIWSVPVTHSEGEWFDVVGRSCGPIQEMEPVVISREDLACAVRAAPNWKSPGPDGLHAFWLKRLQGSHSRLATQFQEALQLGSLPSFMTSGVTHLIHKSGSTSEPKNYRPITCLPTVYKLLTSILRIKINNHLKAQHILSPTQNGCKGGSRGTKDLLLIDIAICQQVRRSRKNVSMAWIDYKKAYDSVPHTWLGRVLELYRVHPALCSFLGSCMRQWTTVLRHPGCGGLSGSSDLIKISRGIFQGDSLSPLWFCLALNPLSAILKDSKLGYHLRRESEPISHLLYMDDLKLYASKKTDLMELLKITGNFSNDIGMEFGVDKCAVIHVQRGRVEDSFNLQLSEDISLRSLSEMDSYKYLGMSQALSIAEQDMKQSLKDRFFARLIKVLKSLLSGGNKVRAFNGWVMPVLTYSFGILRWTQSELDALDRKVRRLLTAYRMHHPRSSVMRLYIPRKCGGRGFLNAKTLHNREVCNLRQYFLSVSVVMYRDVAAIDRGLTPLSLANGNWRRPEVLSTSDRTAIWKGKELHGRFYRALTGPDVDQLASVTWLRFSNLFGETEGFVFAIMDEVIMTNNYRKHILKDGTVDICRACHRPGESIRHVVSGCSRLANGEYLHRHNQVARIIHQQLALKYGLVDSEVPYYQYQPLPVLESGHITLYWDRSVITDRTIVANKPYIVIIDRSMRRVMLVDVTIPHDENLVKAEKEKLSKYLDLAHEVTTMWNVNSTIIIPMVVSVNGLIAKSFDKHLEKLSLGSWVKGLIQKAVMLDTARIVRRFLSLEP

SEQ ID NO: 27686 - protein, 1021 aa, Clostera curtula
MKTSCGRTMVLQREALPLLRTVLRCCLYFRRFTQLSLSLHNDWLIRYERSKDSDLSMRPYLNNYVTKYNLLYLNLHVTAVPRDTRTISEPDINMPEPVCINDQDIERLTRTLENVIEQYRVIPIFDRPKLPRLPLNAHNVSIVNAYDNILQTYLDSSTDLTDTYSILYCGAVAACREAGIGVLAPNQNIRPAAAAPRWKLRIERRITAARTIIAKLYCFQAGNVRPRIMRFVNQAFAGTGISSNNYSSHILDRIDFWKQKVYAWAKRIKRYSTTTERYSINKIFQSDQRSVYRKWQNPKSQIPDINLPNIDHMSTFWENIWSNPINYSENEWFDVVIRACENIPEMAPVSITANDVKSAISWAPNWKSPGPDRLHAYWIKSYRSSHERLATQYQQALESGNIPEFMTTGLTHLIHKSGSTSDPKNFRPITCLPIIYKILTSILRTKINAHVTANDILSPTQNGCKAKSRGTKDLLLIDMAISQQVRRNKRNVFMAWIDYKKAYDSVPHSWLKRVLKLYKIHPTLCAFLSSCMEQWSTILLHPGHINSFDSSNLVKIKRGIFQGDSLSPLWFCLALNPLSTLLKCSGLGYRLRKENEAISHLLYMDDLKLYASKKPDLMELLKITDNFSKSIGMEFGVDKCAVLNIQRGRIVNSECLQVSRNVSLRCLSESETYKYLGMSEALGVADADMKQVLKERFYSRLTKVLKSLLSGGNKVRAFNSWVMPVLTYSFGILRWTQTELDAVDRKVRRLLTAYRMHHPRSSVMRMYIPRKCGGRGFLNAKDLHNREIYNLREYFLKVNVDMYQNVVAIDKGLTPLSLATENWMKPKVMSISDRTAIWKDKELHGRFYRALTGSDVDQLASVDWLRFGNLFGETEGFVFAIMDEVMMTNNYRKHILKDGTVDICRACHRPGESIRHIVSGCSRLANGEYLHRHNQVAKIIHQQLAFKYGLVSTEVPYYQYQPQPVLENDHVTLYWDRSIITDRYIAANKPDIVVIDRSTRHVRLVDITIPHDENLVKAEKE

SEQ ID NO: 27687 - protein, 877 aa, Clostera curtula
MTGNTRPRVMRYVIQAFAGTGVRQCDYAACVTERIDYFKQKVYAWAKRIRRYRERADRFNQNRLFQNDQKIIYRNWERPQPPTADLSTPDADTMLAFWRNIWSRPVDHLEGQWIGVVGRACEQITQMDPVHIELDDVISAIRSAPNWKSPGPDGLHNFWFKKVCSCHARLATLFQAALEAGSLPDFMTTGVTHLIHKSGRISEPTNYRPITCLPTIYKLLTSIIKFKIVNHILANNILASNQNGCNAGSWGTKDLLLIDMAICQQVRRSKKNISMAWIDYKKAYDSVPHSWLMRVLDLYKVDANLCLFLSSCMRQWSTVLYHPGHRHFFEASERIWIKRGIFQGDSLSPLWFCLALNPLSILLNDSMPGYRLHRGGKTISHLLYMDDLKLYAPKQSDLMALLKVTETFSSAISMEFGVDKCAVINVQKGRVVNSENLQLSENVILRSLCESDTYKYLGMSEALGIADSDVKQQLKTRFLGRLTKVLKSLLSGGNKVRAFNCWVIPVIAYSFGILRWTQSELDALDRMVRRQLTAFRMHHPRSSVMRLYIPRRCGGRGFLNVKSLHNREVCNLRDYFLRVDDEMHRDVVKVDSGLTALSMAKQNWRRPQVLSISERKAIWKGKELHGRFYSALTGPEIDQLASVSWLRFGNLFGETEGFVFAIMDEVVKTNNYRKYIIKDGTVDICRACHCPGESIRHVVSGCSRLANGEYLHRHNQVAGIIHQQLALRYGIVESEVPYYQYKPEPVLSNNHVTLYWDRSIVTDRTIMANKPDIVVIDRSTRRAMLIDITIPHDVNLVKAEHEKISKYLDLSHEVGAMWNMDSTIIVPIVISVHGLMAKSFDQHLQKLSLGSWVKSLIQKAVLLDTARIVRRFLTLDP

SEQ ID NO: 27688 - protein, 1204 aa, Phalera bucephala
MAEPSRRNPVRLCRQRDARSPSARPTPLPGSPASPQPSEDEDFFTPPTSGASSDDAGISATPPTLTSARRGRPPLPARLGPAGHCAPPTASATGGVVRRMRWTPELNLSVMRAYYGATEGGTILTAYRPKLLSLFQGLHPTVAVTAQRLSDQVRAIQRCKLLDDTVLERLRREALPARTDSNVRGVEEPISLNNFARSEEVNSEQVSVSDQLQEQVRRALEDAFAEYRSAPISLRPCLPRLPMHRRNISLVSALDNVLKPHWETSVDLCDTHSILYCGAVAVCRVAGVRFPNLHRATQPTNTKPFWQCRIERRINMARTLIAKLLCFQAGNNRPRVMRFVAQAFAGTGVAPVDYVAGVAERIDYWKQKVYAWAKRIHRYKARADRYHVNRTFQTNQRSVYQAWERPQERVSDVNLPNAAVMAEFWRKIWSVPVSHSEGEWFDVVGRSCGPIQEMEPVVISREDLACAVRAAPNWKSPGPDGLHAFWLKRLQGSHSRLATQFQEALQLGSLPSFMTSGVTHLIHKSGSTSEPKNYRPITCLPTVYKLLTSILRIKINNHLKAQHILSPTQNGCKGGSRGTKDLLLIDMAICQQVRRSRKNVSMAWIDYKKAYDSVPRTWLGRVLELYRVHPALCSFLGSCMGQWTTVLRHPGCGGLSGSSDLIKISRGIFQGDSLSPLWFCLALNPLSAILKDSKLGYHLRRESEPISHLLYMDDLKLYASKKTHLMELLKITGNFSNDIGMEFGVDKCTVIHVQRGRVEDSFNLQLSEDISLRSLSEMDSYKYLGMSQALSIAEQDMKQSLRDRFFARLIKVLKSLLSGGNKVRAFNGWVMPVLTYTFGILRWTQSELDALDRKVRRLLTAYRMHHPRSSVMRLYIPRKCGGRGFLNAKTLHNREVCNLRQYFLSVSVVMYRDVAAIDRGLTPLSLANGNWRRPQVLSTSDRTAIWKGKELHGRFYRALTGPDVDQLASVNWLRFSNLFGETEGFVFAIMDEVIMTNNYRKHILKDGTVDICRACHRPGESIRHVVSGCSRLAYGEYLHRHNQVARIIHQQLALKYGLVDSEVPYYQYQPLPVLESGHITLYWDRSIITDRTIVANKPDIVIIDRSMRRVMLVDVTIPHDENLVKAEKEKLSKYLDLAHEVTAMWNVDSTIIIPMVVSVNGLIAKSFDKHLEKLSLGSWVKGLIQKAVMLDTARIVRRFLSLEP

SEQ ID NO: 27689 - protein, 1204 aa, Phalera bucephala
MAEPSRRNPVRLCRQRDARSPSARPTPLPGSPTSPQPSEDEDFFTPPTSGASSDDAGISASPPTITSARRGRPPLPARLGPAGHCAPPTAPATGGVVRRMRWTPELNLSVMRAYYGATEGGTILTAYRPKLLSLFQGLHPTVAVTAQRLSDQVRAIQRCKLLDDTVLERLHREALPARTESNVRSVEDPISLNNFARSEEVNSEQVSVSDQLQEQVRRALEDAFAEYRSAPISLRPCLPRLPMHRRNISLVSALDNVLKPHWETSVDLCDTHSILYCGAVAVCRVAGVRFPNLHRATQPTNAKPLWQCRIERRINMARTLIAKLLCFQAGNNRPRVVRFVTQAFAGTRVAPVDYVAGVAERIDYWKQKVYAWAKRIRRYKARADRYHVNRTFQTNQRSVYQAWERPQERVTDVHLPNAAVMAEFWRKIWSVPVTHSEGEWFDVVGRSCGPIQEMEPVVISREDLACAVRAAPNWKSPGPDGLHAFWLKRLQGSHSRLATQFQEALQLGSLPSFMTSGVTHLIHKSGSTSEPKNYRPITCLPTVYKLLTSILRIKINNHLKAQHILSPTQNGCKGGSRGTKDLLLIDIAICQQVRRSRKNVSMAWIDYKKAYDSVPHTWLGRVLELYRVHPALCSFLGSCMRQWTTVLRHPGCGGLSGSSDLIKISRGIFQGDSLSPLWFCLALNPLSAILKDSKLGYHLRRESEPISHLLYMDDLKLYASKKTDLMELLKITDNFSNDIGMEFGVDKCAVIHVQRGRVEDSFNLQLSEDISLRSLSEMDSYKYLGMSQALSIAEQDMKQSLRDRFFARLIKVLKSLLSGGNRVRAFNGWVMPVLTYSFGILRWTQSELDALDRKVRRLLTAYRMHHPRSSVMRLYIPRKCGGRGFLNAKTLHNREVCNLRQYFLSVSVVMYRDVAAIDRGLTPLSLANGNWRRPQVLSTSDRTAIWKGKELHGRFYRALTGPDVDQLASVTWLRFSNLFGETEGFVFAIMDEVIMTNNYRKYILKDGTVDICRACHRPGESIRHVVSGCSRLANGEYLHRHNQVARIIHQQLALKYGLVDSEVPYYQYQPLPVLESGHITLYWDRSVITDRTIVANKPDIVIIDRSMRRVMLVDVTIPHDENLVKAEKEKLSKYLDLAHEVTAMWNVDSTIIIPMVVSVNGLIAKSFDKHLEKLSLGSWVKGLIQKAVMLDTARIVRRFLSLEP

SEQ ID NO: 27690 - protein, 1204 aa, Phalera bucephala
MAEYPRRNPVRRCRQRIAQGHSARPSPLRGSPNSPQSSENELYFTPPTSGASSDETEPPASSHPLRPERRGRPPLPACIGPAEHCAPPTAPATGGVVRRMRWTSELNMSVMRAYYGATKGETILTAYRPKLLSLFQELHPTVAVTAQRLSDQVRAIQRCKLLDDTVLERLRSETCPARTESDLRSFEEPISLDSFARSEEVNSGQVSVGDQLQEQVRRALKDAFAEYRSAPISLRPCLPRLPMHRHNISLVGALDNVLKSHWETSVDLCDTHSILYCGAVAVCRVAGVRFPNLHRATQPTNAKPFWQCRIERRINMARTLIAKLLCFQAGNNRPRVVRFVAQAFAGTGVAPVDYMARVTERIDYWKQKVYAWANRIRRYRERADRYHVNRTFEVNQRSVYQAWERPQERVTDVHLPDAATMAEFWRKIWSVPVSHSEGEWFDVVGRSCEPIQEMEPVVITRDDVACAVSAAPNWKSPGPDGLHAFWLKRLQGSHARLATQFQEALELGSLPSLLTTGVTHLIHKSGSTLEPKNYRPITCLPTVYKLLTSILRTKINNHLKAQHILSPTQNGCKGGSRGTKDLLLIDMAICQQVRRSRKNVSMAWIDYKKAYDSVPHTWLRRVLELYKVHPALCSFLGLCMGQWTTVLRHPGYGGLSGSSDLIKISRGIFQGDSLSPLWFCLALNPLSAILKNSKLGYHLRRGSEPISHLLYMDDLKLYASKKTDLMELLKITGNFSNDIGMEFGVDKCAVIHVQRGRVEDSFNLQLSEDISLRSLSEMDSYKYLGMSQALSIAEQDMKQSLKDRFFARLMKVLKSLLSGGNRVRAFNGWVMPVLTYSFGILRWTQSELDALDRKVRRLLTAYRMHHPRSSVMRLYIPRRCGGRGFLNAKTLHNREVCNLRQYFLSVSVVMYRDVAAIDRGLTPLSLANGNWRRPQVLSISDRTAIWKGKELHGRFYRALTGPDVDQLASVTWLRFSNLFGETEGFVFAIMDEVIMTNNYRKHILKDGTVDICRACHRPGESIRHVVSGCSRLANGEYLHRHNQVAKIIHQQLALKYDLVDSEVPYYQYQPLPVLESGHITLYWDRSIITDRTIVANKPDIVIIDRSMRRVMLVDVTIPHDENLVKAEKEKISKYLDLAHEVTAMWYVDSTIIIPMVVSVNGLIAKSFDKHLEKLSLGSWVKGLIQKVVVLDTARIVRRFLSLEP

SEQ ID NO: 27691 - protein, 1204 aa, Phalera bucephala
MAEPSRRNPVRLCRQRDARSPSARPTPLPGSPTSPQPSEDEDFFTPPTSGASSDDAGISASPPTLKSARRGRPPLPARLGPAGHCAPPTAPATGGVVRRMRWTPELNLSVMRAYYGATEGGTILTAYRPKLLSLFQGLHPTVAVTAQRLSDQVRAIQRCKLLDDTVLERLHREALPARTESNVRSVEDPISLNNFARSEEVNSEQVSVSDQLQEQVRRALEDAFAEYRSAPISLRPCLPRLPMHRRNISLVSALDNVLKPHWETSVDLCDTHSILYCGAVAVCRVAGVRFPNLHRATQPTNAKPLWQCRIERRINMARTLIAKLLCFQAGNNRPRVVRFVTQAFAGTRVAPVDYVAGVAERIDYWKQKVYAWAKRIRRYKARADRYHVNRTFQTNQRSVYQAWERPQERVTDVHLPNAAVMAEFWRKIWSVPVTHSEGEWFDVVGRSCGPIQEMEPVVISREDLACAVRAAPNWKSPGPDGLHAFWLKRLQGSHSRLATQFQEALQLGSLPSFMTSGVTHLIHKSGSTSEPKNYRPITCLPTVYKLLTSILRIKINNHLKAQHILSPTQNGCKGGSRGIKDLLLIDIAICQQVRRSRKNVSMAWIDYKKAYDSVPHTWLGRVLELYRVHPALCSFLGSCMRQWTTVLRHPGCGGLSGSSDLIKISRGIFQGDSLSPLWFCLALNPLSAILKDSKLGYHLRRESEPISHLLYMDDLKLYASKKTDLMELLKITGNFSNDIGMEFGVDKCAVIHVQRGRVEDSFNLQLSEDISLRSLSEMDSFKYLGMSQALSIAEQDMKQSLRDRFFARLIKVLKSLLSGGNRVRAFNGWVMPVLTYSFGILRWTQSELDALDRKVRRLLTAYRMHHPRSSVMRLYIPRKCGGRGFLNAKTLHNREVCNLRQYFLSVSVVMYRDVAAIDRGLTPLSLANGNWRRPQVLSTSDRTAIWKGKELHGRFYRALTGPDEDQLASVTWLRFSNLFGETEGFVFAIMDEVIMTNNYRKYILKDGTVDICRACHRPGESIRHVVSGCSRLANGEYLHRHNQVARIIHQQLALKYGLVDSEVPYYQYQPLPVLESGHITLYWDRSVITDRTIVANKPDIVIIDRSMRRVMLVDVTIPHDENLVKAEKEKLSKYLDLAHEVTAMWNVDSTIIIPMVVSVNGLIAKSFDKHLEKLSLGSWVKGLIQKAVMLETARIVRRFLSLEP

SEQ ID NO: 27692 - protein, 1204 aa, Phalera bucephala
MAEYPRRNPVRRCRQRIAQGHSARPSPLRGSPNSPQSSENELYFTPPTSGASSDETEPPASSHPLRPERRRRPPLPACIGPAEHCAPPTAPATGGVVRRMRWTSELNMSVMRAYYGATKGETILTAYRPKLLSLFQELHPTVAVTAQRLSDQVRAIQRCKLLDDTVLERLRSETCPARTESDLRSFEEPISLDNFARSEEVNSGQVSVGDQLQEQVRRALKDAFAEYRSAPISLRPCLPRLPMYRHNISLVGALDNVLKSHWETSVDLCDTHSILYCGAVAVCRVAGVRFPNLHRATQPTNAKPFWQCRIERRINMARTLIAKLLCFQAGNNRPRVVRFVAQAFAGTGVAPVDCMARVTERIDYWKQKVYAWANRIRRYRERADRYHVNRTFEVNQKSLYQAWERPQERVTDVHLPDAATMAEFWRKIWSVPVSHSEGEWFDVVGRSCEPIQEMEPVVITRDDVACAVRAAPNWKSPGPDGLHAFWLKRLQGSHARLATQFQEALELGSLPSLLTTGVTHLIHKSGSTLEPKNYRPITCLPTVYKLLTSILRTKINNHLKAQHILSPTQNGCKGGSRGTKDLLLIDMAICQQVRRSRKKVSMAWIDYKKAYDSVPHTWLGRVLELYKVHPALCSFLGLCMGQWTTVLRHPGYGGLSGSSDLIKISRGIFQGDSLSPLWFCLALNPLSAILKNSKLGYHLRRRSEPISHLLYMDDLKLYASKKTDLMELLKITGNFSNDIGMEFGVDKCAVIHVQRGRVEDSFNLQLSEDISLRSLSEMDSYKYLGMSQALSIAEQDMKQSLKDRFFARLMKVLKSLLSGGNKVRAFNGWVMPVLTYSFGILRWTQSELDALDRKVRRLLTAYRMHHPRSSVMRLYIPRRCGGRGFLNAKTLHNREVCNLRQYFLSVSVVMYRDVAAIDRGLTPLSLANGNWRRPQVLSISDRTAIWKGKELHGRFYRALTGPDVDQLASVTWLRFSNLFGETEGFVFAIMDEVIMTNNYRKHILKDGTVDICRACHRPGESIRHVVSGCSRLANGEYLHRHNQVAKIIHQQLALKYDLVDSEVPYYQYQPLPVLESGHITLYWDRSIITDRTIVANKPDIVIIDRSMRRVMLVDVTIPHDENLVKAEKEKISKYLDLAHEVTAMWNVDSTIIIPMVVSVNGLIAKSFDKHLEKLSLGSWVKGLIQKVVVLDTARIVRRFLSLEP

SEQ ID NO: 27693 - protein, 1204 aa, Phalera bucephala
MAEPSRRNPVRLCRQRDARSPSARPTPLPGSPTSPQPSEDEDFFTPPTSGASSDDAGISASPPTLTSARRGRPPLPARLGPAGHCAPPTAPATGGVVRRMRWTPELNLSIMRAYYGATEGGTILTAYRPKLLSLFQGLHPTVAVTAQRLSDQVRAIQRCKLLDDTVLERLHRETLPARTESNVRSVEDPISLNNFARSEEVNSEQVSVSDQLQEQVRRALEDAFAEYRSAPISLRPCLPRLPMHRRNISLVSALDNVLKPHWETSVDLCDTHSILYCGAVAVCRVAGVRFPNLHRATQPTNAKPLWQCRIERRINMARTLIAKLLCFQAGNNRPRVVRFVTQAFAGTRVAPVDYVAGVAERIDYWKQKVYAWAKRIRRYKARADRYHVNRTFQTNQRSVYQAWERPQERVTDVHLPNAAVMAEFWRKIWSVPVTHSEGEWFDVVGRSCGPIQEMEPVVISREDLACAVRAAPNWKSPGPDGLHAFWLKRLQGSHSRLATQFQEALQLGSLPSFMTSGVTHLIHKSGSTSEPKNYRPITCLPTVYKLLTSILRIKINNHLKAQHILSPTQNGCKGGSRGTKDLLLIDIAICQQVRRSRKNVSMAWIDYKKAYDSVPHTWLGRVLELYRVHPALCSFLGSCMRQWTTVLRHPGCGGLSGSSDLIKISRGIFQGDSLSPLWFCLALNPLSAILKDSKLGYHLRRESEPISHLLYMDDLKLYASKKTDLMELLKITGNFSNDIGMEFGVDKCAVIHVQRGRVEDSFNLQLSEDISLRSLSEMDSYKYLGMSQALSIAEQDMKQSLRDRFFARLIKVLKSLLSGGNRVRAFNGWVMPVLTYSFGILRWTQSELDALDRKVRRLLTAYRMHHPRSSVMRLYIPRKCGGRGFLNAKTLHNREVCNLRQYFLSVSVVMYRDVAAIDRGLTPLSLANGNWRRPQVLSTSDRTAIWKGKELHGRFYRALTGPDVDQLASVTWLRFSNLFGETEGFVFAIMDEVIMTNNYRKYILKDGTVDICRACHRPGESIRHVVSGCSRLANGEYLHRHNQVARIIHQQLALKYGLVDSEVPYYQYQPLPVLESGHITLYWDRSVITDRTIVANKPDIVIIDRSMRRVMLVDVTIPHDENLVKAEKEKLSKYLDLAHEVTAMWNVDSTIIIPMVVSVNGLIAKSFDKHLEKLSLGSWVKGLIQKAVMLDTARIVRRFLSLEP

SEQ ID NO: 27694 - protein, 1204 aa, Phalera bucephala
MAEPSRRNPVRLCRQRDARSPSARPTPLPGSPTSPQPSEDEDFFTPPTSGASSDDAGISASPPTSTSARRGRPPLPARLGPAGHCAPPTAPATGGVVRRMRWTPELNLSVMRAYYGATEGGTILTAYRPKLLSLFQGLHPTVAVTAQRLSDQVRAIQRCKLLDDTVLERLHREALPARTESNVRSVEEPISLNNFARSEEVNSEQVSVSDQLQEQVRRALEDAFAEYRSAPISLRPCLPRLPMHRRNISLVSALDNVLKPHWETSVDLCDTHSILYCGAVAVCRVAGVRFPNLHRATQPTNTKPFWQCRIERRINMARTLIAKLLCFQAGNNRPRVMRFVAQAFAGTGVASVDYVAEVAERIDYWKQKVYAWAKRIRRYKARADRYHVNRTFQTNQRSVYQAWERPQERVTDVHLPNAAVMAEFWRKIWSVPVSHSEGEWFDVVGRSCGPIQEMEPVVISREDLACAVRAAPNWKSPGPDGLHAFWLKRLQGSHSRLATQFQEALQLGSLPSFMTSGVTHLIYKSGSTSEPKNYRPITCLPTVYKLLTSILRIKINNHLKAQHILSPTQNGCKGGSRGTKDLLLIDMAICQQVRRSRKNVSMAWIDYKKAYDSVPHTWLGRVLELYRVHPALCSFLGSCMGQWTTVLRHPGCGGLSGSSDLIKISRGIFQGDSLSPLWFCLALNPLSAILKDSKLGYHLRRESEPISHLLYMDDLKLYASKKTDLMELLKITGNFSNDIEMEFGVDKCAVIHVQRGRVEDSFNLQLSEDISLRSLSEMDSYKYLGMSQALSIAEQDMKQSLKDRFFARLIKVLKSLLSGGNRVRAFNGWVMPVLTYSFGILRWTQSELDALDRKVRRLLTAYRMHHPRSSVMRLYIPRKCGGRGFLNAKTLHNREVCNLRQYFLSVSVVMYRDVAAIDRGLTPLSLANENWRRPQVLSISDRTAIWKGKELHGRFYRALTGPDVDQLASVNWLRFSNLFGETEGFVFAIMDEVIMTNNYRKHILKDGTVDICRACHRPGESIRHVVSGCSRLANGEYLHRHNQVARIIHQQLALKYGLVDSEVPYYQYQPLPVLESGHITLYWDRSIITDRTIVANKPDIVIIDRSMRRVMLVDVTIPHDENLVKAEKEKLSKYLDLAHEVTAMWNVDSTIIIPMVVSVNGLIAKSFDKHLEKLSLGSWVKGLIQKAVMLDTARIVRRFLSLEP

SEQ ID NO: 27695 - protein, 877 aa, Clostera curtula
MTGNTRPRVMRYVIQAFAGTGVRQCDYAACVTERIDYFKQKVYAWAKRIRRYRERADRFNQNRLFQNDQKIIYRNWERPQPPTADLSTPDADTMLAFWRNIWSRPVDHLEGQWIGVVGRACEQITQMEPVHIELDDVISAIRSAPNWKSPGPDGLHNFWIKKVCSCHARLATLFQAALEAGSLPDFMTTGVTHLIHKSGRISEPTNYRPITCLPTIYKLLTSIIKFKIVNHILANNILASNQNGCNAGSRGTKDLLLIDMAICQQVRRSKKNISMAWIDYKKAYDSVPHSWLMRVLDLYKVDANLCLFLSSCMRQWSTVLYHPGHRHFFEASERIWIKRGIFQGDSLSPLWFCLALNPLSILLNDSMPGYRLHRGGKTISHLLYMDDLKLYAPKQSDLMALLKVTETFSSAISMEFGVDKCAVINVQKGRVVNSENLQLSENVILRSLCESDTYKYLGMSEALGIADSDVKQQLKTRFLGRLTKVLKSLLSGGNKVRAFNCWVIPVIAYSFGILRWTQSELDALDRMVRRQLTAFRMHHPRSSVMRLYIPRRCGGRGFLNVKSLHNREVCNLRDYFLRVDDEMHRDVVKVDSGLTALSMAKQNWRRPQVLSISERKAIWKGKELHGRFYSALTGPEIDQLASVSWLRFGNLFGETEGFVFAIMDEVVKTNNYRKYIIKDGTIDICRACHCPGESIRHVVSGCSRLANGEYLHRHNQVAGIIHQQLALRYGIVESEVPYYQYKPEPVLSNNHVTLYWDRSIVTDRTIMANKPDIVVIDRSTRRAMLIDITIPHDVNLVKAEHEKISKYLDLSHEVGAMWNMDSTIIVPIVISVHGLMAKSFDQHLQKLSLGSWVKSLIQKAVLLDTARIVRRFLTLDP

SEQ ID NO: 27696 - protein, 889 aa, Phalera bucephala
MARTLIAKLLCFQAGNNRPRVVRFVTQAFAGTRVAPVDYVAGVAERIDYWKQKVYAWAKRIRRYKARADRYHVNRTFQTNQRSVYQAWERPQERVTDVHLPNAAVMAEFWRKIWSVPVTHSEGEWFDVVGRSCGPIQEMEPVVISREDLACAVRAAPNWKSPGPDGLHAFWLKRLQGSHSRLATQFQEALQLGSLPSFMTSGVTHLIHKSGSTSEPKNYRPITCLPTVYKLLTSILRIKINNHLKAQHILSPTQNGCKGGSRGTKDLLLIDIAICQQVRRSRKNVSMAWIDYKKAYDSVPHTWLGRVLELYRVHPALCSFLGSCMRQWTTVLRHPGCGGLSGSSDLIKISRGIFQGDSLSPLWFCLALNPLSAILKDSKLGYHLRRESEPISHLLYMDDLKLYASKKTDLMELLKITGNFSNDIGMEFGVDKCAVIHVQRGRVEDSFNLQLSEDISLRSLSEMDSYKYLGMSQALSIAEQDMKQSLRDRFFARLIKVLKSLLSGGNRVRAFNGWVMPVLTYSFGILRWTQSELDALDRKVRRLLTAYRMHHPRSSVMRLYIPRKCGGRGFLNAKTLHNREVCNLRQYFLSVSVVMYRDVAAIDRGLTPLSLANGNWRRPQVLSTSDRTAIWKGKELHGRFYRALTGPDVDQLASVTWLRFRNLFGETEGFVFAIMDEVIMTNNYRKYILKDGTVDICRACHRPGESIRHVVSGCSRLANGEYLHRHNQVARIIHQQLALKYGLVDSEVPYYQYQPLPVLESGHITLYWDRSVITDRTIVANKPDIVIIDRSMRRVMLVDVTIPHDENLVKAEKEKLSKYLDLAHEVTAMWNVDSTIIIPMVVSVNGLIAKSFDKHLEKLSLGSWVKGLIQKAVMLDTARIVRRFLSLEP

SEQ ID NO: 27697 - protein, 1204 aa, Phalera bucephala
MAEPSRRNPVRLCRQRDARSPSARPTPLPGSPTSPQPLEDEDFFTPPTSGASSDDAGISASPPTLTSARRGRPPLPARLGPAGHCAPPTAPATGGVVRRMRWTPELNLSVMRAYYGATEGGTILTAYRPKLLSLFQGLHPTVAVTAQRLSDQVRAIQRCKLLDDTVLERLHREALPARTESNVRSVEDPISLNNFARSEEVNSEQVSVSDQLQEQVRRALEDAFAEYRSAPISLRPCLPRLPMHRRNISLVSALDNVLKPHWETSVDLCDTHSILYCGAVAVCRVAGVRFPNLHRATQPTNAKPLWQCRIERRINMARTLIAKLLCFQAGNNRPRVVRFVTQAFAGTRVAPVDYVAGVAERIDYWKQKVYAWAKRIRRYKARADRYHVNRTFQTNQRSVYQAWERPQERVTDVHLPNAAVMAEFWRKIWSVPVTHSEGEWFDVVGRSCGPIQEMEPVVISREDLACAVRAAPNWKSPGPDGLHAFWLKRLQGSHSRLATQFQEALQLGSLPSFMTSGVTHLIHKSGSTSEPKNYRPITCLPTVYKLLTSILRIKINNHLKAQHILSPTQNGCKGGSRGTKDLLLIDIAICQQVRRSRKNVSMAWIDYKKAYDSVPHTWLGRVLELYRVHPALCSFLGSCMRQWTTVLRHPGCGGLSGSSDLIKISRGIFQGDSLSPLWFCLALNPLSAILKDSKLGYHLRRGSEPISHLLYMDDLKLYASKKTDLMELLKITGNFSNDIGMEFGVDKCAVIHVQRGRVEDSFNLQLSEDISLRSLSEMDSYKYLGMSQALSIAEQDMKQSLRDRFFARLIKVLKSLLSGGNRVRAFNGWVMPVLTYSFGILRWTQSELDALDRKVRRLLTAYRMHHPRSSVMRLYIPRKCGGRGFLNAKTLHNREVCNLRQYFLSVSVVMYRDVAAIDRGLTPLSLTNGNWRRPQVLSTSDHTAIWKGKELHGRFYRALTGPDVDQLASVTWLRFSNLFGETEGFVFAIMDEVIMTNNYRKYILKDGTVDICRACHRPGESIRHVVSGCSRLANGEYLHRHNQVARIIHQQLALKYGLVDSEVPYYQYQPLPVLESGHITLYWDRSVITDRTIVANKPDIVIIDRSMRRVMLVDVTIPHDENLVKAEKEKISKYLDLAHEVTAMWNVDSTIIIPMVVSVNGLIAKSFDKHLEKLSLGSWVKGLIQKAVMLDTARIVRRFLSLEP

SEQ ID NO: 27698 - protein, 962 aa, Phalera bucephala
MHRHNISLVGALDNVLKSHWETSVDLCDTHSILYCGAVAVCRVAGVRFPNLHRATQPTNAKPFWQCRIERRINMARTLIAKLLCFQAGNNRPRVVRFVAQAFAGTGVAPVDYMARVTERIDYWKQKVYAWANRIRRYRERADRYHVNRTFEVNQRSVYQAWERPQERVTDVHLPDAATMAEFWRKIWSVPVSHSEGEWFDVVGRSCEPIQEMEPVVITRDDVACAVRAAPNWKSPGPDGLHAFWLKRLQGSHARLATQFQEALELGSLPSLLTTGVTHLIHKSGSTLEPKNYRPITCLPTVYKLLTSILRTKINNHLKAQHILSPTQNGCKGGSRGTKDLLLIDMTICQQVRRSRKNVSMAWIDYKKAYDSVPHTWLRRVLELYKVHPALCSFLGLCMGQWTTVLRHPGYGGLSGSSDLIKISRGIFQGDSLSPLWFCLALNPLSAILKNSKLGYHLRRGSEPISHLLYMDDLKLYASKKTDLMELLTITGNFSNDIGMEFGVDKCAVIHVQRGRVEDSFNLQLSEDISLRSLSEMDSYKYLGMSQALSIAEQDMKQSLKDRFFARLMKVLKSLLSGGNRVRAFNGWVMPVLTYSFGILRWTQSELDALDRKVRRLLTAYRMHHPRSSVMRLYIPRRCGGRGFLNAKTLHNREVCNLRQYFLSVSVVMYRDVAAIDRGLTPLSLANGNWRRPQVLSISDRTAIWKGKELHGRFYRALTGPDVDQLASVTWLRFSNLFGETEGFVFAIMDEVIMTNNYRKHILKDGTVDICRACHRPGESIRHVVSGCSRLANGEYLHRHNQVAKIIHQQLALKYDLVDSEVPYYQYQPLPVLESGHITLYWDRSIITDRTIVANKPDIVIIDRSMRRVMLVDVTIPHDENLVKAEKEKISKYLDLAHEVTAMWNVDSTIIIPMVVSVNGLIAKSFDKHLEKLSLGSWVKGLIQKVVVLDTARIVRRFLSLEP

SEQ ID NO: 27699 - protein, 1204 aa, Phalera bucephala
MAEPSRRNPVRLCRQRDARSPSARPTPLPGSPTSPQPSEDEDFFTPPTSGASSDDAGISASPPTLTSARRGRPPLPARLGPAGHCAPPTAPATGGVVRRMRWTPELNLSVMRAYYGATEGGTILTAYRPKLLSLFQGLHPTVAVTAQRLSDQVRAIQRCKLLDDTVLERLHREALPARTESNVRSVEDPISLNNFARSEEVNSEQVSVSDQLQEQVRRALEDAFAEYRSAPISLRPCLPRLPMHRRNISLVSALDNVLKPHWETSVDLCDTHSILYCGAVAVCRVAGVRFPNLHRATQPTNTKPFWQCRIERRINMARTLIAKLLCFQAGNNRPRVMRFVAQAFAGTGVAPVDYVAGVAERIEYWKQKVYAWAKRIRRYKARADRYHVNRTFQTNQRSVYQAWERPQERVTDVHLPNAAVMAEFWRKIWSVPVTHSEGEWFDVVGRSCGPIQEMEPVVISREDLACAVRAAPNWKSPGPDGLHAFWLKRLQGSHSRLATQFQEALQLGSLPSFMTSGVTHLIHKSGSTSEPKNYRPITCLPTVYKLLTSILRIKINNHLKAQHILSPTQTGCKGGSRGTKDLLLIDIAICQQVRRSRKNVSMAWIDYKKAYDSVPHTWLGRVLELYRVHPALCSFLGSCMRQWTTVLRHPGCGGLSGSSDLIKISRGIFQGDSLSPLWFCLALNPLSAILKDSKLGYHLRRESEPISHLLYMDDLKLYASKKTDLMELLKITGNFSNDIGMEFGVDKCAVIHVQRGRVEDSFNLQLSEDISLRSLSEMDSYKYLGMSQALSIAEQDMKQSLRDRFFARLIKVLKSLLSGGNRVRAFNGWVMPVLTYSFGILRWTQSELDALDRKVRRLLTAYRMHHPRSSVMRLYIPRKCGGRGFLNAKTLHNREVCNLRQYFLSVSVVMYRDVAAIDRGLTPLSLANGNWRRPQVLSTSDRTAIWKGKELHGRFYRALTGPDVDQLASVTWLRFSNLFGETEGFVFAIMDEVIMTNNYRKHILKDGTVDICRACHRPGESIRHVVSGCSRLANGEYLHRHNQVARIIHQQLALKYGLVDSEVPYYQYQPLPVLESGHITLYWDRSVITDRTIVANKPDIVIIDRSMRRVMLVDVTIPHDENLVKAEKEKLSKYLDLAHEVTAMWNVDSTIIIPMVVSVNGLIAKSFDKHLEKLSLGSWVKGLIQKTVMLDTARIVRRFLSLEP

SEQ ID NO: 27700 - protein, 1204 aa, Phalera bucephala
MAEPSRRNPVRLCRQRDARSPSARPTPLPGSPTSPQPSEDEDFFTPPTSGASSDDAGISASPPTLTSARRGRPPLPARLGPAGHCAPPTAPATGGVVRRMRWTPELNLSVMRAYYGATEGGTILTAYRPKLLSLFQGLHPTVVVTAQRLSDQVRAIQRCKLLDDTVLERLHREALPARTESNVRSVEDPISLNNFARSEEVNSEQVSVSDQLQEQVRRALEDAFAEYRSAPISLRPCLPRLPMHRRNISLVSALDNVLKPHWETSVDLCDTHSILYCGAVAVCRVAGVRFPNLHRATQPTNAKPLWQCRIERRINMARTLIAKLLCFQAGNNRPRVVRFVTQAFAGTRVAPVDYVAGVAERIDYWKQKVYAWAKRIRRYKARADRYHVNRTFQTNQRSVYQAWERPQERVTDVHLPNAAVMAEFWRKIWSVPVTHSEGEWFDVVGRSCGPIQEMEPVVISREDLACAVRAAPNWKSPGPDGLHAFWLKRLQGSHSRLATQFQEALQLGSLPSFMTSGVTHLIHKSGSTSEPKNYRPITCLPTVYKLLTSILRIKINNHLKAQHILSPTQTGCKGGSRGTKDLLLIDIAICQQVRRSRKNVSMAWIDYKKAYDSVPHTWLGRVLELYRVHPALCSFLGSCMRQWTTVLRHPGCGGLSGSSDLIKISRGIFQGDSLSPLWFCLALNPLSALLKDSKLGYHLRRESEPISHLLYMDDLKLYASKKTDLMELLKITGNFSNDIGMEFGVDKCAVIHVQRGRVEDSFNLQLSEDISLRSLSEMDSYKYLGMSQALSIAEQDMKQSLRDRFFARLIKVLKSLLSGGNKVRAFNGWVMPVLTYSFGILRWTQSELDALDRKVRRLLTAYRMHHPRSSVMRLYIPRKCGGRGFLNAKTLHNREVCNLRQYFLSVSVVMYRDVAAIDRGLTPLSLANGNSRRPQVLSTSDRTAIWKGKELHGRFYRALTGPDVDQLASVTWLRFSNLFGETEGFVFAIMDEVIMTNNYRKHILKDGTVDICRACHRPGESIRHVVSGCSRLANGEYLHRHNQVARIIHQQLALKYGLVDSEVPYYQYQPLPVLESGHITLYWDRSVITDRTIVANKPDIVIIDRSMRRLMLVDVTIPHDENLVKAEKEKLSKYLDLAHEVTTMWNVDSTIIIPMVVSVNGLIAKSFDKHLEKLSLGSWVKGLIQKAVMLDTARIVRRFLSLEP

SEQ ID NO: 27701 - protein, 1197 aa, Bombyx mori
MSTTTALRKNPSRQCRQVTCGAQRTSPCIPSCSSDGSPSPTRIESLSSDETQPSPAPPRPVRRGRPPLARLGSTRRNAPSTVPATSGVVRSRMRWNENINMNVMRAYYEATEGETNLSAYRSKMFSVFQTLCPTVNVSTQRLSDQVRAIQRLRLLDQSLLDRLRYEALPVPIEPQENEVVTDTVAPIIQHDEEIQEQVCASNQDYERLSSALEDSIQEYRLVSACSRPRLPRLPMHRRNVSLVGALDSILKPYLESSTDLIDTHSLLYCGAVAVCRVAEVKSPNLTQTAYRPPTKPQWQCRIEKRIDRARILIAKLMCFQKGNTRPRVMCFVDQAFAGTGISSNEYMTCIIERIDFWKQKVYAWASRIRRYRLRSERYHLNRVFQRDQRSVYRNWESSQSQVTDEPYNVNEEDMSTFWNNIWSIPIDHSEGEWIQTVRRECESYKEMDSITISAVDVSRAVRSMPNWKSPGPDGLHSYWIKWIRSSHERLAAQFQQALELGSLPDFMTSGITYLIYKSGNTSDPKNYRPITCLPTIYKLLTSILRIKIQNHIFNNNILSPNQNGCKAGSRGTKDLLLIDMTITQQVRRSKRNVHMAWIDYKKAYDSVPHTWLMRVLELYKINPILCSFLSSCMGQWSTFLSQPGQMTSSAAPNLIRIKRGIFQGDSLSPLWFCLALNPLSTLLKDSTLGYRLRRGAEAISHLLFMDDLKLFASKKPDLMSLLKITDNFSKAIGMEFGVDKCAFIDVQRGKVVSSDCLLLNHSVVLKSLCESETYKYLGMFEVLNIVDADMKQSFRDRFFGRLIKVLKSHLSGGNKIRAFNGWVMPMLTYSFGILRWTQSELNVLDRKVRRLLTAYRMHHPRSSVMRLYIPRKCGGRGILNAKDLHNREIYNLREYFLKMNVNMYRDVVAVDKGLTPLSLANGNWKRLKVESISDRITVWRSKELHGRFYRALTGPDVDQLASVAWLRFSNLFGETEGFIFAIMDEVIMTNNYRKYILKDGTVDICRACHRPGESIRHIVSGCSRFANGEYLHRHNQVARIIHQQLALKYGFLDSAVPYYQYQPQPVLDNGHVTLYWDRSIITDRYIVANKPDIVIIDRSARRAVLVDVTIPHDENLVKAEKDKLIKYLDLAHETTAMWHVDSTIIVPIVVSVHGLIAKSFDQHLKKLSLSSWVKDLIQKAVILDTARIVRRFLTLES

SEQ ID NO: 27702 - protein, 981 aa, Eilema depressum
MREYRSMPFDYRPRLPRLPTHKKNIALVCALDSLLSDYFDNSEDLSDTHSILYCAAVAACRVANVKFHRTILTTRPKSAVPAWQSRIERRIAETRALIGKLICFRSGNTRPRVMRFVTRAFSGTDIRPREFLSRVTERIDFLKQKIYAWANRIRRYKRRVDRYSQNRTFQRDERWVYRSWERPDSNGTDMRRPDDDATNTFWRSIWSTPVSHTEGDWMRVVERSCESIGTMEPVTISDDDVTNAVRLLPNWRSAGPDGLHNFWLKWFRSSHGRLAMQFQSCLESGSLPAFITTGVTHLLHKSGSTTDPKNYRPITCLPTVYKLLTSILREKISSHLIDNSIMSISQNGCRSGARGTKELLIIDMAICQQARRHRKDLATCWIDYKKAYDSVPHTWLLRVLELYKIDTTLCTFMKTCMGQWRTVLCYPGCRQICEDSGLIKIERGIFQGDSLSPLWFCLALNPLSTILDSSGLGCRLRRDGQVISHLLYMDDLKLFAPNNLHLIELLKSTETFSNSIRMDFGVDKCAVMHVKRGRIVESESVELSDSTKLRALSATDTYKYLGMSQALGISEAGMKQSLQERFFGRLKKVLKSLLSGGNKVRACNGWVMPVLMYSFGILRWTQTELEALDRKVRAHLTAYRMHHPRSSVMRLYIPRKCGGRGFLNAKTLHNREVCNLREYFLHNDADMHRDVVMVDNGLTPLGLAKENWRKPAVLSINDRKDVWKGKELHGRFYRALHGPEIDIPASLSWLRFGDLFGETEGFVFAIMDEVVMTNNYRRYIIKDGTVDICRACHRPGESLRHIISGCSRLANGEYLHRHNQVARIIHQQLALKYNLVESEVPYYRYVPDPVLENGHITLYWDRSIITDRTIVANKPDIVIIDRLERRAIIVDITIPHDENLMKAEKEKQIKYLDLAHEIVDMWDVDSAIIVPIVVSVHGLIAKSLDQHLKRLSLDGWLKGLMQKAVLLGTARIVRKFLSLEP

SEQ ID NO: 27703 - protein, 1200 aa, Eilema depressum
MLTRSRTRNNANAPTTSPDSSLSSAAQPLASEPAASSSSSSDEFFSPPTSPPPVRRPGRGRPPASLEPRRPPASNRAPAAGGEVRRMRWTNSINENVMRAFYAATEGGTNLTAYRARMLPLFQVLEPTVNVSAQRLSDQVRAIQRCHLLDDSVLERLRSDSRSNPGASTSSQPLTQHEHFISQVNEESVSHVSEEVVDTGVTHVSTVCIDIIRSALECAMREYRSMPFECRPRLPRLPTHKKNIALVCALDSLLSDYFDNSEDLSDTHSILYCAAVAACRVANVKFHKTILTTRPKSAVPAWQSRIERRIAETRALIGKLICFRSGNTRPRVMRFVTRAFSGTDIRPREFLSRVTERIDFLKQKIYAWANRIRRYKRRVDRYSQNRTFQRDERWVYRSWERPDSNGTDMRRPDDDATNTFWRSIWSTPVSHTEGDWMRVVERSCESIGTMEPVTISDDDVTNAVRLLPNWRSAGPDGLHNFWLKWFRSSHGRLAMQFQSCLESGSLPAFITTGVTHLLHKSGSTTDPKNYRPITCLPTVYKLLTSILREKISSHLIDNSIMSISQNGCRSGARGTKELLIIDMAICQQARRHRKDLATCWIDYKKAYDSVPHTWLLRVLELYKIDTTLCTFMKTCMGQWRTVLCYPGCRQICEDSGLIKIERGIFQGDSLSPLWFCLALNPLSTILDSSGLGCRLRRDGQVISHLLYMDDLKLFAPNNLHLIELLKSTETFSNSIRMDFGVDKCAVMHVKRGRIVESESVELSDSTKLRALSATDTYKYLGMSQALGISEAGMKQSLQERFFGRLKKVLKSLLSGGNKVRACNGWVMPVLMYSFGILRWTQTELEALDRKVRAHLTAYRMHHPRSSVMRLYIPRKCGGRGFLNAKTLHNREVCNLREYFLHNDADMHRDVVMVDNGLTPLGLAKENWRKPAVLSINDRKDVWKGKELHGRFYRALHGPEIDIPASLSWLRFGDLFGETEGFVFAIMDEVVMTNNYRRYIIKDGTVDICRACRRPGESLRHIISGCSRLANGEYLHRHNQVARIIHQQLALKYNLVESEVPYYRYVPDPVLENGHITLYWDRSIITDRTIVANKPDIVIIDRLERRAIIVDITIPHDENLMKAEKEKQIKYLDLAHEIVDMWDVDSAIIVPIVVSVHGLIAKSLDQHLKRLSLDGWLKGLMQKAVLLGTARIVRKFLSLEP

SEQ ID NO: 27704 - protein, 1207 aa, Clostera curtula
MSTSAMERRLNPRRQCRQPYETNARITSAVVSSNRVQSSDEEFFTPPGTASSSEDEPTPSPSLSRRPARRGRPPLPASLGSTGHRALPTAPATGGVVRRMRWTNNLNESVMRAYYGATDGGTNLTAYRSRLLALFQELHPDVTVTAQRLSDQVRAIQRLNLLEQPLLERLRLEALPPQSVSSVQTTTPAAACLLPPSVEQLGFEQIEEVSLNDRYNEQLRRILEETIEEYRHIPVTSRPRLPRLPMHKRNMALVSALDSLLTDKLNSVVDLSELHFILYCGAVAVCRVAGVTFPKNSTASRQTSCKPAWQYRIEKRITAARTLIAKLYCFRTGNTRPRVMRYVIQAFAGTGVRQCDYTACIAERIDYFKQKVYAWAKRIRRYRERADRFNQNRLFQNDQKIIYRNWERPQPPLADVMTPDADTMLAFWRNIWSRPVEHLEGQWIGAVSRACDQITPMDPVHVDLNDVISAIRLAPNWKSPGPDGLHNFWIKKVRSCHARLATLFQAALEAGSLPDFMTTGVTHLIHKSGRISEPMNYRPITCLPTIYKLLTSIVKFKIVNHILANNILASNQNGCNAGSRGTKDLLLIDMAICQQVRRSKKNISMAWIDYKKAYDSVPHSWLMRVLDLYKVDANLCFFLSSCMRQWSTVLYHPGHRHFSEPSERIWIKRGIFQGDSLSPLWFCLALNPLSILLNDSMPGYRLHRGGKTISHLLYMDDLKLYAPKQSDLMSLLKVTENFSSAIGMEFGVDKCAVINVQKGRIVNSENLQLSGNVVLRSLCESDTYKYLGMSEALGIADSDVKQQLKTRFLGRLTKVLKSLLSGGNKVRAFNCWVIPVIAYSFGILRWTQSELDALDRMVRRQLTAFRMHHPRSSVMRLYIPRRCGGRGFLNVKSLHNREVCNLRDYFLRVDDEMHRDVVKVDSGLTALSMAKQNWRRPQVLSISERKAIWKGKELHGRFYSALTGPEIDQLASVSWLRFGNLFGETEGFVFAIMDEVVKTNNYRKYIIKDGTVDICRACHCPGESIRHVVSGCSRLANGEYLHRHNQVAGIIHQQLALRYGIVESEVPYYQYKPEPVLSNNHVTLYWDRSIVTDRTIMANKPDIVVIDRSVRRAMLIDITIPHDVNLVKAEHEKISKYLDLSHEVGAMWNMDSTIIVPIVISVHGLMAKSFDQHLQKLSLGSWVKSLIQKAVLLDTARIVRRFLTLDP

SEQ ID NO: 27705 - protein, 889 aa, Phalera bucephala
MARTLIAKLLCFQAGNNRPRVMRFVAQAFAGTGVAPVDYVAGVAERIDYWKQKVYAWVKRIRRYKARADRYHVNRTFQTNQRSVYQAWERPQERVTDVHLPNAAVMAEFWRKIWSVPVSHSEGEWFDVVGRSCGPIQEMELVVISREDLACAVRAAPNWKSPGPDGLHAFWLKRLQGSHSRLATQFQEALQLGSLPSFMTSGVTHLIYKSGRTSEPKNYRPITCLPTVYKLLTSILRIKINNHLKAQHILSPTQNGCKGGSRGTKDLLLIDMAICQQVRRSRKNVSMAWIDYKKGYDSVPHTWLGRVLELYRVHPALCSFLGSCMGQWTTVLRHPGCGGLSGSSDLIKISRGIFQGDSLSPLWFCLALNPLSAILKDSKLGYHLRRESEPISHLLYMDDLKLYASKKTDLMELLKITGNFSNDNGMEFGVDKCAVIHVQRGRVEDSFNLQLSEDISLRSLSEMDSYKYLGKSQALSITEQDMKQSLKDRFFARLIKVLKSLLSGGNKVRAFNGWVMPVLTYSFGILRWTQSELDALDRKVRRLLTAYRMHHPRPSVMRLYIPRKCGGRGYLNAKTLHNREVCNLRQYFLSVSVVMYRDVAAIDRGLTPLSLANENWRRPQVLSISDRTAIWKGKELHGRFYQALTGPDVDQLASVNWLRFSNLFGETEGFVFAIMDEVIMTNNYRKHILKDGTVDICRACHRPGESIRHVVSACSRLANGEYLHRHNQVARIIHQQLALKYGLVDSEVPYYQYRPLPVLESGHITLYWDRSIITDRTIVANKPDIVIIDRSMRRVMLVDVTIPHDENLVKAEKEKLSKYLDLAHEVTAMWNVDSTIIIPMVVSVNGLIAKSFDKHLEKLSLGSWVKGLIQKAVMLDTARIVRRFLSLEP

SEQ ID NO: 27706 - protein, 1204 aa, Phalera bucephala
MAEPSRRNPVRLCRQRDARSPSARPTPLPGSPTSPQPSEDEDFFTPPTSGASSDDAGISASPPTLTSARRGRPPLPARLGPAGHCAPPTAPATGGVVRRMRWTPELNLSVMRAYYGATEGGTILTAYRPKLLSLFQGLHPTVAVTAQRLSDQVRAIQRCKLLDDTVLERLRREALPALTDFNVRSVEEPISLNNFARSEEVNSEQVSVSDQLQEQVRRALEDAFAEYRSAPISLRPCLPRLPMHRRNISLVSALDNVLKPHWETSVDLCDTHSILYCGAVAVCRVAGVRFPNLHRATQPTNTKPFWQCRIERRINMARTLIAKLLCFQAGNNRPRVVRFVTQAFAGTRVAPVDYVAGVAERIDYWKQKVYAWAKRIRRYKARADRYHVNCTFQTNQRSVYQAWERPQERVTDVHLPNAAVMAEFWRKIWSVPVTHSEGEWFDVVGRSCGPIQKMEPVVISREDLACAVRAAPNWKSPGPDGLHAFWLKRLQGSHSRLATQFQEALQLGSLPSFMTSGVTHLIHKSGSTSEPKNYRPITCLPTVYKLLTSILRIKINNHLKAQHILSPTQNGCKGGSRGTKDLLLIDIAICQQVRRSRKNVSMAWIDYKKAYDSVPHTWLGRVLELYRVHPALCSFLGSCMRQWTTVLRHPGCVGLSGSSDLIKISRGIFQGDSLSPLWFCLALNPLSAILKDSKLGYHLRRESEPISHLLYMDDLKLYASKKTDLMELLKITGNFSNDIGMEFGVDKCAVIHVQRGRVEDSFNLQLSEDISLRSLSEMDSYKYLGMSQALSIAEQDMKQSLKDRFFARLIKVLKSLLSGGNKVRAFNGWVMPVLTYSFGILRWTQSELDALDRKVRRLLTAYRMHHPRSSVMRLYIPRKCGGRGFLNAKTLYYREVCNLRQYFLSVSVVMYRDVAAIDRGLTPLSLANGNWRRPQVLSTSDRTAIWKGKELHGRFYRALTGPDVDQLASVTWLRFSNLFGETEGFVFAIMDEVIMTNNYRKHILKDGTVDICRACHRPGQSIRHVVSGCSRLANGEYLHRHNQVARIIHQQLALKYGLVDSEVPYYQYQPLPVLESGHITLYWDRSVITDRTIVANKPDIVIIDRSMRRVMLVDVTIPHDENLVKAEKEKLSKYLDLAHEVTTMWNVNSTIIIPMVVSVNGLIAKSFDKHLEKLSLGSWVKGLIQKAVMLDTARIVRRFLSLEP

SEQ ID NO: 27707 - protein, 1204 aa, Phalera bucephala
MAEPSRRNPVRLCRQRDARSPSARPTPLPGSPTSPQPSEDEDFFTPPTSGASSDDAGISASPPTITSARRGRPPLPARLGPAGHCAPPTAPATGGVVRRMRWTPELNLSVMRAYYGATEGGTILTAYRPKLLSLFQGLHPTVAVTAQRLSDQVRAIQRCKLLDDTVLERLHREALPARTESNVRSVEDPISLNNFARSEEVNSEQVSVSDQLQEQVRRALEDAFAEYRSAPISLRPCLPRLPMHRRNISLVSALDNVLKPHWETSVDLCDTHSILYCGAVAVCRVAGVRFPNLHRATQPTNAKPLWQCRIERRINMARTLIAKLMCFQAGNNRPRVVRFVTQAFAGTRVAPVDYVAGVAERIDYWKQKVYAWAKRIRRYKARADRYHVNRTFQTNQRSVYQAWERPQERVTDVHLPNAAVMAEFWRKIWSVPVTHSEGEWFDVVGRSCGPIQEMEPVVISREDLACAVRAAPNWKSPGPDGLHAFWLKRLQGSHSRLATQFQEALQLGSLPSFMTSGVTHLIHKSGSTSEPKNYRPITCLPTVYKLLTSILRIKINNHLKAQHILSPTQNGCKGGSRGTKDLLLIDIAICQQVRRSRKNVSMAWIDYKKAYDSVPHTWLGRVLELYRVHPALCSFLGSCMRQWTTVLRHPGCGGLSGSSDLIKISRGIFQGDSLSPLWFCLALNPLSAILKDSKLGYHLRRESEPISHLLYMDDLKLYASKKTDLMELLKITGNFSNDIGMEFGVDKCAVIHVQRGRVEDSFNLQLSEDISLRSLSEMDSYKYLGMSQALSIAEQDMKQSLRDRFFARLIKVLKSLLSGGNRVRAFNGWVMPVLTYSFGILRWTQSELDALDRKVRRLLTAYRMHHPRSSVMRLYIPRKCGGRGFLNAKTLHNREVCNLRQYFLSVSVVMYRDVAAIDRGLTPLSLANGNWRRPQVLSTSDRTAIWKGKELHGRFYRALTGPDVDQLASVTWLRFSNLFGETEGFVFAIMDEVIMTNNYRKYILKDGTVDICRACHRPGESIRHVVSGCSRLANGEYLHRHNQVARIIHQQLALKYGLVDSEVPYYQYQPLPVLESGHITLYWDRSVITDRTIVANKPDIVIIDRSMRRVMLVDVTIPHDENLVKAEKEKLSKYLDLAHEVTAMWNVDSTIIIPMVVSVNGLIAKSFDKHLEKLSLGSWVKGLIQKAVMLDTARIVRRFLSLEP

SEQ ID NO: 27708 - protein, 1095 aa, Phalera bucephala
MRWTPELNLSVMRAYYGATEGGTILTAYRPKLLSLFQGLHPTVAVTAQRLSDQVRRVLERLHREALPARTESNVRSVEDPISLNNFARSEEVNSEQVSVSDQLQEQVRRALEDAFAEYRSAPISLRPCLPRLPMHRRNISLVSALDNVLKPHWETSVDLCDTHSILYCGAVAVCRVAGVRFPNLHRATQPTNAKPLWQCRIERRINMARTLIAKLLCFQAGNNRPRVVRFVTQAFAGTRVAPVDYVAGVAERIDYWKQKVYAWAKRIRRYKARADRYHVNRTFQTNQRSVYQAWERPQERVTDVHLPNAAVMAEFWRKIWSVPVTHSEGEWFDVVGRSCGPIQKMEPVVISREDLACAVRAAPNWKSPGPDGLHAFWLKRLQGSHSRLATQFQEALQLGSLPSFMTSGVTHLIHKSGSTSEPKNYRPITCLPTVYKLLTSILGIKINNHLKAQHILSPTQNGCKGGSRGTKDLLLIDIAICQQVRRSRKNVSMAWIDYKKAYDSVPHTWLGRVLELYRVHPALCSFLGSCMRQWTTVLRHPGCGGLSGSSDLIKISRGIFQGDSLSPLWFCLALNPLSAILKDSKLGYHLRRESEPISHLLYMDDLKVYASKKTDLMELLKITGNFSNDIGMEFGVDKCEVIHVQRGRVEDSFNLQLSEDISLRSLSEMDSYKYLGMSQALSIAEQDMKQSLWDRFFARLIKVLKSLLSGGNRVRAFNGWVMPVLTYSFGILRWTQSELDALDRKVRRLLTAYRMHHPRSSVMRLYIPRKCGGRGFLNAKTLHNREVCNLRQYFLSVSVVMYRDVAAIDRGLTPLSLANGNWRRPQVLSTSDRTAVWKGKELHGRFYRALTGPDVDQLASVTWLRFSNLFGETEGFVFAIMDEVIMTNNYRKYILKDGTVDICRACHRPGESIRHVVSGCSRLANGEYLHRHNQVARIIHQQLALKYGLVDSEVPYYQYQPLPVLESGHITLYWDRSVITDRTIVANKPDIVIIDRSMRRVMLVDVTIPHDENLVKAEKEKLSKYLDLAHEVTAMWNVDSTIIIPMVVSVNGLIAKSFDKHLEKLSLGRWVKGLIQKAVMLETARIVRRFLSLEP

SEQ ID NO: 27709 - protein, 1204 aa, Phalera bucephala
MAEPSRRNPVRLCRQRDARSPSARPTPLPGSPTSPQPSEDEDFFTPPTSGASSDDAGISASPPTSTSARRGRPPLPARLGPAGHCAPPTAPATGGVVRRMRWTPELNLSVMRAYYGATEGGTILTAYRPKLLSLFQGLHPTVAVTAQRLSDQVRAIQRCKLLDDTVLERLHREALPARTESNVRSVEDPISLNNFARSEEVNSEQVSVSDQLQEQVRRALEDAFAEYRSAPISLRPCLPRLPMHRRNISLVSALDNVLKPHWETSVDLCDTHSILYCGAVAVCRVAGVRFPNLHRATQPTNAKPLWQCRIERRINMARTLIAKLLCFQAGNNRPRVVRFVTQAFAGTRVAPVDYVAGVAERIDYWKQKVYAWAKRIRRYKARADRYHVNRTFQTNQRSVYQAWERPQERVTDVHLPNAAVMAEFWRKIWSVPVTHSEGEWFDVVGRSCGPIQEMEPVVISREDLACAVRAAPNWKSPGPDGLHAFWLKRLQGSHSRLATQFQEALQLGSLPSFMTSGVTHLIHKSGSTSEPKNYRPITCLPTVYKLLTSILRIKINNHLKAQHILSPTQTGCKGGSRGTKDLLLIDIAICQQVRRSRKNVSMAWIDYKKAYDSVPHTWLGRVLELYRVHPALCSFLGSCMRQWTTVLRHPGCGGLSGSSDLIKISRGIFQGDSLSPLWFCLALNPLSAILKDSKLGYHLRRESEPISHLLYMDDLKLYASKKTDLMELLKITGNFSNDIGMEFEVDKCAIIHVQRGRVEDSFNLQLSEDISLRSLSEMDSYKYLGMSQALSIAEQDMKQSLSDRFFARLIKVLKSLLSGGNKVRAFNGWVMPVLTYSFGILRWTQSELDALDRKVRRLLTAYRMHHPRSSVMRLYIPRKCGGRGFLNAKTLHNREVCNLRQYFLSVSVVMYRDVAAIDRGLTPLSLANGNWRRPQVLSTSDRTAIWKGKELHGRFYRALTGPDVDQLASVTWLRFSNLFGETEGFVFAIMDEVIMTNNYRKHILKDGTVDICRACHRPGESIRHVVSGCSRLANGEYLHRHNQVARIIHQQLALKYGLVDSEVPYYQYQPLPVLESGHITLYWDRSVITDRTIVANKPDIVIIDRSMRRVMLVDVTIPHDENLVKAEKEKLSKYLDLAHEVTAMWNVDSTIIIPMVVSVNGLIAKSFDKHLEKLSLGSWVKGLIQKAVMLDTARIVRRFLSWEP

SEQ ID NO: 27710 - protein, 1204 aa, Phalera bucephala
MAEPSQRNPVRLCRQRDARSPSARPTPLPGSPTSPQPSEDEDFFTPPTSGASSDDAGISASPPTLTSARRGRPPLPARLGPAGHCAPPTAPATGGVVRRMRWTPELNLSVMRAYYGATEGGTILTAYRPKLLSLFQGLHPTVAVTAQRLSDQVRAIQRCKLLDDTVLERLHREALPARTESNVRSVEDPISLNNFARSEEVNSEQLSVSDQLQEQVRRALEDAFAEYRSAPISLRPCLPRLPMHRRNISLVSALDNVLKPHWETSVDLCDTHSILYCGAVAVCRVAGVRFPNLHRATQPTNAKPLWQCRIERRINMARTLIAKLLCFQAGNNRPRVVRFVTQAFAGTRVAPVDYVAGVAERIDYWKQKVYAWAKRIRRYKARADRYHVNRTFQTNQRSVYQAWERPQERVTDVHLPNAAVMAEFWRKIWSVPVTHSKGEWFDVVGRSCGPIQEMEPVVISREDLACAVRAAPNWKSPGPDGLHAFWLKRLQGSHSRLATQFQEALQLGSLPSFMTSGVTHLIHKSGSTSEPKNYRPITCLPTVYKLLTSILRIKINNHLKAQHILSPTQNGCKGGSRGTKDLLLIDIAICQQVRRSRKNVSMAWIDYKKAYDSVPHTWLGRVLELYKVHPALCSFLGSCMRQWTTVLRHPGCGGLSGSSDLIKISRGIFQGDSLSPLWFCLALNPLSAILKDSKLGYHLRRESEPISHLLYMDDLKLYASKKTDLMELLKITGNFSNDIGMEFGVDKCAVIHVQRGRVEDSFNLQLSEDISLRSLSEMDSYKYLGMSQALSIAEQDMKQSLRDRFFARLIKVLKSLLSGGNRVRAFNGWVMPVLTYSFGILRWTQSELDALDRKVRRLLTAYRMHHPRSSVMRLYIPRKCGGRGFLNAKTLHNREVCNLRQYFLSVSVVMYRDVAAIDRGLTPLSLANGNWRRPQVLSTSDRTAIWKGKELHGRFYRALTGPDVDQLASVTWLRFSNLFGETEGFVFAIMDEVIMTNNYRKYILKDGTVDICRACHRPGESIRHVVSGCSRLANGEYLHRHNQVARIIHQQLALKYGLVDSEVPYYQYQPLPVLESGHITLYWDRSVITDRTIVANKPDIVIIDRSMRRVMLVDVTIPHDENLVKAEKEKLSKYLDLAHEVTAMWNVDSTIIIPMVVSVNGLIAKSFDKHLEKLSLGSWVKGLIQKAVMLDTARIVRRFLSLEP

SEQ ID NO: 27711 - protein, 1197 aa, Carposina sasakii
MRKTRATNSRNAHPTPPTSPSTSLENEHYTPPTTTRSSSETGSPSPPPRRPVRRRRRPPLPARLEPPEPRAPTAAPATDGVVRRMRWTNLNESVMRAYYGATEGGTNLTAYRPRMLTLFQALEPTATTVTAQRLSDQVRAIQRCHLLDESVLERLRQDVRVTHVATDAGQCQPESSAIRITADPNPAENDHESVDRVDTSVSTQHNERLRSALEDALMEFRTAPPISRPRLPRFPTHKRNLALMGALDSMLSTHIEACDNLTDLHSVLYCAAIAACRVACVKFPIDQVTRTDRGKPAWQCRIEKRISEARTLIGKLICFKAGNTRPRVMRFVIQAFSGLNIKRKDYLPRVTERIDFLKQKVCAWANRIRRYRERVDRFFINRTFQNNQKKVYEKLWKQPVQCVDGGQRPDRHTMSNFWRNIWSLSVNHTEDEWMDVVERSCEYINDMEIVNIEPLDVTSAVRPAPNWKSPGPDGLQNFWLKWFYSSHARLAALFQEALESGSLPQFMTTGITHLLFKSGNTSDPKNYRPITCLPTLYKLLTSILRAKITKHIEANNIMAATQNGCRAGSRGTKELLLIDMAICQQARRSRKSLSTAWIDYKKAYDSVPHSWLLKVLDIYKINPTLKSFMESCMGQWSTVLRNPAADGCSGPDDTIKIKRGIFQGDSLSPLWFCLALNPLSTLLKDSGLGYRLRRGREAISHLLYMDDLKLFAPKQPDLIELLKITKKFSDSIRMEFGVDKCAVLHVQRGVIAETESIQLSDSVHLTSLSGIETYKYLGMSESLGIPDADMKQALRDRFFSRLTKLLKSLLSGGNKIRAYNGWVMPVLLYSFGILKWTQTELEALDRRVRILLTANRMHHPRASVMRLYVSRKCGGRGMLNAKNLHNREICSLREYFQKKDEMMHRDVVLVDKGLTPLHLANENWRNPIVVTAEERKEIWKGKALHGRFYKALTGPDVDQLASVSWLRFGDLFGETEGFVCAIMDEVIKTNNYRKYILKDGTTDICRACHRPGESLRHIISGCSHLANGEYLHRHNQVARIIHQQLALKYNLVPSEVPYYRYSPQPVLENGRATLYWDRSIITDRTIVANKPDIVLIDRAARRAILVDVTIPHDENLVTAEKTKQTKYLDLAHEVTAMWDVDSTIIVPIVVTVNGLIAKSLDQHLKRLSLGSWIGSQIQKAVLLDTARIVRRFLSLGP

SEQ ID NO: 27712 - protein, 1197 aa, Bombyx mori
MSTTTALRKNPSRQCRQVTCGARRTSPCIPSCSSDGSPSPTRIENLSSDETQPSPAPPRPVRRGRPPLARLGSTRRNAPSTVPATSGVVRSRMRWNENINMNVMRAYYEATEGETNLSAYRSKMFSVFQTLCPTVNVSTQRLSDQVRAIQRLRLLDQSLLDRLRYEALPVPIEPQENQVVTDTVAPIIQHDEEIQEQVCASNQDYERLSSALEDSIQEYRLVSSCSRPRLPRLPMHRRNVSLVGALDSILKPYLESSTDLIDTHSLLYCGAVAVCRVAEVKSPNLTQTAYRPPTKPQWQCRIEKRIDRARILIAKLMCFQKGNTRPRVMCFVDQAFAGTGLSSNEYMTCIIERIDFWKQKVYAWASRIRRYRLRSERYHLNRVFQRDQRSVYRNWESSQSQVTNEPYNVNEEDMSTFWKNIWSIPIGHSEGEWIQTVRRECESYKEMDPIKISAIDVSRAVRSMPNWKSPGPDGLHSYWIKWIRSSHERLAALFQQALEMGSLPDFMTSGITYLIYKSGNTSDPKNYRPITCLPTIYKLLTSILRIKIQNHIFNNNILSPNQNGCKAGSRGTKDLLLIDMTITQQVRRGKRNVHMAWIDYKKAYDSVPHTWLMRVLELYKINPILCSFLSSCMGQWSTFLSQPGQMTSSAAPNLIRIKRGIFQGDSLSPLWFCLALNPLSTLLKDSTLGYRLRRGAEAISHLLFMDDLKLFASKKPDLMSLLKITDSFSKAIGMEFGVDKCAFIDVQRGKVVSSDCLLLNHSVVLKSLCESETYKYLGMFEVLNIVDADMKQSFRDRFFGRLIKVLKSHLSGGNKIRAFNGWVMPMLTYSFGILRWTQSELDILDRKVRRLLTAYRMHHPRSSVMRLYIPRKCGGRGILNAKDLHNREIYNLREYFLKMNVNMYRDVVAVDKGLTPLSLANGNWKRLKVESISDRITVWRSKELHGRFYRALTGPDVDQLASVAWLRFSNLFGETEGFIFAIMDEVIMTNNYRKYILKDGTVDICRACHRPGESIRHIVSGCSRFANGEYLHRHNQVARIIHQQLALKYGFLDSAVPYYQYQPQPVLDNGHVTLYWDRSIITDRYIVANKPDIVIIDRSARRAVLVDVTIPHDENLVKAEKDKLIKYLDLAHETTAMWHVDSTIIVPIVVSVHGLMAKSFDQHLKKFSLSSWVKGLIQKAVILDTARIVRRFLTLES

SEQ ID NO: 27713 - protein, 962 aa, Clostera curtula
MHKRNMALVSALDSLLTDKLNSVVDLSELHFILYCGAVAVCRVAGVTFPKNSTASRQTSCKPAWQYRIEKRITAARTLIAKLYCFRTGNTRPRVMRYVIQAFAGTGVRQCDYTACIAERIDYFKQKVYAWAKRIRRYRERADRFNQNRLFQNDQKIIYRNWERPQPPLADVMTPDADTMLAFWRNIWSRPVEHLEGQWIGAVSRACDQITPMDPVHVDLNDVISAIRLAPNWKSPGPDGLHNFWIKKVRSCHARLATLFQAALEAGSLPDFMTTGVTHLIHKSGRISEPKNYRPITCLPTIYKLLTSIVKFKIVNHILANNILASNQNGCNAGSRGTKDLLLIDMAICQQVRRSKKNISMAWIDYKKAYDSVPHSWLMRVLDLYKVDANLCFFLSSCMRQWSTVLYHPGHRHFSEPSERIWIKRGIFQGDSLSPLWFCLALNPLSILLNDSMPGYRLHRGGKTISHLLYMDDLKLYAPKQSDLMALLKVTENFSSAIGMEFGVDKCAVINVQKGRVVNSENLQLSGNVVLRSLCESDTYKYLGMSEALGIADSDVKQQLKTRFLGRLTKVLKSLLSGGNKVRAFNCWVIPVIAYSFGILRWTQSELDALDRMVRRQLTAFRMHHPRSSVMRLYIPRRCGGRGFLNVKSLHNREVCNLRDYFLRVDDEMHRDVVKVDSGLTALSMAKQNWRRPQVLSISERKAIWKGKELHGRFYSALTGPEIDQLASVSWLRFGNLFGETEGFVFAIMDEVVKTNNYRKYIIKDGTVDICRACHCPGESIRHVVSGCSRLANGEYLHRHNQVAGIIHQQLALRYGIVESEVPYYQYKPEPVLSNNHVTLYWDRSIVTDRTIMANKPDIVVIDRSVRRAMLIDITIPHDVNLVKAEHEKISKYLDLSHEVGAMWNMDSTIIVPIVISVHGLMAKSFDQHLQKLSLGSWVKSLIQKAVLLDTARIVRRFLTLDP

SEQ ID NO: 27714 - protein, 1205 aa, Phlogophora meticulosa
MQRYPCRLRRQRAANREDDSARPTSPSGSSCSSKSSEDVFFTPPATAGSNDEEARTPTPSRRRRPALRGRLPLPASLGQADPSAPPTVPATGGIVRRMRWTTDLNKSVMQAYYRATDGGTNLTAYRPRMLSLFQTLQPTATVTAQRLSDRVRLIQRRKLLDDDVLERLRLETQQTHIDSTSTNPPEVQGNHNSVQQDIPSGVEECVQVSVSNQDNEQLRSALNDAIAKYHVSPLSERPRLPRLPINKRNLALMGALNSILSSELRICKTLSLTHSILFCGAVAACRVAGVRFPNKERISRLPAAVPLWQYRIEKRISQARALIGKLIAFRNGNTRPRVMRFVNQAFEGTNIRHENYISWVTERIDFWKQKVFAWAKRIRRYKERYDRFHINRIFQSDEKKVYRNWEKPQQVVDMHLPNADAMSTFWRNLWSMPVNYCEDDWIGVVERACESLEPMPSIKICQKDVSFALRLAPNWKSPGPDGLHNFWLKWFHCSHGLLATQFQDALELGELPEFMTTGVTHLLYKSGNTTEPQNYRPITCLPTIYKVLTSILKFKINSHISRNNIMAATQNGCKSGARGTKELLLIDRAICQQVRRNKKSISIAWIDYKKAYDSVPHAWLKKVLELYKIHPDICGLLSSCMRRWTTVLRQPGNGDAVDSSNLIRINRGIFQGDSLSPLWFCLALNPLSTLLKDSKLGYRLHRGAEPISHLLYMDDLKLYAPKKTQLMELLKITESFSKSIKMEFGVDKCAVAHIQLGSVVNSESLPLSGDIILRSLSELETYKYLGMLQALGIDDKGVKQSLRERFMTRLLKVLNSFLSGGNKVRAFNGWVMPLLSYSFGILRWTQSELDALDRKVRCLLTAHRMHHPRSSVMRLYIPRRCGGRGFLNAKNLHNREVYNLREYFLHSDVGMHQDVALIDKGFTPLSLANENWRKPLVLSISDRRDVWKGKELHGRFYRTLTGPDIDPIAYVAWLRFGNLFGETEGFVFAIMDEVIKTRNYQRHIIKDGTVDVCRACHLPGESIRHIISGCSRLANGEYLHRHNLVARIIHQQLALKYALVDIEVPYYQYHPEPVLDNGQITLYWDRLIITDRFIPANKPDIVIIDRSMSRAVIVDVTIPHDENLVKAEKDKIIKYLDLAHEVTSMWNINSTIIVPIVISVNGLIAKSFDQHLEQLSLNSWVKSQMQKAVVMDTARIVRRFLSLDP

SEQ ID NO: 27715 - protein, 1204 aa, Phalera bucephala
MAEPSRRNPVRLCRQRDARSPSARPTPLPGSPTSPQLSEDEDFFTPPTSGASSDDAGISASPPTLTSARRGRPPLPARLGPAGHCAPPTAPATGGVVRRMRWTPELNLSVMRAYYGATEGGTILTAYRPKLLSLFQGLHPTVAVTAQRLSDQVRAIQRCKLLDDTVLERLHREALPVRTESNVRSVEDPISLNNFARSEEVNSEQVSVSDQLQEQVRRALEDAFAEYRSAPISLRPCLPRLPMHRRNISLVSALDNVLKPHWETSVDLCDTHSILYCGAVAVCRVAGVRFPNLHRATQPTNAKPLWQCRIERRINMARTLIAKLLCFQAGNNRPRVVRFVTQAFAGTRVAPVDYVAGVAERIDYWKQKVYAWAKRIRRYKARADRYHVNRTFQTNQRSVYQAWERPQERVTDVHLPNAAVMAEFWRKIWSVPVTHSEGEWFDVVGRSCGPIQEMEPVVISREDLACAVRAAPNWKSPGPDGLHAFWLKRLQGSHSRLATQFQEALQLGSLPSFMTSGVTHLIHKSGSTSEPKNYRPITCLPTVYKLLTSILRIKINNHLKAQHILSPTQNGCKGGSRGTKDLLLIDIAICQQVRRSRKNVSMAWIDYKKAYDSVPHTWLGRVLELYRVHPALCSFLGSCMRQWTTVLRHPGCGGLSGSSDLIKISRGIFQGDSLSPLWFCLALNPLSAILKDSKLGYHLRRESEPISHLLYMDDLKLYASKKTDLMELLKITGNFSNDIGMEFGVDKCAVIHVQRGRVEDSCNLQLSEDISLRFLSEMDSYKYLGMSQALSIAEQDMKQSLRDRFFARLIKVLKSLLSGGNRVRAFNGWVMPVLTYSFGILRWTQSELDALDRKVRRLLTAYRMHHPRSSVMRLYIPRKCGGRGFLNAKTLHNREVCNLRQYFLSVSVVMYRDVAAIDRGLTPLSLANGNWRRPQVLSTSDRTAIWKGKELHGRFYRALTGPDVDQLASVTWLRFSNLFGETEGFVFAIMDEVIMTNNYRKYILKDGTVDICRACHRPGESIRHVVSGCSRLANGEYLHRHNQVARIIHQQLALKYGLVDSEVPYYQYQPLPVLESGHITLYWDRSVITDRTIVANKPDIVIIDRSMRRVMLVDVTIPHDENLVKAEKEKLSKYLDLAHEVTAMWNVDLTIIIPMVVSVNGLIAKSFDKHLEKLSLGRWVKGLIQKAVILDTARIVRRFLSLEP

SEQ ID NO: 27716 - protein, 1204 aa, Phalera bucephala
MAEPSRRNPVRLCRQRDARSPSARPTPLPGSPTSPQPSEDEDFFTPPTSGASSDDAGISASPPTLTSARRGRPPLPARLGPAGHCAPPTAPATGGVVRRMRWTPELNLSVMRAYYGATEGGTILTAYRPKLLSLFQGLHPTVAVTAQRLSDQVRTIQRCKLLDDTVLERLHREALPARTESNVRSVEDPISLNNFARSEEVNSEQVSVSHQLQEQVRRALEDAFAEYRSAPIFLRPCLPRLPMHRRNISLVSALDNFLKPHWETSVDLCDTHSILYCGAVAVCRVAGVRFPNLHRATQPTNAKPLWQCRIERRINMARTLIAKLLCFQAGNNRPRVVRFVTQAFAGTRVAPVDYVAGVAERIDYWKQKVYAWAKRIRRYKARADRYHVNRTFQTNQRSVYQAWERPQERVTDVHLPNAAVMAEFWRKIWSVPVTHSEGEWFDVVGRSCGPIQEMEPVVISREDLACAVRAAPNWKSPGPDGLHAFWLKRLQGSHSRLATQFQEALQLGSLPSFMTSGVTHLIHKSGSTSEPKNYRPITCLPTVYKLLTSILRIKINNHLKAQHILSPTQNGCKGGSRGTKDLLLIDIAICQQVRRSRKNVSMAWIDYKKAYDSVPHTWLGRVLELYKVHPALCSFLGSCMRQWTTVLRHPGCGGLSGSSDLIKISRGIFQGDSLSPLWFCLALNPLSAILKDSKLGYHLRRESEPISHLLYMDDLKLYASKKTDLMELLKITGNFSNDIGMEFGVDKCAVIHVQRGRVEDSFNLQLSEDISLRSLSEMDSYKYLGMSQALSIAKQDMKQSLRNRFFARLIKVLKSLLSGGNRVRAFNGWVMPVLTYSLGILRWTQSELDALDKKVRRLLTAYRMHHPRSSVMRLYIPRKCGGRGFLNAKTLHNREVCNLRQYFLSVSVVMYRDVAAIDRGLTPLSLANGNWRRPQVLSTSDRTAIWKGKELHGRFYRALTGPDVDQLASVTWLRFSNLFGETEGFVFAIMDEVIMTNNYRKHILKDGTVDICRACHRPGESIRYVVSGCSRLANGEYLHRHNQVARIIHQQLALKYGLVDSEVPYYQYQPLPVLESGHITLYWDRSVITDRTIVANKPDIVIIDRSMRRVMLVDVTIPHDENLVKAEKEKLSKYLDLAHEVTAMWNVDSTIIIPMVVSVNGLIAKSFDKHLEKLSLGSWVKGLIQKAVMLDTARIVRRFLSLEP

SEQ ID NO: 27717 - protein, 1204 aa, Phalera bucephala
MAEPSRRNPVRLCRQRDARSPSARPTPLPGSPTSPQPSEDEDFFTPPTSGASSDDAGISASPPTITSARRGRPPLPARLGPAGHCAPPTAPATGGVVRRMRWTPELNLSVMRAYYGATEGGTILTAYRPKLLSLFRGLHPTVAVTAQRLSDQVRAIQRCKLLDDTVLERLHREALPARTESNVRSVEDPISLNNFARSEEVNSEQVSVSDQLQEQVRRALEDAFAEYRSAPISLRPCLPRLPMHRRNISLVGALDNVLKPHWETSVDLCDTHSILYCGAVAVCRVAGVRFPNLHRATQPTNAKPLWQCRIERRINMARTLIAKLLCFQAGNNRPRVVRFVTQAFAGTRVAPVDYVAGVAERIDYWKQKVYAWAKRIRRYKARADRYHVNRTFQTNQRSVYQAWERPQERVTDVHLPNAAVMAEFWRKIWSVPVTHSEGEWFDVVGRSCGPIQEMEPVVISREDLACAVRAAPNWKSPGPDGLHAFWLKRLQGSHSRLATQFQEALQLGSLPSFMTSGVTHLIHKSGSTSEPKNYRPITCLPTVYKLLTSILRIKINNHLKAQHILSPTQNGCKGGSRGTKDLLLIDIAICQQVRRSRKNVSMAWIDYKKAYDSVPHTWLGRVLELYRVHPALCSFLGSCMRQWTTVLRHPGCGGLSGSSDLIKISRGIFQGDSLSPLWFCLALNPLSAILKDSKLGYHLRRESEPISHLLYMDDLKLYASKKTDLMELLKITGNFSNDIGMEFGVDKCAVIHVQRGRVEDSFNLQLSEDISLRSLSEMDSYKYLGMSQALSIAEQDMKQSLRDRFFARLIKVLKSLLSGGNRVRAFNGWVMPVLTYSFGILRWTQSELDALDRKVRRLLTAYRMHHPRSSVMRLYIPRKCGGRGFLNAKTLHNREVCNLRQYFLSVSVVMYRDVAAIDRGLTPLSLANGNWRRPQVLSTSDRTAIWKGKELHGRFYRALTGPDVDQLASVTWLRFSNLFGETEGFVFAIMDEVIMTNNYRKYILKDGTVDICRACHRPGESIRHVVSGCSRLANGEYLHRHNQVARIIHQQLALKYGLVDSEVPYYQYQPLPVLESGHITLYWDRSVITDRTIVANKPDIVIIDRSMRRVMLVDVTIPHDENLVKAEKEKLSKYLDLAHEVTAMWNVDSTIIIPMVVSVNGLIAKSFDKHLEKLSLGSWVKGLIQKAVMLDTARIVRRFLSLEP

SEQ ID NO: 27718 - protein, 1204 aa, Phalera bucephala
MAEPSRRNPVRLCRQRDARSPSARPTPLPGSPTSPQPSEDEDFFTPPTSGASSDDAGISASPPTLTSARRGRPPLPARLGPAGHCAPPTAPATGGVVRRMRWTPELNLSVMRAYYGATEGGTILTAYRPKLLSLFQGLHPTVAVTAQRLSDQVRAIQRCKLLDDTVLERLHREALPARTESNVRSVEDPISLNNFARSEEVNSEQVSVSDQLQEQVRRALEDAFAEYRSAPISLRPCLPRLPMHRRNISLVSALDNVLKPHWETSVDLCDTHSILYCGAVAVCRVAGVRFPNLHRATQPTNAKPLWQCRIERRINMARTLIAKLLCFQAGNNRPRVVRFVTQAFAGTRVAPVDYVAGVAERIDYWKQKVYAWAKRIRRYKARADRYHVNRTFQTNQRSVYQAWERPQERVTDVHLPNAAVMAEFWRKIWSVPVTHSEGEWFDVVGRSCGPIQEMEPVVISREDLACAVRAAPNWKSPGPDGLHAFWLKRLQGSHSRLATQFQEALQLGSLPSFMTSGVTHLIHKSGSTSEPKNYRPITCLPTVYKLLTSILRIKINNHLKAQHILSPTQNGCKGGSRGTKDLLLIDIAICQQVRRSRKNVSMAWIDYKKAYDSVPHTWLGRVLELYRVHPALCSFLGSCMRQWTTVLRHPGCGGLSGSSDLIKISRGIFQGDSLSPLWFCLALNPLSAILKDSKLGYHLRRESEPISHLLYMDDLKLYASKKTDLMELLKITGNFSNDIGMEFGVDKCAVIHVQRGRVEDSFNLQLSEDISLRSLSEMDSYKYLGMSQALSIAEQDMKQSLRDRFFARLIKVLKSLLSGGNRVRAFNGWVMPVLTYSFGILRWTQSELDALDRKVRRLLTAYRMHHPRSSVMRLYIPRKCGGRGFLNAKTLHNREVCNLRQYFLSVSVVMYRDVAAIDRGLTPLSLANGNWRRPQVLSTSDRTAIWKGKELHGRFYRALTGPDVDQLASVTWLRFSNLFGETEGFVFAIMDEVIMTNNYRKYILKDGTVDICRACHRPGESIRHVVSGCSRLANGEYLHRHNQVARIIHQQLALKYGLVDSEVPYYQYQPLPVLESGHITLYWDRSVITDRTIVANKPDIVIIDRSMRRVMLVDVTIPHDENLVKAEKEKLSKYLDLAHEVTAMWNVDSTIIIPMVISVNGLIAKSFDKHLEKLSLGRWVKGLIQKAVMLDTARIVRRFLSLEP

SEQ ID NO: 27719 - protein, 889 aa, Phalera bucephala
MARTLIAKLLCFQAGNNRPRVMRFVAQAFAGTGVAPVDYVAGVGERIDYWKQKVYAWAKRIRRYKARADRYHVNRTFQTNQRSVYQAWERPQERVTDVHLPNAAVMAEFWRKIWSVPVSHSEGEWFDVVGRSCGPIQEMEPVVINREDLACAVRAAPNWKSPGPDGLHAFWLKRLQGSHSRLATQFQEALQLGSLPSFMTSGVTHLIYKSGSTSEPKNYRPITCLPTVYKLFTSILRIKINNHLKAQHILSPTQNGCKGGSRGTKDLLLIDMAICQQVRRSRKNVFMAWIDYKKAYDSVPHTWLGRVLELYRVHPALCSFLGSCMRQWTTVLRHPGCGGLSGSSDLIKISRGIFQGDSLSPLWFCLALNPLSAILKDSKLGYHLRRESEPISHLLYMDDLKLYASKKTDLMKLLKITGNFSNDIGMEVGVDKCAVIHVQRGRVEDSFNLQLSEDISLRSLSEMDSYKYLGMSQALSIAEQDMKQSLKDRFFARLIKVLKSLLSGGNKVRAFNGWVMPVLTYSFGILRWTQSELNALDRKVRRLLTAYRMHHPRSSVMKLYIPRKCGGRGFLNAKTLHNREVCNLRQYFLSVSVVMYRDVAAIDRGLTPLSLANENWRRPQVLSISDRTAIWKGKELHGRFYRALTGPDVDQLASVNWLRFSNLFGETEGFVFAIMDEVIMTNNYRKHILKDGTVDICRACHRPGESIRHVVSGCSRLANGEYLHRHNQVARIIHQQLALKYGLVDSEVPYYQYQPLPVLESGHITLYWDRSIITDRTIVANKPDIVIIDRSMRRVMLVDVTIPHDENLVKAEKEKLSKYLDLAHEVTAMWSVDSTIIIPMVISVNGLIAKSFDKHLEKLSLGSWVKGLIQKAVMLDTARIVRRFLSLEP

SEQ ID NO: 27720 - protein, 1204 aa, Phalera bucephala
MAEPSRRNPVRLCRQRDARSPSARPTPLPGSPASPQPSEDEDFFTPPTSGASSDDAGISASPPTLTSARRGRPPLPARLGPAGHCAPPTAPATGGVVRRMRWTPELNLSVMRAYYGATEGGTILTAYRPKLLSLFQGLHPTVAVTAQRLSDQVRAIQRCKLLDDTVLERLHREALPARTESNVRSVEDPISLNNFARSEEVNSEQVSVSDQLQEQVRRALEDAFAEYRSAPISLRPSLPRLPMHRRNISLVSALDNVLKPHWETSVDLCDTHSILYCGPVAVCRVAGVRFPNLHRATQPTNAKPLWQCRIERRINMARTLIAKLLCFQAENNRPRVVRFVTQAFAGTRVAPVDYVAGVAERIDYWKQKVYAWAKRIRRYKARADRYHVNRTFQTNQRSVYQAWERPQERVTDVHLPNAAVMAEFWRKIWSVPVTHSEGEWFDVVGRSCGPIQEMEPVVISREDLACAVRAAPNWKSPGPDGLHAFWLKRLQGSHSRLATQFQEALQLGSLPSFMTSGITHLIHKSGSTSEPKNYRPITCLPTVYKLLTSILRIKINNHLKAQHILSPTQTGCKGGSRGTKDLLLIDIAICQQVRRSRKNVSMAWIDYKKAYDSVPHTWVERVLELYRVHPALCSFLGSCMRQWTTVLRHPGCGGLSGSSDLIKISRGIFQGDSLSPLWFCLALNPLSAILKDSKLGYHLRRESEPISHLLYMDDLKLYASKKTDLMELLKITGNFSNDIGMEFGVDKCAVIHVQRGRVEDSFNLQLSEDISLRSLSEMDSYKYLGMSQALSIAEQDMKQSLRDRFFARLIKVLKSLLSGGNKVRAFNGWVMPVLTYSFGILRWTQSELDALDRKVRRLLTAYRMHHPRSSVMRLYIPRKCGGRGFLNAKTLHNREVCNLRQYFLSVSVVMYRDVAAIDRGLTPLSLANGNWRRPQVLSTSDRTAIWKGKELHGRFYRALTGPDVDQLASVTWLRFSNLFGETEGFVFAIMDEVIMTNNYRKHILKDGTVDICRACHRPGESIRHVVSGCSRLANGEYLHRHNQVARIIHQQLALKYGLVDSEVPYYQYQPLPVLESGHITLYWDRSIITDRTIVANKPDIVIIDRSMRRVMLVDVTIPHDENLVKAEKEKLSKYLDLAHEVTTMWNVDSTIIIPMVVSVNGLIAKSFDKHLEKLSLGSWVKGLIQKAVMLDTARIVRRFLSLEP

SEQ ID NO: 27721 - protein, 1204 aa, Phalera bucephala
MAEPSRRNPVRLCRQRDARSPSARPTPLPGSPTSPQPSEDEDFFTPPTSGASSDDAGISASPPTLTSARRGRPPLPARLGPAGHCAPPTAPATGGVVRRMRWTPELNLSVMRAYYGATEGGTILTAYRPKLLSLFQGLHPTVAVTTQRLSDQVRAIQRCKLLDDTVLERLHREALPARTESNVRSVEDPISLNNFARSEEVISEQVSVSDQLQEQVRRALEDAFAEYRSAPISLRPCLPRFPMHRRNISLVSALDNVLKPHWETSVDLCDTHSILYCGAVAVCRVAGVRFPNLHRATQPTNAKPLWQCRIERRINMARTLIAKLLCFQAGNNRPRVVRFVTQAFAGTRVARVDYVAGVAERIDYWKQKVYAWAKRIRRYKARADRYHVNRTFQTNQRSVYQAWERPQERVTDVHLPNAAVMAEFWRKIWSVPVTHSEGEWFDVVGRSCGPIQEMEPVVISREDLACAVRAAPNWKSPGPDGLHAFWLKRLQGSHSRLATQFQEALQLGSLPSFMTSGVTHLIHKSGSTSEPKNYRPITCLPTVYKLLTSILRIKINNHLKAQHILSPTQNGCKGGSRGTKDLLLIDIAICQQVRRSRKNVSMAWIDYKKAYDSVPHTWLGRVLELYRVHPALCSFLGSCMRQWTTVLRHPGCGGLSGSSDLIKISRGIFQGDSLSPLWFCLALNPLSAILKHSKLGYHLRRESEPISHLLYMDDLKLYASKKTDLMELLKITGNFSNDIGMEFGVDKCAVIHVQRGRVEDSFNLQLSEDISLRSLSEMDSYKYLGMSQALSIAEQDMKQSLRDRFFARLIKVLKSLLSGGNRVRAFNGWVMPVLTYSFGILRWTQSELDALDRKVRRLLTAYRMHHPRSSVMRLYIPRKCGGRGFLNAKTLHNREVCNLRQYFLSVSVVMYRDVAAIDRGLTPLSLANGNWRRPQVLSTSDRTAIWKGKELHGRFYRALTGPDVDQLASVTWLRFSNLFGETEGFVFAIMDEVIMTNNYRKYILKDGTVDICRACHRSGESIRHVVSGCSRLANGEYLHRHNQVARIIHQQLALKYGLVDSEVPYYQYQPLPVLESGHITLYWDRSVITDRTIVANKPDIVIIDRSMRRVMLVDVTIPHDENLVKAEKEKLSKYLDLAHEVTAMWNVDSTIIIPMVVSVNGLIAKSFDKHLEKLSLGSWVKGLIQKAVMLDTARIVRRFLSLEP

SEQ ID NO: 27722 - protein, 1204 aa, Phalera bucephala
MTEPSRRNPVRLCRQRDARSPSARPTPLPGSPTSPQPSEDEDFFTPPTSGASSDDAGISASPPTITSARRGRPPLPARLGPAGHCAPPTAPATGGVVRRMRWTPELNLSVMRAYYGATEGGTILTAYRPKLLSLFQGLHPTVAVTAQRLSDQVRAIQRCKLLDDTVLERLHREALPARTESNVRSVEDPISLNNFARLEEVNSEQVSVSDQLQEQVRRALEDAFAEYRSAPISLRPCLPRLPMHRRNISLVSALDNVLKPHWETSVDLCDTHSILYCGAVAVCRVAGVRFPNLHRATQPTNAKPLWQCRIERRINMARTLIAKLLCFQAGNNRPRVVRFVTQAFAGTRVAPVDYVAGVAERIDYWKQKVYAWAKRIRRYKARADRYHVNRTFQTNQRSVYQAWERPQERVTDVHLPNAAVMAEFWRKIWSVPVTHSEGEWFDVVGRSCGPIQEMEPVVISREDLACAVRAAPNWKSPGPDGLHAFWLKRLQGSHSRLATQFQEALQLGSLPSFMTSGVTHLIHKSGSTSEPKNYRPITCLPTVYKLLTSILRIKINNHLKAQHILSPTQNGCRGGSRGTKDLLLIDIAICQQVRRSRKNVSMAWIDYKKAYDSVPHTWLGRVLELYRVHPALCSFLGSCMRQWTTVLRHPGCGGLSGSSDLIKISRGIFQGDSLSPLWFCLALNPLSAILKDSKLGYHLRRESEPISHLLYMDDLKLYASKKTDLMELLKITGNFSNDIGMEFGVDKCAVIHVQRGRVEDYFNLQLSEDISLRSLSEMDSYKYLGMSQALSIAEQDMKQSLRDRFFARLIKVLKSLLSGGNRVRAFNGWVMPVLTYSFGILRWTQSELDALDRKVRRLLTAYRMHHPRSSVMRLYIPRKCGGRGFLNAKTLHNREVCNLRQYFLSVSVVMYRDVAAIDRGLTPLSLANGNWRRPQVLSTSDRTAIWKGKELHGRFYRALTGPDVDQLASVTWLRFSNLFGETEGFVFAIMDEVIMTNNYRKYILKDGTVDICRACHRPGESIRHVVSGCSRLANGEYLHRHNQVARIIHQQLALKYGLVDSEVPYYQYQPLPVLESGHITLYWDRSVITDRTIVANKPDIVIIDRSMRRVMLVDVTIPHDENLVKAEKEKLSKYLDLAHEVTAMWNVDSTIIIPMVVSVNGLIAKSFDKHLEKLSLGSWVKGLIQKAVMLDTARIVRRFLSLEP

SEQ ID NO: 27723 - protein, 1204 aa, Phalera bucephala
MAEPSRRNPVRLCRQRDARSPSARPTPLPGSPTSPQPSEDKDFFTPPTSGASSDDAGISASPPTLKSARRGRPPLPARLGPAGHCAPPTAPATGGVVRRMRWTPELNLSVMRAYYGATEGGTILTAYRPKLLSLFQGLHPTVAVTAQRLSDQVRAIQRCKLLDDTVLERLHREALPARTESNVRSVEDPISLNNFARSEEVNSEQVSVSDQLQEQVRRALEDAFAEYRSAPISLRPCLPRLPMHRRNISLVSALDNVLKPHWETSVDLCDTHSILYCGAVAVCRVAGVRFPNLHRATQPTNAKPLWQCRIERRINMARTLIAKLLCFQAGNNRPRVVRFVTQAFAGTRVAPVDYVAGVAERIDYWKQKVYAWAKIIRRYKARADRYHVNRTFQTNQRSVYQAWERPQERVTDVHLPNAAVMAEFWRKIWSVPVTHSEGEWFDVVGRSCGPIQEMEPVVISREDLACAVRAAPNWKSPGPDGLHAFWLKRLQGSHSRLATQFQEALQLGSLPSFMTSGVTHLIHKSGSTSEPKNYRPITCLPTVYKLLTSILRIKINNHLKAQHILSPTQNGCKGGSRGTKDLLLIDIAICQQVRRSRKNVSMAWIDYKKAYDSVPHTWLGRVLELYRVHPALCSFLGSCMRQWTTVLRHPGCGGLYGSSDLIKISRGIFQGDSLSPLWFCLALNPLSAILKDSKLGYHLRRESEPISHLLYMDDLKLYASKKTDLMELLKITGNFSNDIGMEFGVDKCAVIHVQRGRVEDSFNLQLSEDISLRSLSEMDSYKYLGMSQALSIAEQDMKQSLRDRFFARLIKVLKSLLSGGNRVRAFNGWVMPVLTYSFGILRWTQSELDALDRKVRRLLTAYRMHHPRSSVMRLYIPRKCGGRGFLNAKTLHNREVCNLRQYFLSVSMVMYRDVAAIDRGLTPLSLANGNWRRPQVLSTSDRTAIWKGKELHGRFYRALTGPDVDQLASVTWLRFSNLFGETEGFVFAIMDEVIMTNNYRKYILKDGTVDICRACDRPGESIRHVVSGCSRLANGEYLHRHNQVARIIHQQLALKYGLVDSEVPYYQYQPLPVLESGHITLYWDRSVITDRTIVANKPDIVIIDRSMRRVMLVDVTIPHDENLVKAENEKLSKYLDLAHEVTAMWNVDSTIIIPMVVSVNGLIAKSFDKHLEKLSLGSWVKGLIQKAVVLETARIVRRFLSLEP

SEQ ID NO: 27724 - protein, 1201 aa, Phalera bucephala
MAEYPRRNPVRRCRQRIAQGHSARPSPLRGSPNSPQSSENELYFTPPTSGASSDETEPPASSHPLRPERRGRPPLPACIGPAEHCAPPTAPATGGVVRRMRWTSELNMSVMRAYYGATKGETILTAYRPKLLSLFQELHPTVAVTAQRLSDQVRAIQRCKLLDDTVLERLRSETCPARTESDLRSFEEPISLDSFARSEEVNSGQVSVGDQLQEQVRRALKDAFAEYRSAPISLRPCLPRLPMHRHNISLVGALDNVLKSHWETSVDLCDTHSILYCGAVAVCRVAGVRFPNLHRATQPTNAKPFWQCRIERRINMARTLIAKLLCFQAGNNRPRVVRFVAQAFAGTGVAPVDYMARVTERIDYWKQKVYAWANRIRRYRERADRYHVNRTFEVNQRSVYQAWERPQERVTDVHLPDAATMAEFWRKIWSVPVSHSEGEWFDVVGRSCEPIQEMEPVVITRDDVACAVRAAPNWKSPGPDGLHAFWLKRLQGSHARLATQFQEALELGSLPSLLTTGVTHLIHKSGSTLEPKNYRPITCLPTVYKLLTSILRTKINNHLKAQHILSPTQNGCKGGSRGTKDLLLIDMAICQQVRRSRKNVSMAWIDYKKAYDSVPHTWLRRVLELYKVHPALCSFLGLCMGQWTTVLRHPGYGGLSGSSDLIKISRGIFQGDSLSPLWFCLALNPLSAILKNSKLGYHLRRGSEPISHLLYMDDLKLYASKKTDLMELLKITGNFSNDIGMEFGVDKCAVIHVQRGRVEDSFNLQLSEDISLRSLSEMDSYKYLGMSQALSIAEQDMKQSLKDRFFARLMKVLKSLLSGGNRVRAFNGWVMPVLTYSFGILRWTQSELDALDRKVRRLLTAYRMHHPRSSVMRLYIPRRCGGRGFLNAKTLHNREVCNLRQYFLSVSVVMYRDVAAIDRGLTPLSLANGNWRRPQVLSISDRTAIWKGKELHGRFYRALTGPDVDQLASVTWLRFSNLFGETEGFVFAIMDEVIMTNNYRKHILKDGTVDICRACHRPGESIRHVVAGCSRLANGEYLHRHNQVANIIHQQLALKYDLVDSEVQYQPLPVLESGHITLYWDRSIITDRTIVANKPDIVIIDRSMRRVMLVDVTIPHDENLVKAEKEKISKYLDLAHEVTAMWNVDSTIIIPMVVSVNGLIAKSFDKHLEKLSLGSWVKGLIQKVVVLDTARIVRRFLSLEP

SEQ ID NO: 27725 - protein, 1105 aa, Phalera bucephala
MRWTSELNMSVMRAYYGATKGETILTAYRPKLLSLFQELHPTVAVTAQRLSDQVRAIQRCKLLDDTVLERLRSETCPARTESDLRSFEEPISLDNFARSEEVNSGQVSVGDQLQEQVRRALKDAFAEYRSAPISLRPCLPRLPMHRHNISLVGALDNVLKSHWETSVDLCDTHSILYCGVVAVCRVAGVRFPNLHRATQPTNAKPFWQCRIERRINMARTLIAKLLCFQAGNNRPRVVRFVAQAFAGTGVAPVDYMARVTERIDYWKQKVYAWANRIRRYRERADRYHVNRTFEVNQRSVYQAWERPQERVTDVHLPDAATMAEFWRKIWSVPVSHSEGEWFDVVGRSCEPIQEMEPVVITRDDVACAVRAAPNWKSPGPDGLHAFWLKRLQGSHARLATQFQEALELGSLPSLLTTGVTHLIHKSGSTLEPKNYRPITCLPTVYKLLTSILRTKINNHLKAQHILSPTQNGCKGGSRGTKDLLLIDMAICQQVRRSRKNVSMAWIDYKKAYDSVPHTWLRRVLELYKVHPALCSFLGLCMGQWTTVLRHPGYGGLSGSSDLIKISRGIFQGDSLSPLWFCLALNPLSAILKNSKLGYHLWRGSEPISHLLYMDDLKLYASKKTDLMELLKITGNFSNDIGMEFGVDKCAVIHVQRGRVEDSFNLQLSEDISLRSLSEMDSYKYLGMSQALSIAEQDMKQSLKDRFFARLMKVLKSLLSGGNRVRAFNGWVMPVLTYSFGILRWTQSELDALDRKVRRLLTAYRMHHPRSSVMRLYIPRRCGGRGFLNAKTLHNREVCNLRQYFLSVSVVMYRDVAAIDRGLTPLSLANGNWRRPQVLSISDRTAIWKGKELHGRFYRALTGPDVDQLASVTWLRFSNLFGETEGFVFAIMDEVIMTNNYRKHILKDGTVDICRACHRPGESIRHVVSGCSRLANGEYLHRHNQVAKIIHQQLALKYDLVDSEVPYYQYQPLPVLESGHITLYWDRSIITDRTIVANKPDIVIIDRSMRRVMLVDVTIPHDENLVKAEKEKISKYLDLAHEVTAMWNVDSTIIIPMVVSVNGLIAKSFDKHLEKLSLGSWVKGLIQKVVVLDTARIVRRFLSLEP

SEQ ID NO: 27726 - protein, 1109 aa, Junonia evarete
MKWSQKMNESVMRAYYGATGGGINLTAYRSTMLSMFQALEPTVTVTAQRLSDQVRAIQRCHLLDESVLERLRSNLQQINAVSDSHSVQQPRYEQIEATDNISNSWPPNSVDLSVSNQDDEHMRRTLEDAILKYRPMPFNLRPRIPRLPIHKRNITIVGVVDKMLQQYLNNSQDLYDTCSIMYCGAVAVCNLALVKFKTNKIIPISNTVPAWQARIENRISSTRTIIGKLISFKSGNNRPRIMRYVHQAFAGTNIRSSEYMDSVTERIDFFKQKIFAWAKRIRRYKKRVSRYRQNRMFQSDQRKVYRDWEQCNDTVASSAFPPSEVTSEFWRSIWSAPIEHTEGEWMSAVRKECESLPQMEPVTISPEDISCAIRTSSNWKCPGPDGLHNFWLKNFHSSHSVLASQFQNALVSGTLPTFLTTGTTSLLYKSGCTADPKNYRPITCLSTTYKLLTSILAAKINKHITANNILAPAQNGCRSGSRGTKELLLIDMTICQQARRNRKNLCAAWIDYKKAYDSVPHTWLVGIMELYKIDATLYSFLRSCMGQWITYLRHPGSTDISGSTEPIRIKRGIFQGDSLSPLWFCLALNPLSTLLENSGLGFRLRRGSTIISHLLYMDDLKLYASKKSDLVKLLQITETFSSCIGMEFGIDKCAVIHVERGRVVSSEHIQLTQTLFLRSLDVGENYKYLGMSEALGIDDGSMKQLVKERFFGRLKKVLNSFLSGGNKVRAFNSWVMPLLVYTFGILRWTQTELDSLDRQVRKQLTTYRMHHPRSSVMRLYIPRKCGGRGFLNAKNLHNREVYNLRNYFLGISGGMHKDVVAVDKGLTPLSLGKENWRRPIVLDTHDRMTVWKGKELHGRFYRALMSSDVDQASSVSWLQYGDLFGETEGFVCAIMDEVIKTNNYRKFIMKDGTADVCRACHRPGESLRHIISGCCHLANGEYLHRHNQVARIIHQQLALRYGLVDIEVPYYRYNPAPVLENGNALLYWDRSIITDRHIPANKPDIVIVDRSARLAIIVDITIPHDDNLVKAEKEKLSKYLDLAHEITAMWSVDSTIIVPVVVSVNGLFAKSFDQHLKKLSLGCWIKGRLQKAVLLETARIVRRFLTLES

SEQ ID NO: 27727 - protein, 868 aa, Eilema depressum
MRFVTRAFSGTDIRPREFLSRVTERIDFLKQKIYAWANRIRRYKRRVDRYSQNRTFQRDERWVYRSWERPDSNGTDMRRPDDDATNTFWRSIWSTPVSHTEGDWMRVVERSCESMGTMEPVTISDEDVTNAVRLLPNWRSAGPDGLHNFWLKWFRSSHGRLAMQFQSCLESGSLPAFITTGVTHLLHKSGSTTDPKNYRPITCLPTVYKLLTSILREKISSHLIDNSIMSISQNGCRSGARGTKELLIIDMAICQQARRHRKDLATCWIDYKKAYDSVPHTWLLRVLELYKIDTTLCTFMKTCMGQWRTVLCYPGCRQICEDSGLIKIERGIFQGDSLSPLWFCLALNPLSTILDSSGLGCRLRRDGQVISHLLYMDDLKLFAPNNLHLIELLKLTETFSNSIRMDFGVDKCAVMHVKRGRIVESDSVELSDSTKLRALSATDTYKYLGMSQALGISEAGMKQSLQERFFGRLKKVLKSLLSGGNKVRACNGWVMPVLMYSFGILRWTQTELEALDRKVRAHLTAYRMHHPRSSVMRLYIPRKCGGRGFLNAKTLHNREVCNLREYFLHNDADLHRDVVMVDNGLTPLGLAKENWRKPAVLSINDRKDVWKGKELHGRFYRALHGPEIDIPASLSWLRFGDLFGETEGFVFAIMDEVVMTNNYRRYIIKDGTVDICRACHRPGESLRHIISGCSRLANGEYLHRHNQVARIIHQQLALKYNLVESEVPYYRYVPDPVLENGHITLYWDRSIITDRTIVANKPDIVIIDRLERRAIIVDITIPHDENLMKAEKEKQIKYLDLAHEIVDMWDVDSAIIVPIVVAVHGLIAKSLDQHLKRLSLDGWLKGLMQKAVLLGTARIVRKFLSLEP

SEQ ID NO: 27728 - protein, 1207 aa, Clostera curtula
MSTSAMERRLNPRRQCRQPYETNARITSAVVSSNRVQSSDEEFFTPPGTASSSEDEPTPSPSLSRRPARRGRPPLPASLGSTGHRALPTAPATGGVVRRMRWTNNLNESVMRAYYGATDGGTNLTAYRSRLLALFQELHPDVTVNAQRLSDQVRAIQRLNLLEQPLLERLRLEALPPQSVSSVQTTTPAAACLLPPSVEQLGFEQIEEVSLNDRYNEQLRRILEETIEEYRLIPVTSRPRLPRLPMHKRNMALVSALDSLLTDKLNSVVDLSELHFILYCGAVAVCRVAGVTFPKNSTASRQTSCKPAWQYRIEKRITAARTLIAKLYCFRTGNTRPRVMRYVIQAFAGTGVRQCDYTACIAERIDYFKQKVYAWAKRIRRYRERADRFNQNRLFQNDQKIIYRNWERPQPPLADVMTPDADTMLAFWRNIWSRPVEHLEGQWIGAVSRACDQITPMDPVHVDLNDVISAIRLAPNWKSPGPDGLHNFWIKKVRSCHARLATLFQAALEAGSLPDFMTTGVTHLIHKSGRISEPKNYRPITCLPTIYKLLTSIVKFKIVNHILANNILASNQNGCNAGSRGTKDLLLIDMAICQQVRRSKKNISMAWIDYKKAYDSVPHSWLMRVLDLYKVDANLCFFLSSCMRQWSTVLYHPGHRHFSEPSERIWIKRGIFQGDSLSPLWFCLALNPLSILLNDSMPGYRLHRGGKTISHLLYMDDLKLYAPKQSDLMALLKVTENFSSAIGMEFGVDKCAVINVQKGRVVNSENLQLSGNVVLRSLCESDTYKYLGMSEALGIADSDVKQQLKTRFLGRLTKVLKSLLSGGNKVRAFNCWVIPVIAYSFGILRWTQSELDALDRMARRQLTAFRMHHPRSSVMRLYIPRRCGGRGFLNVKSLHNREICNLRDYFLRVDDEMHRDVVKVDSGLTALSMAKQNWRRPQVLSISERKAIWKGKELHGRFYSALTGPEIDQLASVSWLRFGNLFGETEGFVFAIMDEVVKTNNYRKYIIKDGTVDICRACHCPGESIRHVVSGCSRLANGEYLHRHNQVAGIIHQQLALRYGIVESEVPYYQYKPEPVLSNNHVTLYWDRSIVTDRTIMANKPDIVVIDRSVRRAMLIDITIPHDVNLVKAEHEKISKYLDLSHEVGAMWNMDSTIIVPIVISVHGLMAKSFDQHLQKLSLGSWVKSLIQKAVLLDTARIVRRFLTLDP

SEQ ID NO: 27729 - protein, 1204 aa, Phalera bucephala
MAEPSRKNPVRLCRQRDARSPSARPTPLPGSPTSPQPSEDEDFFTPPTSGASSDDAGISASPPTLTSARRGRPPLPARLGPAGHCAPPTAPATGGVVRRMRWTPELNLSVMRAYYGATEGGTILTAYRPKLLSLFQGLHPTVAVTAQRLSDQVRAIQRCKLLDDTVLERLHREALPARTESNVRSVEDPISLNNFARSEEVNSEQVSVSDQLQEQVRRALEDAFAEYRSAPISLRPCLPRLPMHRRNISLVGALDNVLKPHWETSVDLCDTHSILYCGAVTVCRVAGVRFPNLHRATQPTNAKPLWQCRIERRINMARTLIAKLLCFQAGNNRPRVVRFVTQAFAGTRVAPVDYVAGVAERIDYWKQKVYAWAKRIRRYKARADRYHVNRTFQTNQRSVYQAWERPQERVTDVHLPNAAVMAEFWRKIWSVPVTHSEGEWFDVVGRSCGPIQEMEPVVISREDLACAVRAAPNWKSPGPDGLHAFWLKRLQGSHSRLATQFQEALQLGSLPSFMTLGVTHLIHKSGSTSEPKNYRPITCLPTVYKLLTSILRIKINNHLKAQHILSPTQNGCKGGSRGTKDLLLIDIAICQQVRRSRKNVSMAWIDYKKAYDSVPHTWLGRVLELYRVHPALCSFLGSCMRQWTTVLRHPGCGGLSGSSDLIKISRGIFQGDSLSPLWFCLALNPLSAILKDSKLGYHLRSESEPISHLLYMDDLKLYASKKTDLMELLKITGNFSNDIGMEFGVDKCAVIHVQRGRVEDSFNLQLSEDISLRSLSEMDSYKYLGMSQALSIGEQDMKQSLRDRFFARLIKVLKSLLSGGNRVRAFNGWVMPVLTYSFGILRWTQSELDALDRKVRRLLTAYRMHHPRSSVMRLYIPRKCGGRGFLNAKTLHNREVCNLRQYFLSVSVVMYRDVAAIDRGLTPLSLANGNWRRPQVLSTSDRTAIWKGKELHGRFYRALTGPDVDQLASVTWLRFSNLFGETEGFVFAIMDEVIMTNNYRKYILKDGTVDICRACHRPGESIRHVVSGCSRLANGEYLHRHNQVARIIHQQLALKYGLVDSEVPYYQYQPLPVLESGHITLYWDRSVITDRTIVANKPDIVIIDRSMRRVMLVDVTIPHDENLVKAEKEKLSKYLDLAHEVTAMWNVDSTIIIPMVVSVNGLIAKSFDKHLEKLSLGSWVKGLIQKAVMLDTARIVRRFLSLEP

SEQ ID NO: 27730 - protein, 1204 aa, Phalera bucephala
MAEYPRRNPVRRCRQRIAQGHSARPSPLRGSPNSPQSSENELYFTPPTSGASSDETEPPASSHPLRPERRGRPPLPACMGPAEHCAPPTAPATGGVVRRMRWTSELNMSVMRAYYGATKGETILTAYRPKLLSLFQELHPTVAVTAQRLSDQVRAIQRCKLLDDTVLERLRSETCPARTESDLRSFEEPISLDNFARSEEVNSGQVSVGDQLQEQVRRALKDAFAEYRSAPISLRPCLPRLPMHRHNISLVGALDNVLKSHWETSVDLCDTHSILYCGAVAVCRVAGVRFPNLHRATQPTNAKPFWQCKIERRINMARTLIAKLLCFQAGNNRPRVVRFVAQAFAGTGVAPVDYMARVTERIDYWKQKVYALANRIRRYRERADRYHVNRTFEVNQRSVYQAWERPQERVTDVHLPDAATMAEFWRKIWSVPVSHSEGEWFDVVGRSCEPIQEMEPVVITRDDVACAVRAAPNWKSPGPDGLHAFWLKRLQGSHARLATQFQEALELGSLPSLLTTGVTHLIHKSGSTLEPKNYRPITCLPTVYKLLTSILRTKINNHLKAQHILSPTQNGCKGGSRGTKDLLLIDMAICQQVRRSRKNVSMAWIDYKKAYDSVPHTWLGRVLELYKVHPALCSFLGLCMGQWTTVLRHPGYGGLSGSSDLIKISRGIFQGDSLSPLWFCLALNPLSAILKNSKLGYHLRRGSEPISHLLYMDDLKLYASKKTDLMELLKITGNFSNDIGMEFGVDKCAVIHVQRGRVEDSFNLQLSEDISLRSLSEMDSYKYLGMSQALSIAEQDMKQSLKDRFFARLMKVLKSLLSGGNRVRAFNGWVMPVLTYSFGILRWTQSELDALDRKVRRLLTAYRMHHPRSSVMRLYIPRRCGGRGFLNAKTLHNREVCNLRQYFLSVSVVMYRDVAAIDRGLTPLSLANGNWRRPQVLSISDRTAIWKGKELHGRFYRALTGPDVDQLASVTWLRFSNLFGETEGFVFAIMDEVIMTNNYRKHILKDGTVDICRACHRPGESIRHVVSGCSRLANGEYLHRHNQVAKIIHQQLALKYDLVDSEVPYYQYQPLPVLESGHITLYWDRSIITDRTIVANKPDIVIIDRSMRRVMLVDVTIPHDENLVKAEKEKISKYLDLAHEVTAMWNVDSTIIIPMVVSVNGLIAKSFDKHLEKLSLGSWVKGLIQKVVVLDTARIVRRFLSLEP

SEQ ID NO: 27731 - protein, 1204 aa, Phalera bucephala
MAEPSRRNPVRLCRQRDARSPSARPTPLPGSPTSPQPSEDEDFFTPPTSGASSDDAGISASPPTLTSARRGRPPLPARLGPAGHCAPPTAPATGGVVRRMRWTPELNLSVMRAYYGATEGGTILTAYRPKLLSLFQGLHPTVAVTAQRLSDQVRAIQRCKLLDDTVLERLRREALPARTDFNVRSVEEPISLNNFARSEEVNSEQVSVSDQLQEQVRRALEDAFAEYRSAPISLRPCLPRLPMHRRNISLVSALDNVLKPHWETSVDLCDTHSILYCGAVAVCRVAGVRFPNLHRATQPTNTKPFWQCRIERRINMARTLIAKLLCFQAGNNRPRVVRFVTQAFAGTRVAPVDYVAGVAERIDYWKQKVYAWAKRIRRYKARADRYHVNRTFQTNQRSVYQAWERPQERVTDVHLPNAAVMAEFWRKIWSVPVTHSEGEWFDVVGRSCGPIQEMEPVVISREDLACAVRAAPNWKSPGPYGLHAFWLKRLQGSHSRLATQFQEALQLGSLPSFMTSGVTHLIHKSGSTSEPKNYRPITCLPTVYKLLTSILRIKINNHLKAQHILSPTQNGCKGGSRGTKDLLLIDIAICQQVRRSRKNVSMAWIDYKKAYDSVPHTWLGRVLELYRVHPALCSFLGSCMGQWTTVLRHPGCGGLSGSSDLIKISRGIFQGDSLSPLWFCLALNPLSAILKDSKLGYHLRRESEPISHLLYMDDLKLYASNKTDLMELLKITGNFSNDIGMEFGVDKCAVIHVQRGRVEDSFNLQLSEDISLRSLSEMDSYKYLGMSQALSIAEQDMKQSLKDRFFARLIKVLKSLLSGGNKVRAFNGWVMPVLTYSFGILRWTQSELDALDRKVRRLLTAYRMHHPRSSVMRLYIPRKCGGRGFLNAKTLHNREVCNLRQYFLSVSVVMYRDVAAIDRGLTPLSLANGNWRRPQVLSTSDRTAIWKGKELHGRFYRALTGPDVDQLASVTWLRFSNLFGETEGFVFAIMDEVIMTNNYRKHILKDGTVDICRACHRPGESIRLVVSGCSRLANGEYLHRHNQVARIIHQQLALKYGLVDSEVPYYQYQPLPVLESGHITLYWDRSVITDRTIVANKPDIVIIDRSMRRVMLVDVTIPHDENLVKAEKEKLSKYLDLAHEVTTMWNVNSTIIIPMVVSVNGLIAKSFDKHLEKLSLGSWVKGLIQKAVMLDTARIVRRFLSLEP

SEQ ID NO: 27732 - protein, 1204 aa, Phalera bucephala
MAEPSRRNPVRLCRQRDARSPSARPTPLPGSPTSPQPSEDEDFFTPPTSGASSDDAGISASPPTLTSARRGRPPLPARLGPAGHCAPPTAPATGGVVRRMRWTPELNLSVMRAYYGATEGGTILTAYRPKLLSLFQGLHPTVAVTAQRLSDQVRAIQRCKLLDDTVLERLHREALPARTESNVRSVEDPISLNNFARSEEVNSEQVSVSDQLQEQVRRALEDAFAEYRSAPISLRPCLPRLPMHRRNISLVSALDNVLKPHWETSVDLCDTHSILYCGAVAVCRVAGVRFPNLHRATQPTNAKPLWQCRIERRINMARTLIAKLLCFQAGNNRPRVVRFVTQAFAGTRVAPVDYVAGVAERIDYWKQKVYAWAKRIRRYKARADRYHVNRTFQTNQRSVYQAWERPQERVTDVHLPNAAVMAEFWRKIWSVPVTHSEGEWFDVVGRSCGPIQEMEPVVISREDLACAVRAAPNWKSPGPDGLHAFWLKRLQGSHSRLATQFQEALQLGSLPSFMTSGVTHLIHKSGSTSEPKNYRPITCLPTVYKLLTSILRIKINNHLKAQHILSPTQNGCKGGSRGTKDLLLIDIAICQQVRRSRKNVSMAWIDYKKAYDSVPHTWLGRVLELYRVHPALCSFLGSCMRQWTTVLRHPGCGGLSGSSDLIKISRGIFQGDSLSPLWFCLALNPLSAILKDSKLGYHLRRESEPISHLLYMDDLKLYASKKTDLMELLKITGNFSNDIGMEFGVDKCAVIHVQRGRVEDSFNLQLSEDISLRSLSEMDSYKYLGMSQALSIAEQDMKQSLGDRFFARLIKVLKSLLSGGNRVRAFNGWVMPVLTYSFGILRWTQSELDALDRKVRRLLTAYRMHHPRSSVMRLYIPRKCGGRGFLNAKTLHNREVCNLRQYFLSVSVVMYRDVAAIDRGLTPLSLANGNWRRPQVLSTSDRTAIWKGKELHGRFYRALTGPDVDQLASVTWLRFSNLFGETEGFVFAIMDEVIMTNNYRKYILKDGTVDICRACHRPGESIRHVVSGCSRLANGEYLHRHNQVARIIHQQLALKYGLVDSEVPYYQYQPLPVLESGHITLYWDRSVITDRTIVANKPDIVIIDRSMRRVMLVDVTIPHDENLVKAEKEKLSKYLDLAHEVTAMWNVDSTIIIPMVVSVNGLIAKSFDKHLEKLSLGSWVKGLIQKAVMLDTARIVRRFLSLEP

SEQ ID NO: 27733 - protein, 1204 aa, Phalera bucephala
MAEPSRRNPVRLCRQRDARSPSARPTPLPGSPTSPQPSEDEDFFTPPTSGASSDDAGISASPPTLTSARRGRPPLPARLGPAGHCAPPTAPATGGVVRRMRWTPELNLSVMRAYYGATEGGTILTAYRPKLLSLFQGLHPTVAVTAQRLSDQVRAIQRCKLLDDTVLERLHREALPARTESNVRSVEDPISLNNFARSEEVNSEQVSVSDQLQEQVRRALEDAFAEYRSAPISLRPCLPRLPMHRRNISLVSALDNVLKPHWETSVDLYNTHSILYCGAVAVCRVAGVRFPNLHRATQPTNAKPLWQCRIERRINMARTLIAKLLCFQAGNNRPRVVRFVTQAFAGTRVAPVDYVAGVAERIDYWKQKVYAWAKRIRRYKARADRYHVNRTFQTNQRSVYQAWERPQERVTDVHLPNVAVMAEFWRKIWSVPVTHSEGEWFDVVGRSCGPIQEMEPVVISREDLACAVRAAPNWKSPGPDGLHAFWLKRLQGSHSRLATQFQEALQLGSLPSFMTSGVTHLIHKSGSTSEPKNYRPITCLPTVYKLLTYILRIKINNHLKAQHILSPTQNGCKGGSRGTKDLLLIDMAICQQVRRSRKNVSMAWIDYKKAYDSVPHTWLGRVLELYRVHPALCSFLGSCMRQWTTVLRHPGCGGLSGSSDLIKISRGIFQGDSLSPLWFCLALNPLSAILKDSKLGYHLRRESEPISHLLYMDDLKLYASKKTDLMELLKITGNFSNDIGMEFGVDKCAVIHVQRGRVEDSFNLQLSEDISLRSLSEMDSFKYLGMSQALSIAEQDMKQSLRDRFFARLIKVLKSLLSGGNRVRAFNGWVMPVLTYSFGILRWTQSELDALDRKVRRLLTAYRMHHPRSSVMRLYIPRKCGGRGFLNAKTLHNREVCNLRQYFLSVSVVMYRDVAAIDRGLTPLSLANGNWRRPQVLSTLDRTAIWKGKELHGRFYRALTGPDVDQLASVTWLRFSNLFGETEGFVFAIMDEVIMTNNYRKYILKDGTVDICRACHRPGESIRHVVSGCSRLANGEYLHRHNQVARIIHRQLALKYGLVDSEVPYYQYQPLPVLESGHITLYWDRSVITDRTIVANKPDIVIIDRSMRRVMLVDVTIPHDENLVKAEKEKLSKYLDLAHEVTAMWNVDSTIIIPMVVSVNGLIAKSFDKHLEKLSLGSWVKGLIQKAVMLDTARIVRRFLSLEP

SEQ ID NO: 27734 - protein, 1204 aa, Phalera bucephala
MAEPSRRNPVRLCRQRDARSPSARPTPLPGSPTSPQPSEDEDFFIPPTSGASSDDAGISASPPTSTSARRGRPPLPARLGPAGHCAPPTAPATGGVVRRMRWTPELNLSVMRAYYGATEGGTILTAYRPKLLSLFQGLHPTVAVTAQRLSDQVRAIQRCKLLDDTVLERLHREALPARTESNVRSDEDPISLNNFARSEEVNSEQVSVSDQLQEQVRRALEDAFAEYRSAPISLRPCLPRLPMHRRNISLVSALDNVLKPHWETSVDLCDTHSILYCGAVAVCRVAGVRFPNLHRATQPTNAKPLWQCRIERRINMARTLIAKLLCFQAGNNRPRVVRFVTQAFAGTRVAPVDYVAGVAERIDYWKQKVYAWAKRIRRYKARADRYHVNRTFQTNQRSVYQAWERPQERVTDVHLPNAAVMAEFWRKIWSVPVTHSEGEWFDVVGRSCGPIQEMEPVVISREDLACAVCAVPNWKSPGPDGLHAFWLKRLQGSHSRLATQFQEALQLGSLPSFMTSGVTHLIHKSGSTSEPKNYRPITCLPTVYKLLTSILRIKINNHLKAQHILSPTQTGCKGGSRGTKDLLLIDIAICQQVRRSRKNVSMAWIDYKKAYDSVPHTWLGRVLELYRVHPALCSFLGSCMRQWTTVLRHPGCGGLSGSSDLIKISRGIFQGDSLSPLWFCLALNPLSAILKDSKLGYHLRRESEPISHLLYMDDLKLYASKKTDLMELLKITGNFSNDIGMEFGVDKCAIIHVQRGRVEDSFNLQLSEDISHRSLSEMDSYKYLGMSQALSIAEQDMKQSLSDRFFARLIKVLKSLLSGGNKVRAFNGWVMPVLTYSFGILRWTQSELDALDRKVRRLLTAYRIHHPRSSVMRLYIPRKCGGRGFLNAKTLHNREVCNLRQYFLSVSVVMYRDVAAIDRGLTPLSLANGNWRRPQVLSTSDRTAIWKGKELHGRFYRALTGPDVDQLASVTWLSFSNLFGETEGFAFAIMDEVIMTNNYRKHILKDGTVDICRACHRPGESIRHVVSGCSRLANGEYLHRHNQVARIIHQQLALKYGLVDSEVPYYQYQPLPVLESGHITLYWDRSIITDRTIVANKPDIVIIDRLMRRVMLVDVTIPHDENLVKAEKEKLSKYLDLAHEVTAMWNVDSTIIIPMVVSVNGLIAKSFDKHLEKLSLGSWVKGLIQKAVMLDTARIVRRFLSLEP

SEQ ID NO: 27735 - protein, 968 aa, Phalera bucephala
MTYVRVDNNNNNTLVGALDNVLKSHWETSVDLCDTHSILYCGVVAVCRVAGVRFPNLHRATQPTNAKPFWQCRIERRINMARTLIAKLLCFQAGNNRPRVVRFVAQAFAGTGVAPVDYMARVTERIDYWKQKVYAWANRIRRYRERADRYHVNRTFEVNQRSVYQAWERPQERVTDVHLPDAATMAEFWRKIWSVPVSHSEGEWFDVVGRSCEPIQEMEPVVITRDDVACAVRAAPNWKSPGPDGLHAFWLKRLQGSHARLATQFQEALELGSLPSLLTTGVTHLIHKSGSTLEPKNYRPITCLPTVYKLLTSILRTKINNHLKAQHILSPTQNGCKGGSRGTKDLLLIDMAICQQVRRSRKNVSMAWIDYKKAYDSVPHTWLRRVLELYKVHPALCSFLGLCMGQWTTVLRHPGYGGLSGSSDLIKISRGIFQGDSLSPLWFCLALNPLSAILKNSKLGYHLRRGSEPISHLLYMDDLKLYASKKTDLMELLKITGNFSNDIGMEFGVDKCAVIHVQRGRVEDSFNLQLSEDISLRSLSEMDSYKYLGMSQALSIAEQDMKQSLKDRFFARLMKVLKSLLSGGNRVRAFNGWVMPVLTYSFGILRWTQSELDALDRKVRRLLTAYRMHHPRSSVMRLYIPRRCGGRGFLNAKTLHNREVCNLRQYFLSVSVVMYRDVAAIDRGLTPLSLANGNWRRPQVLSISDRTAIWKGKELHGRFYRALTGPDVDQLASVTWLRFSNLFGETEGFVFAIMDEVIMTNNYRKHILKDGTVDICRACHRPGESIRHVVSGCSRLANGEYLHRHNQVAKIIHQQLALKYDLVDSEVPYYQYQPLPVLESGHITLYWDRSIITDRTIVANKPDIVIIDRSMRRVMLVDVTIPHDENLVKAEKEKISKYLDLAHEVTAMWNVDSTIIIPMVVSVNGLIAKSFDKHLEKLSLGSWVKGLIQKVVVLDTARIVRRFLSLEP

SEQ ID NO: 27736 - protein, 973 aa, Clostera curtula
MTSRPRIPRLPMHKRNMALVSALDSLLMDKLNSVGDLTELHFILYCGAVAVCRVAGVTFPKNSTASRHSECKPAWQYRIEKRITAARTLIAKLYCFMTGNTRPRVMRYVIQAFAGTGVRQCDYAACVTERIDYFKQKVYAWAKRIRRYRERADRFNQNRLFQNDQKIIYRNWERPQPPTADLSTPDADTMLAFWRNIWSRPVDHLEGQWIGVVGRACEQITQMEPVHIELDDVISAIRSAPNWKSPGPDGLHNFWIKKVCSCHARLATLFQAALEAGSLPDFMTTGVTHLIHKSGRISEPTNYRPITCLPTIYKLLTSIIKFKIVNHILANNILASNQNGCNAGSRGTKDLLLIDMAICQQVRRSKKNISMAWIDYKKAYDSVPHSWLMRVLDLYKVDANLCLFLSSCMRQWSTVLYHPGHRHFFEASERIWIKRGIFQGDSLSPLWFCLALNPLSILLNDSMPGYRLHRGGKTISHLLYMDDLKLYAPKQSDLMALLKVTETFSSAISMEFGVDKCAVINVQKGRVVNSENLQLSENVILRSLCESDTYKYLGMSEALGIADSDVKQQLKTRFLGRLTKVLKSLLSGGNKVRAFNCWVIPVIAYSFGILRWTQSELDALDRMVRRQLTAFRMHHPRSSVMRLYIPRRCGGRGFLNVKSLHNREVCNLRDYFLRVDDEMHRDVVKVDSGLTALSMAKQNWRRPQVLSISERKAIWKGKELHGRFYSALTGPEIDQLASVSWLRFGNLFGETEGFVFAIMDEVVKTNNYRKYIIKDGTVDICRACHCPGESIRHVVSGCSRLANGEYLHRHNQVAGIIHQQLALRYGIVESEVPYYQYKPEPVLSNNHVTLYWDRSIVTDRTIMANKPDIVVIDRSTRRAMLIDITIPHDVNLVKAEHEKISKYLDLSHEVGAMWNMDSTIIVPIVISVHGLMAKSFDQHLQKLSLGSWVKSLIQKAVLLDTARIVRRFLTLDP

SEQ ID NO: 27737 - protein, 1204 aa, Phalera bucephala
MAERSRRNPVRLCRQRDARTPSARPTPLPGSPTSPQPSEDEDFFTPPTSGASSDDAGISASPPTLTSARRGRPPLPARLGPAGHCAPPTAPATGGVVRRMRWTPELNLSVMRAYYGATEGGTILTAYRPKLLSLFQGLHPTVAVTAQRLSDQVRAIQRCKLLDDTVLERLHREALPARTESNVRSVEDPISLNNFARSEEVNSEQVSVSDQLQEQVRRALEDAFAEYRSAPISLRPCLPRLPMHRRNISLVSALDNVLKPHWETSVDLCDTHSILYCGAVAVCRVAGVRFPNLHRATQPTNAKPLWQCRIERRINMARTLIAKLLCFQAGNNRPRVVRFVTQAFAGTRVAPVDYVAGVAERIDYWKQKVYAWAKRIRRYKARADRYHVNRTFQTNQRSVYQAWERPQERVTDVHLPNAAVMAEFWRKIWSVPVTHSEGEWFDVVGRSCGPIQEMEPVVISREDLACAVRAAPNWKSPGPDGLHAFWLKRLQGSHSRLATQFQEALQLGSLPSFMTSGVTHLIHKSGSTSEPKNYRPITCLPTVYKLLTSILRIKINNHLKAQHILSPTQNGCKGGSRGTKDLLLIDIAICQQVRQSRKNVSMAWIDYKKAYDSVPHTWLGRVLELYRVHPALCSFLGSCMRQRTTVLRHPGCGGLSGSSDLIKISRGIFQGDSLSPLWFCLALNPLSAILKDSKLGYHLRRESEPISHLLYMDDLKLYASKKTDLMELLKITGNFSNEIGMEFGVDKCAVIHVQRGRVEDSFNLQLSEDISLRSLSEMDSYKYLGMSQALSIAEQDMKQSLRDRFFARLIKVLKSLLSGGNRVRAFNGWVMPVLTYSFGILRWTQSELDALDRKVRRLLTAYRMHHPRSSVMRLYIPRKCGGRWFLNAKTLHNREVCNLRQYFLSVSVVMYRDVAAIDRGLTPLSLANGNWRRPQVLSTSDRTAIWKGKELHGRFYRALTGPDVDQLASVTWLRFSNLFGETEGFVFAIMDEVIMTNNYRKYILKDGTVDICRACHRPGESIRHVVSGCSRLANGEYLHRHNQVARIIHQQLALKYGLVDSEVPYYQYQPLPVLESGHITLYWDRSVITDRTIVANKPDIVIIDRSMRRVMLVDVTIPHDENLVKAEKEKLSKYLDLAHEVTAMWNVDSTIIIPMVVSVNGLIAKSFDKHLEKLSLGSWVKGLIQKAVMLDTARIVRRFLFLEP

SEQ ID NO: 27738 - protein, 1204 aa, Phalera bucephala
MAEYPRRNPVRRCRQRIAQGHSARPSPLRGSPNSPQSSENELYFTPPTSGASSDETEPPASSHPLRPERRGRPPLPACIGPAEHCAPPTAPATGGVVRRMRWTSELNMSVMRAYYGATKGETILTAYRPKLLSLFQELHPTVAVTAQRLSDQVRAIQRCKLLDDTVLERLRSETCPARTESDLRSFEEPISLDNFARSEEVNSGQVSVGDQLQEQVRRALKDAFAEYRSAPISLRPCLPRLPMHRHNISLVGALDNVLKSHWETSVDLCDTHSILYCGAVAVCRVAGVRFPNLHRATQPTNAKPFWQCRIERRINMARTLIAKLLCFQAGNNRPRVVRFVAQAFAGTGVAPVDYMARVTERIDYWKQKVYAWANRIRRYRERADRYHVNRTFEVNQRSVYQAWERPQERVTDVHLPDAATMAEFWRKIWSVPVSHSEGEWFDVVGRSCEPIQEMEPVVITRDDVACAVRAAPNWKSPGPDGLHAFWLKRLQGSHARLATQFQEALELGSLPSLLTTGVTHLIHKSGSTLEPKNYRPITCLPTVYKLLTSILRTKINNHLKAQHILSPTQNGCKGGSRGTKDLLLIDMAICQQVRRSRKNVSMAWIDYKKAYDSVPHAWLRRVLELYKVHPALCSFLGLCMGQWTTVLRHPGYRGLSGSSDLIKISRGIFQGDSLSPLWFCLALNPLSAILKNSKLGYHLRRGSEPISHQLYMDDLKLYASKKTDLMELLKITGNFSNDIGMEFGVDKCAVIHVQRGRVEDSFNLQLSEDISLRSLSEMDSYKYLGMSQALSIAEQDMKQSLKDRFFARLMKVLKSLLSGGNRVRAFNGWVMPVLTYSFGILRWTQSELDALDRKVRRLLTAYRMHHPRSSVMRLYIPRRCGGRGFLNAKTLHNREVCNLRQYFLSVSVVMYRDVAAIDRGLTPLSLANGNWRRPQVLSISDRTAIWKGKELHGRFYRALTGPDVDQLASVTWLRFSNLFGETEGFVFAIMDEVIMTNNYRKHILKDGTVDICRACHRPGESIRHVVSGCSRLANGEYLHRHNQVAKIIHQQLALKYDLVDSEVPYYQYQPLPVLESGHITLYWDRSIITDRTIVANKPDIVIIDRSMRRVMLVDVTIPHDENLVKAEKEKISKYLDLAHEVTAMWNVDSTIIIPMVVSVNGLIAKSFDKHLEKLSLGSWVKGLIQKVVVLDTARIVRRFLSLEP

SEQ ID NO: 27739 - protein, 1204 aa, Phalera bucephala
MAEPSRRNPVRLCRQRDARSPSARPTPLPGSPTSLQPSEDEDFFTPPTSGASSDDAGISASPPTLTSARRGRPPLPARLGPAGHCAPPTAPATGGVVRRMRWTPELNLSVMRAYYGATEGGTILTAYRPKLLSLFQGLHPTVAVTAQRLSDQVRAIQRCKLLDDTVLERLRREALPARTDFNVRSVEEPISLNNFARSEEVNSEQVSVSDQLQEQVRRALEDAFAEYRSAPISLRPCLPRLPMHRRNISLVSALDNVLKPHWETSVDLCDTHSILYCGAVAVCRVAGVRFPNLHRATQPTNTKPFWQCRIERRINMARTLIAKLLCFQAGNNRPRVVRFVTQAFAGTRVAPVDYVAGVAERIDYWKQKVYAWAKRIRRYKARADRYHVNRTFQTNQRSVYQAWERPQERVTDVHLPNAAVMAEFWRKIWSVPVTHSEGEWFDVVGRSCGPIQEMEPVVISREDLACAVRAAPNWKSPGPDGLHAFWLKRLQGSHSRLATQFQEALQLGSLPSFMTSGVTHLIHKSGSTSEPKNYRPITCLPTVYKLLTSILRIKINNHLKAQHILSPTQNGCKGGSRGTKDLLLIDIAICQQVRRSRKNVSMAWIDYKKAYDSVPHTWLGRVLELYRVHPALCSFLGSCMRQWTTVLRHPGCGGLSGSSDLIKISRGIFQGDSLSPLWFCLALNPLSAILKDSKLGYHLRRESEPISHLLYMDDLKLYASKKTDLMELLKITGNFSNDIGMEFGVDKCAVIHVQRGRVEDSFNLQLSEDISLRSLSEMDSYKYLGMSQALSIAEQDMKQSLKDRFFARLIKVLKSLLSGGNKVRAFNGWVMPVLTYSFGILRWTQSELDALDRKVRRLLTAYRMHHPRSSVMRLYIPRKCGGRGFLNAITLHNREVCNLRQYFLSVSVVMYRDVAAIDRGLTPLSLANGNWRRPQVLSTSDRTAIWKGKELHGRFYRALTGPDVDQLASVTWLRFSNLFGETEGFVFAIMDEVIMTNNYRKHILKDGTVDICRACHRPGESIRHVVSGCSRLANGEYLHRHNQVARIIHQQLALKYGLVDSEVPYYQYQPLPVLESGHITLYWDRSVITDRTIVANKPDIVIIDRSMRRVMLVDVTIPHDENLVKAEKEKLSKYLDLAHEVTTMWNVNSTIIIPMVVSVNGLIAKSFDKHLEKLSLGSWVKGLIQKAVMLDTARIVRRFLSLEP

SEQ ID NO: 27740 - protein, 1087 aa, Phalera bucephala
MAEPSRRNPVRLCRQRDARSPSARPTPLSGSPASPQPSEDEDFFTPPTSGASSDDAGISATPPTLTSARRGRPPLPARLGPAGHCAPPTAPATGGVVRRMRWTPELNLSVMRAYYGATEGGTILTAYRPKLLSLFQGLHPTVAVTAQRLSDQVRAIQRCKLLDDTVLERLRREALPARTDSNVRSVEEPISLNNFARSEEVNSEQVSVSDQLQEQVRRALEDAFAEYRSAPISLRPCLPRLPMHRRNISLVSALDNVLKPHWETSVDLCDTHSILYCGAVAVCRVAGVRFPNLHRATQPTNTKPFWQCRIERRINMARTLIAKLLCFQAGNNRPRVMRFVAQAFAGTGVAPVDYVAGVAERIDYWKQKVYAWAKRIRRYKARADRYHVNRTFQTNQRSVYQAWERPQERVTDVHLPNAAVMAEFWRKIWSVPVSHSEGEWFDVVGRSCGPIQEMEPVVISREDLACAVRAAPNWKSPGPDGLHAFWLKRLQGSHSRLATQFQEALQLGSLPSFMTSGVTHLIYKSGSTSEPKNYKPITCLPTVYKLLTSILRIKINNHLKAQHILSPTQNGCKGGSRGTKDLLLIDMAICQQVRRSRKNVSMAWIDYKKAYDSVPHTWLGRVLELYRVHPALCSFLGSCMRQWTTVFRHPGCGGLSGSSDLIKISRGIFQGDSLSPVWFCLALNPLSAILKDSKLGYHLRRESEPISHLLYMDDLKLYASKKTDLMELLKITGNFSNDIGMEFGVDKCAVIHVQRGRVEDSFNLQLSEDISLRSLSEMDSYKYLGMSQALSIAEQDMKQSLKDRFFARLIKVLKSLLSGGNKVRAFNGWVMPVLTYSFGILRWTQSELDALDRKVRRLLTAYRMHHPRSSVMRLYIPRKCGGRGFLNAKTLHNREVCNLRQYFLSVSVVMYRDVAAIDRGLTPLSLANENWRRPQILSSSDRTAIWKGKELHGRFYRALTGPDVDQLASVNWLRFSNLFGETEGFVFAIMDEVIMTNNYRKHILKDGTVDICRACHRPGESIRHVVSGCSRLANGEYLHRHNQVARIIHQQLALKYGLVDSEVPYYQYQPLPVLESGIDLLSRTGLL

SEQ ID NO: 27741 - protein, 1197 aa, Bombyx mori
MSTTTALRKNPSRQCRQVTCGAQRTSPCIPSCSSDGSPSPTRIESLSSDETQPSPAPPRPVRRGRPPLARLGSTRRNAPSTVPATSGVVRSRMRWNENININVMRAYYEATEGETNLSAYRSKMFSVFQTLCPTVNVSTQRLSDQVRAIQRLRLLDQSLLDRLRYEALPVPIEPQENQVVTDTVAPIIQHDEEIQEQVCASNQDYERLSSALEDSIQEYRLVSACSRPRLPRLPIHRRNVSLVGALDSILKPYLESSTDLIDTHSLLYCGAVAVCRVAEVKSPNLTQTAYRPPTKPQWQCRIEKRIDRARILIAKLMCFQKGNTRPRVMCFVDQAFAGTGISSNEYMTCIIERIDFWKQKVYAWASRIRRYRLRSERYHLNRVFQRDQRSVYRNWESSQSQVTDEPYNVNEEDMSTFWNNIWSIPIGHSEGEWIQTVRRECESYKEMDSITISAVDVSRAVRSMPNWKSPGPDGLHSYWIKWIRSSHERLAAQFQQALELGSLPDFMTSGITYLIYKSGNTSDPKNYRPITCLPTIYKLLTSILRIKIQNHIFNNNILSPNQNGCKAGSRGTKDLLLIDMTITQQVRRSKRNVHMAWIDYKKAYDSVPHTWLMRVLELYKINPILCSFLSSCMGQWSTFLSQPGQMTSSAAPNLIRIKRGIFQGDSLSPLWFCLALNPLSTLLKDSTLGYRLRRGAEAISHLLFMDDLKLFASKKPDLMSLLKITDNFSKAIGMEFGVDKCAFIDVQRGKVVSSDCLLLNHSVVLKSLCESETYKYLGMFEVLNIVDADMKQSFRDRFFGRLIKVLKSHLSGGNKIRAFNGWVMPMLTYSFGILRWTQSELDVLDRKVRRLLTAYRMHHPRSSVMRLYIPRKCGGRGILNAKDLHNREIYNLREYFLKMNVNMYRDVVAVDKGLTPLSLANGNWKRLKVESISDRITVWRSKELHGRFYRALTGPDVDQLASVAWLRFSNLFGETEGFIFAIMDEVIMTNNYRKYILKDGTVDICRACHRPGESIRHIVSGCSRFANGEYLHRHNQVARIIHQQLALKYGFLDSAVPYYQYQPQPVLDNGHVTLYWDRSIITDRYIVANKPDIVIIDRSARRAVLVDVTIPHDENLVKAEKDKLIKYLDLAHETTAMWHVDSTIIVPIVVSVHGLIAKSFDQHLKKLSLSSWVKGLIQKAVILDTARIVRRFLTLES

SEQ ID NO: 27742 - protein, 906 aa, Clostera curtula
MLKAVFFFFFFFFFFFFFFFFNIIAKLYCFQAGNTRPKIMRFVKQAFAGTEINSNNYLSHIIERIDYWKQKVYAWAKRIKRYSIRMERYSINKIFQRDQRSIYRKWHLKDQTPDKQLPNIDEMSTFWRNIWSNPINHSENECFEVVRRACENISEMSPVLITATDVKSAVGWAPNWKSPGPDRLHAYWIKSYRSSHERLATQFQQALESGNVPNFMTTGLTHLIHKSGSTSDPKNFRPITCLPIIYKILTSILRTKINAHVMDNNILSPSQNGCKAKSRGTKDLLLIDMAISQQVRRNKRNVFMAWIDYKKAYDSVPHSWLKKILNLYRIHPTLCDFLSTCMEQWSTILLHPGHVNYFDSSNLVKIKRGIFQGDSLSPLWFCLALNPLSTLLKCSGLGYRLRKENEAISHLLYMDDLKLYASKKPDLMELLKITDNFSKSIGMEFGVDKCAVLNIQRGRIVNSECLQVSRNVSLRCLSESETYKYLGMSEALGIADADMKQVLKERFYSRLTKVLKSLLSGGNKVRAFNSWVMPVLAYSFGILRWTQTELDAVDRKVRRLLTAHRMHHPRSSVMRMYISRKCGGRGFLNAKDLHNREIHNLREYFLKVNVDMYRNVVAIDKGLTPLSLAIENWRKPKVMSISDRTAIWKDKELHGRFYRALTGSDVDQLASVDWLRFGNLFGETEGFVFAIMDEVMMTNNYRKHILKDGTVDICRACHRPGESIRHIVSGCSRLANGEYLHRHNQVAKIIHQQLAFKYGLVSTEVPYYQYQPQPVLENDHVTLYWDRSIITDRYIAANKPDIVIIDRSTRRVKLVDITIPHDENLVKAEKEKMIKYLDLAHEVTAMWSAESTSIIPIVLSVHGLISKSFDGHLNQLSISGWVKRLMQKAVLLETARIVRRFLSLKH

SEQ ID NO: 27743 - protein, 1204 aa, Phalera bucephala
MAEPSRRNPVRLCRQRDARSPSARPTPLPGSPTSPQPSEDEDFFTPPTSGASSDDAGISTSPPTSTSARRGRPPLPARLGPAGHCAPPTAPATGGVVRRMRWTPELNLSVMRAYYGATEGGTILTAYRPKLLSLFQGLHPTVAVTAQRLSDQVRAIQRCKLLDDTVLERLHREALPARTESNVRSVEDPISLNNFARSEEVNSEQVSVSDQLQEQVRRALEDAFAEYRSAPISLRPCLPRLPMHRRNISLVSALDNVLKPHWETSVDLCDTHSILYCGAVAVCRVAGVRFPNLHRATQPTNAKPLWQCRIERRINMARTLIAKLLCFQAGNNRPRVVRFVTQAFAGTRVAPVDYVAGVAERIDYWKQKVYAWAKRIRRYKARADRYHVNRTFQTNQRSVYQAWERPQERVTDVHLPNAAVMAEFWRKIWSVPVTHSEGEWFDVVRRSCGPIQEMEPVVVSREDLACAVRAAPNWKSPGPDGLHAFWLKRLQGSHSRLATQFQEALQLGSLPSFMTSGVTHLIHKSGSTSEPKNYRPITCLPTVYKLLTSILRIKINNHLKAQHILSPTQTGCKGGSRGTKDLLLIDIAICQQVRRSRKNVSMAWIDYKKAYDSVPHTWLGRVLELYRVHPALCSFLGSCMRQWTTVLRHPGCGGLSGSSDLIKISRGIFQGDSLSPLWFCLALNPLSAILKDSKLGYHLRRESEPISHLLYMDDLKLYASKKTDLMELLKITGNFSNDIGMEFGVDKCAIIHVQRGRVEDSFNLQLSEDISLRSLSEMDSYKYLGMSQALSIAEQDMKQSLSDRFFARLIKVLKSLLSGGNKVRAFNGWVMPVLTYSFGILRWTQSELDALDRKVRRLLTAYRMHHPRSSVMRLYIPRKCGGRGFLNAKTLHNREVCNLRQYFLSVSVVMYRDVSAIDRGLTPLSLANGNWRRPQVLSTSDRTAIWKGKELHGRFYRALTGPDVDQLASVTWLRFSNLFGETEGFVFAIMDEVIMTNNYRKHILKDGTVDICRACHRPGESIRHVVSGCSRLANGEYLHRHNQVARIIHQQLALKYGLVDSEVPYYQYQPLPVLESGHITLYWDRSVITDRTIVANKPDIVIIDRSMRRVMLVDVTIPHDENLVKAEKEKLSKYLDLAHEVTTMWNVDSTIIIPMVVTVNGLIAKSFDKHLEKLSLGSWVRGLIQKAVMLDTARIVRRFLSLEP

SEQ ID NO: 27744 - protein, 1204 aa, Phalera bucephala
MAEPSRRNPVRLCRQRDAWSPSARPTPLPGSPTSPQPSEDEDFFTPPTSGASSDDAGISASPPTSTSARRGRPPLPARLGPAGHCAPPTAPATGGVVRRMRWTPELNLSVMRAYYGATEGGTILTAYRPKLLSLFQGLHPTVAVTAQRLSDQVRAIQRCKLLDDTVLERLHREALPARTESNVRSVEEPISLNNFARSEEVNSEQVSVSDQLQEQVRRALEDAFAGYRSAPISLRPCLPRLPMHRRNISLVSALDNVLKPHWETSVDLCDTHSILYCGAVAVCRVAGVRFPNLHRATQPTNTKPFWQCRIERRINMARTLIAKLLCFQAGNNRPRVVRYVAQAFAGTGVASVDYVAEVAERIDYWKQKVYAWAKRIRRYKARADRYHVNRTFQTNQRSVYQAWERPQERVTDVHLPNAAVMAEFWRKIWSVPVSHSEGEWFDVVGRSCGPIQEMEPVVISREDLACAVRAAPNWKSPGPDGLHAFWLKRLQGSHSRLATQFQEALQLGSLPSFMTSGVTHLIYKSGSTSEPKNYRPITCLPTVYKLLTSILRIKINNHLRAQHILSPTQNGCKGGSRGTKDLLLIDMAICQQVRRSRKNVSMAWIDYKKAYDSVPHTWLGRVLELYRVHPALCSFLGSCMGQWTTVLRHPGCGGLSGSSDLIKISRGIFQGDSLSPLWFCLALNPLSAILKDSKLGYHLRRESEPISHLLYMDDLKLYASKKTDLMELLKITGNFSNDIGMEFGVDKCAVIHVQRGRVEDSFNLQLSEDISLRSLSEMDSYKYLGMSQALSIAEQDMKQSLKDRFFARLIKVLKSLLSGGNKVRAFNGWVMPVLTYSFGILRWTQSELDALDRKVRRLLTAYRMHHPRSSVMRLYIPRKCGGRGFLNAKTLHNREVCNLRQYFLSVSVVMYRDVAAIDRGLTPLSLANENWRRPQVLSISDRTAIWKGKELHGRFYRALTGPNVDQLASVNWLRFSNLFGETEGFVFAIMDEVIMTNNYRKHILKDGTVDICRACHRPGESIRHVVSGCSRLANGEYLHRHNQVARIIHQQLALKYGLVDSEVPYYQYQPLPVLESGHITLYWDRSIVTDRTIVANKPDIVIIDRSMRRVMLVDVTIPHDENLVKAEKEKLSKYLDLAHEVTAMWNVDSTIIIPMVVSVNGLIAKSFDKHLEKLSLGSWVKGLIQKAVMLDTARIVRRFLSLEP

SEQ ID NO: 27745 - protein, 1084 aa, Phalera bucephala
MAEPSRRNPVRLCRQRDARSPSARPTPLPGSPTSPQPSEDEDFFTPPTSGASSDDAGISASPPTLKSARRGRPPLPARLGPAGQCAPPTAPATGGVVRPMRWTPELNLSVMRAYYGATEGGTILTAYRPKLLSLFQGLHPTVAVTAQRLSDQVRAIQRCKLLDDTVLERLHREALPARTESNVRSVEDPFSLNNFARSEEVNSEQVSVSDQLQEQVRRALEDAFAEYRSAPISLRPCLPRLPMHRRNISLVSALDNVLKPHWETSVDLCDTHSILYCGAVAVCRVAGVRFPNLHRATQPTNAKPLWQCRIERRINMARTLIAKLLCFQAGNNRPRVVRFVTQAFAGTRVAPVDYVAGVAERIDYWKQKVYAWAKRIRRYKARADRYHVNRTFQTNQRSVYQAWERPQERVTDVHLPNAAVMAEFWRKIWSVPVTHSEGEWFDVVGRSCGPIQEMEPVVISREDLACAVRAAPNWKSPGPDGLHAFWLKRLQASHSRLATQFQEALQLGSLPSFMTSGVTHLIHKSGSTSEPKNYRPITCLPTVYKLLTSILRIKINNHLKAQHILSPTQNGCKGGSRGTKDLLLIDIAICQQVRRSRKNVSMAWIDYKKAYDSVPHTWLGRVLELYRVHPALCSFLGSCMRQWTTVLRHPGCGGLSGSSDLIKISRGIFQGDSLSPLWFCLALNPLSAILKDSKLGYHLRRESEPISHLLYMDDLKLYASKKTDLMELLKITGNFSNDIGMEFGVDKYAVIHVQRGRVEDSFNLQLSEDISLRSLSEMDSYKYLGMSQALSIAEQDMKQSLRDRFFARLIKVLKSLLSGGNRVRAFNGWVMPVLTYSFGILRWTQSELDALDRKVRRLLTAYRMHHPRSSVMRLYIPRKCGGRGFLNAKTLHNREVCNLRQYFLSVSVVMYRDVAAIDRGLTPLSLANGNWRRPQVLSTSDRTAIWKGKELHGRFYRALTGPDVDQLASVTWLRFSNLFGETEGFVFAIMDEVIMTNNYRKYILKDGTVDICRACHRPGESIRHVVSGCSRLANGEYLHRHNQVARIIHQQLALKYGLVDSEVPYYQYQPLPVLESGHIPLYWD

SEQ ID NO: 27746 - protein, 1204 aa, Phalera bucephala
MAEPSRRNPVRLCRQRDARSPSARPTPLPGSPTSPQPSEDEVFFTPPTSGASSDDAGISASPPTLTSARRGRPPLPARLGPAGHCAPPTAPATGGVVRRMRWTPELNLSVMRAYYGATEGGTILTAYRPKLLSLFQGLHPTVAVTAQRLSDQVRAIQRCKLLDDTVLERLHREALPARTESNVRSVEDPISLNNFARSEEVNSEQVSVSDQLQEQVRRALEDAFAEYRSAPISLRPCLPRLPMHRRNISLVSALDNVLKPHWETSVDLCDTHSILYCGAVAVCRVAGVRFPNLHRAAQPTNAKPLWQCRIERRINMARTLIAKLLCFQAGNNRPRVVRFVTQAFAGTRVAPVDYVAGVAERIDYWKQKVYAWAKRIRRYKARADRYHVNRTFQTNQRSVYQAWERPQERVTDVHLPNAAVMAEFWRKIWSVPVTHSEGEWFDVVGRSCGPIQEMEPVVISREDLAFAVRAAPNWKSLGPDGLHAFWLKRLQGSHSRLAAQFQEALQLGSLPSFMTSGVTHLIHKSGSTLEPKNYRPITCLPTVYKLLTSILRIKINNHLKAQHILSPTQNGCKGGSRGTKDLLLIDIAICQQVRRSRKNVSMAWIDYKKAYDSVPHTWLGRVLELYRVHPALCSFLGSCMRQWTTVLRHPGCGGLSGSSDLIKISRGIFQGDSLSPLWFCLALNPLSAILKDSKLGYHLRRESEPISHLLYMDDLKLYASKKTDLMELLKITGNFSNDIGMEFGVDKCAVIHVQRGRVEDSFNLQLSEDTSLRSLSEMDSYKYLGMSQAFSIAEQDMKQSLRDRFFARLIKVLKSLLSGGNRVRAFNGWVMPVLTYSFGILRWTQSELDALDRKVRRLLTAYRMHHPRSSVMRLYIPRKCGGRGFLNAKTLHNREVCNLRQYFLSVSVVMYRDVAAIDRGLTPLSLANGNWRRPQVLSTSDRTAIWKGKELHGRFYRALTGPDVDQLASVTWLRFSNLFGETEGFVFAIMDEVIMTNNYRKHILKDGTVDICRACHRPGESIRHVVSDCSRLANGEYLHRHNQVARIIHQQLALKYGLVDSEVPYYQYQPLPVLESGHITLYWDRSVITDRTIVANKPDIVIIDRSMRRVMLVDVTIPHDENLVKAEKEKLSKYLDLAHEVTTMWNVNSTIIIPMVVSVNGLIAKSFDKHLEKLSLGSWVKGLIQKAVMLDTARIVRRFLSLEP

SEQ ID NO: 27747 - protein, 1204 aa, Phalera bucephala
MAEYPRRNPVRRCRQRIAQGHSARPSPLRGSPNSPQSSENELYFTPPTSGASSDETEPPASSHPLRPERRGRPPLPACIGPAEHCAPPTAPATGGVVRRMRWTSELNMSVMRAYYGATKGETILTAYRPKLLSLFQELHPTVAVTAQRLSDQVRAIQRCKLLDDTVLERLRSETCPARTESDLRSFEEPISLDNFARSEEVNSGQVSVGDQLQEQVRRALKDAFAEYRSAPISLRPCLPRLPMHRHNISLVGALDNVLKSHWETSVDLCDTHSILYCGAVAVCRVAGVRFPNLHRATQPTNAKPFWQCRIERRINMARTLIAKLLCFQAGNNRPRVVRFVAQAFAGTGVAPVDCMARVTERIDYWKQKVYAWANRIRRYRERADRYHVNRTFEVNQKSLYQAWERPQERVTDVHLPDAAMMAEFWRKIWSVPVSHSEGEWFDVVRRSCEPIQEMEPVVITRDDVACAVRAAPNWKSPGPDGLHAFWLKRLQGSHARLATQFQEALELGSLPSLLTTGVTHLIHKSGSTLEPKNYRPITCLPTVYKLLTSILRTKINNHLKAQHILSPTQNGCKGGSRGTKDLLLIDMAICQQVRRSRKNVSMAWIDYKKAYDSVPHTWLGRVLELYKVHPALCSFLGLCMGQWTTVLRHPGYGGLSGSSDLIKISRGIFQGDSLSPLWFCLALNPLSAILKNSKLGYHLRRGSEPISHLLYMDDLKLYASKKTDLMELLKITGNFSNDIGMEFGVDKCAVIHVQRGRVEDSFNLQLSEDISLRSLSEMDSYKYLGMSQALSIAEQDMKQSLKDRFFARLMKVLKSLLSGGNKVRAFNGWVMPVLTYSFGILRWTQSELDALDRKVRRLLTAYRMHHPRSSVMRLYIPRRCGGRGFLNAKTLHNREVCNLRQYFLSVSVVMYRDVAAIDRGLTPLSLANGNWRRPQVLSISDRTAIWKGKELHGRFYRALTGPDVDQLASVTWLRFSNLFGETEGFVFAIMDEVIMTNNYRKHILKDGTVDICRACHRPGESIRHVVSGCSRLANGEYLHRHNQVAKIIHQQLALKYDLVDSEVPYYQYQPLPVLESGHITLYWDRSIITDRTIVANKPDIVIIDRSMRRVMLVDVTIPHDENLVKAEKEKISKYLDLAHEVTAMWNVDSTIIIPMVVSVNGLIAKSFDKHLEKLSLGSWVKGLIQKVVVLDTARIVRRFLSLEP

SEQ ID NO: 27748 - protein, 1180 aa, Phalera bucephala
MAEPSRRNPVRLCRQRDARSPSARPTPLPGSSTSPQPSEDEDFFTPPTSGASSDDAGISASPPTLTSARRGRPPLPARLGPAGHCAPPTAPATGGVVRRMRWTPELNLSVMRAYYGATEGGTILTAYRPKLLSLFQGLHPTVAVTAQRLSDQVRAIQRCKLLDDTVLERLHREALPARTESNVRSVEDPISLNNFARSEEVNSEQVSVSDQLQEQVRRALEDAFAEYRSAPISLRPCLPRLPMHRRNISLVSALDNVLKPHWETSVDLCDTHSILYCGAVAVCRVAGVRFPNLHRATQPTNAKPLWQCRIERRINMARTLIAKSLCFQAGNNRPRVVRFVTQAFAGTRVAPVDYVAGVAERIDYWKQKVYAWAKRIRRYKARADRYHVNRTFQTNQRSVYQAWERPQERVTDVHLPNAAVMAEFWRKIWSVPVTHSEGEWFDVVGRSCGPIQEMEPVVISREDLACAVRAAPNWKSPGPDGLHAFWLKRLQGSHSRLATQFQEALQLGSLPSFMTSGVTHLIHKSGSTSEPKNYRPITCLPTVYKLLTSILRIKINNHLKAQHILSPTQTGCKRGSRGTKDLLLIDIAICQQVRRSRKNVSMAWIDYKKAYDSVPHTWLGRVLELYRVHPALCSFLGSCMRQWTTVLRHPGCGGLSGSSDLIKISRGIFQGDSLSPLWFCLALNPLSAILKDSKLGYHLRRESEPISHLLYMDDLKLYASKKTDLMELLKITGNFSNDIGMEFGVDKCAVIHVQRGRVEDSFNLQLSEDISLRSLSEMDSYKYLGMSQALSIAEQDMKQSLRDRFFARLIKVLKSLLSGGNKVRAFNGWVMPVLKYSFGILRWTQSELDALDRKVRRLLTAYRMHHPRSSVMRLYIPRKCGGRGFLNAKTLHNREVCNLRQYFLSVSVVMYRDVAAIDRGLTPLSLANGNWRRPQVLSTSDRTAIWKGKELHGRFYRALTGPDVDQLASVTWLRFSNLFGETEGFVFAIMDEVIMTNNYRKHILKDGTVDICRACHRPGESIRHVVSGCSRLANGEYLHRHNQVARIIHQQLALKYGLVDSEVPYYQYQPLPVLESGHITLYWDRSVITDRTIVANKPDIVIIDRSMRRVMIVDVTIPHDENLVKAEKEKLCLLECVQRVRGFPRLHHDLFHEWGRLSYSEGILVARQLLETQYTSATPA

SEQ ID NO: 27749 - protein, 1197 aa, Bombyx mori
MSTTTALRKNPSRQCRQVTCGAQRTSPCIPSCSSDGSPSPTRIESLSSDETQPSPAPPRPVRRRRPPLARLGSTRRNAPSTVPATSGVVRSRMRWNENINMNVMRAYYEATEGETNLSAYRSKMFSVFQTLCPTVNVSTQRLSDQVRAIQRLRLLDQSLLDRLRYEALPVPIEPQENQVVTDTVAPIIQHDEEIQEQVCASNQDYERLSSALEDSIQEYRLVSACSRPRLPRLPMHRRNVSLVGALDSILKPYLESSTDLIDTHSLLYCGAVAVCRVAEVKSPNLTQTAYRPPTKPQWQCRIEKRIDRARILIAKLMCFQKGNTRPRVMCFVDQAFAGTGISSNEYMTCIIERIDFWKQKVYAWASRIRRYRLRSERYHLNRVFQRDQRSVYRNWESSQSRVTDEPYNVNEEDMSTFWNNIWSIPIGHSEGEWIQTVRRECESYKEMDSITISAVDVSRAVRSMPNWKSPGPDGLHSYWIKWIRSSHERLAAQFQQALELGSLPDFMTSGITYLIYKSGNTSDPKNYRPITCLPTMYKLLTSILRIKIQNHIFNNNILSPNQNGCKAGSRGTKDLLLIDMTITQQVRRSKRNVHMAWIDYKKAYDSVPHTWLMRVLELYKINPILCSFLSSCMGQWSTFLSQPGQMTSSAAPNLIRIKRGIFQGDSLSPLWFCLALNPLSTLLKDSTLGYRLRRGAEAISHLLFMDDLKLFASKKPDLMSLLKITDNFSKAIGMEFGVDKCAFIDVQRGKVVSSDCLLLNHSVVLKSLCESETYKYLGMFEVLNIVDADMKQSFRDRFFGRLIKVLKSHLSGGNKIRAFNGWVMPMLTYSFGILRWTQSELDVLDRKVRRLLTAYRMHHPRSSVMRLYIPRKCGGRGILNAKDLHNREIYNLREYFLKMNVNMYRDVVAVDKGLTPLSLANGNWKRLKVESISDRITVWRSKELHGRFYRALTGPDVDQLASVAWLRFSNLFGETEGFIFAIMDEVIMTNNYRKYILKDGTVDICRACHRPGESIRHIVSGCSRFANGEYLHRHNQVARIIHQQLALKYGFLDSAVPYYQYQPQPVLDNGHVMLYWDRSIITDRYIVANKPDIVIIDRSARRAVLVDVTIPHDENLVKAEKDKLIKYLDLAHETTAMWHVDSTIIVPIVVSVHGLIAKSFDQHLKKLSLSSWVKGLIQKAVILDTARIVRRFLTLES

SEQ ID NO: 27750 - protein, 1207 aa, Clostera curtula
MSTSAMERRLNPRRQCRQPYETNARITSAVVSSNRVQSSDEEFFTPPGTASSSEDEPTPSPSLSRRPARRGRPPLPASLGSTGHRALPTAPATGGVVRRMRWTNNLNESVMRAYYGATDGGTNLTAYRSRLLALFQELHPDVTVNAQRLSDQVRAIQRLNLLEQPLLERLRLEALPPQSVSSVQTTTPAAACLLPPSVEQLGFEQIEEVSLNDRYNEQLRRILEETIEEYRLIPVTSRPRLPRLPMHKRNMALVSALDSLLTDKLNSVVDLSELHFILYCGAVAVCRVAGVTFPKNSTASRQTSCKPAWQYRIEKRITAARTLIAKLYCFRTGNTRPRVMRYVIQAFAGTGVRQCDYTACIAERIDYFKQKVYAWAKRIRRYRERADRFNQNRLFQNDQKIIYRNWERPQPPLADVMTPDADTMLAFWRNIWSRPVEHLEGQWIGAVSRACDQITPMDPVHVDLNDVISAIRLAPNWKSPGPDGLHNFWIKKVRSCHARLATLFQAALEAGSLPDFMTTGVTHLIHKSGRISEPKNYRPITCLPTIYKLLTSIVKFKIVNHILANNILASNQNGCNAGSRGTKDLLLIDMAICQQVRRSKKNISMAWIDYKKAYDSVPHSWLMRVLDLYKVDANLCLFLSSCMRQWSTVLYHPGHRHFFEASERIWIKRGIFQGDSLSPLWFCLALNPLSILLNDSMPGYRLHRGGKTISHLLYMDDLKLYAPKQSDLMALLKVTETFSSAIGMEFGVDKCAVINVQKGRVVNSENLQLSENVILRSLCESDTYKYLGMSEALGIADSDVKQQLKTRFLGRLTKVLKSLLSGGNKVRAFNCWVIPVIAYSFGILRWTQSELDALDRMVRRQLTAFRMHHPRSSVMRLYIPRRCGGRGFLNVKSLHNREVCNLRDYFLRVDDEMHRDVVKVDSGLTALSMAKQNWRRPQVLIISERKAIWKGKELHGRFYSALTGPEIDQLASVSWLRFGNLFGETEGFVFAIMDEVVKTNNYRKYIIKDGTVDICRACHCPGESIRHVVSGCSRLANGEYLHRHNQVAGIIHQQLALRYGIVESEVPYYQYKPEPVLSNNHVTLYWDRSIVTDRTIMANKPDIVVIDRSVRRAMLIDITIPHDVNLVKAEHEKISKYLDLSHEVGAMWNMDSTIIVPIVISVHGLMAKSFDQHLQKLSLGSWVKSLIQKAVLLDTARIVRRFLTLDP

SEQ ID NO: 27751 - protein, 1194 aa, Clostera curtula
MATRRNPNRRCKQAAHLGARLPSPRVSSCSSNEEFFTPTSGTSSDETEVQTTSAPRRPVRRGRPPLPARLGPSEQAGPSTAPATGSAVRTRMRWTQQLNEDVMRAYYGATKGGTVLTSYRSKMLSLFQALHPTVSVTAQRLSDQVRVIQRLGLLEAPVLEQLRGESQTAPSEPALENVTIAPRDPFPESDANVHEQVSISHQDIERLRSTLENVIKEYRSMPIFDRPQLPRLPLNPYNISLVNAFDQILKTYIDSSSDLTDTHSILYCGAVAACYEAGVRFPASYQNARPVGSPPLWKQRIERRITAARTIIAKLYCFQAGNTRPKIMRFVKQAFAGTEINSNNYLSHIIERIDYWKQKVYAWAKRIKRYNIRMERYSINKIFQRDQRSIYRKWHLKDQTPDKQLPNIDEMSTFWRNIWSNPINHSENECFEVVRRACENISEMSPVLITATDVKSAVGWAPNWKSPGPDRLHAYWIKSYRSSHERLATQFQQALESGNVPNFMTTGLTHLIHKSGSTSDPKNFRPITCLPIIYKILTSILRTKINAHAMDNNILSPSQNGCKAKSRGTKDLLLIDMAISQQVRRNKRNVYMAWIDYKKAYDSVPHSWLKKILNLYRIHPTLCDFLSTCMEQWSTILLHPGHVNSFDSSNLVKIKRGIFQGDSLSPLWFCLALNPLSTLLKCSGLGYRLRKENEAISHLLYMDDLKLYASKKPDLMELLKITDNFSKSIGMEFGVDKCAVLNIQRGRIVNSECLQVSRNVSLRCLSESETYKYLGMSEALGVADADMKQVLKERFYSRLTMVLKSLLSGGNKVRAFNSWVMPVLAYSFGILRWTQTELDAVDRKVRRLLTAHRMHHPRSSVMRMYISRKCGGRGFLNAKDLHNREIYNLREYFLKVNVDMYRNVVAIDKGLTPLSLAIENWRKPKVMSISDRTAIWKDKELHGRFYRALTGSDVDQLASVDWLRFGNLFGETEGFVFAIMDEVMMTNNYRKHILKDGTVDICRACHRPGESIRHIVSGCSRLANGEYLHRHNQVAKIIHQQLAFKYGLVSTEVPYYQYQPQPVLENDHVTLYWDRSIITDRYIAANKPDIVIIDRSTRHVKLVDITIPHDENLVKAEKEKMMKYLDLAHEVTAMWNAESTSIIPIVLSVHGLISKSFDGHLNQLSISGWVKRLMQKAVLLETARIVRRFLSLKH

SEQ ID NO: 27752 - protein, 1203 aa, Clostera curtula
MERRINPRRQCREPYEANARITSAAVSSNRVQSSDEEYFTPPGTASSSEDEPTPSPSLSRRPARRGRPPLPASLGSTGHRALPTAPATGGVVRRMRWTNILNETVMRAYYGATDGGTNLTAYRSRLLELFQELHPDVTVTAQRLSDQVRAIQRLNLLEQPVLERLRLETLPPQPVSSVQVTTPTAACLLPPTSGEQLDLGQIEEVSLNDQYNEQLRRILEETIEEYRLIPMTSRPRIPRLPMHKRNMALVSALDSLLMDKLNCVGDLTELHFILYCGAVAVCRVAGVTFPKNSTASRHPECKPAWQYRIEKRITAARTLIAKLYCFMTGNTRPRVMRYVIQAFAGTGVRQCDYAACVTERIDYFKQKVYAWAKRIRRYRERADRFNQNRLFQNDQKIIYRNWERPQPPTADLSTPDADTMLAFWRNIWSRPVDHLEGQWIGVLGRACEQITQMEPVHIELDDVISAIRSAPNWKSPGPDGLHNFWFKKVCSCHARLATLFQAALEAGSLPDFMTTGVTHLIHKSGRISEPTNYRPITCLPTIYKLLTSIIKFKIVNHILANNILASNQNGCNAGSRGTKDLLLIDMAICQQVRRSKKNISMAWIDYKKAYDSVPHSWLMRVLDLYKVDANLCLFLSSCMRQWSTVLYHPGHRHFFEASERIWIKRGIFQGDSLSPLWFCLALNPLSILLNDSMPGYRLYRGGKTISHLLYMDDLKLYAPKQSDLMALLQVTETFSSAISMEFGVDKCAVINVQKGRVVNSENLQLSENVILRSLCESDTYKYLGMSEALGIADSDVKQQLKTRFLGRLTKVLKSLLSGGNKVHAFNCWVIPVIAYSFGILRWTQSELDAMDRMVRRQLTAFRMHHPRSSVMRLYIPRRCGGRGFLNVKSLHNREICNLRDYFLRVDDEMHRDVVKVDSGLTALSMAKQNWRRPQVLSILERKAIWKGKELHGRFYSALTGPEIDQLASVSWLRFGNLFGETEGFVFAIMDEVVKTNNYRKYIIKDGTVDICRACHCPGESIRHVVSGCSRLANGEYLHRHNQVAGIIHQQLALRYGIVESEVPYYQYKPEPVLSNNHVTLYWDRSIVTDRTIMANKPDIVVIDRSTRRAMLIDISIPHDVNLVKAEHEKISKYLDLSHEVGAMWNMDSTIIVPIVISVHGLMAKSFDQRLQKLSLGSWVKSLIQKAVLLDTARIVRRFLTLDP

SEQ ID NO: 27753 - protein, 1204 aa, Phalera bucephala
MAEPSRRNPVRLCRQRDARSPSARPTPLPGSPASPQPSEDEDFFTPPTSGASSDDAGISATPPTLTSARRGRPPLPARLGPAERCAPPTAPATGGVVRRMRWTPELNLSVMRAYYGATEGGTILTAYRPKLLSLFQGLHPTVAVTAQRLSDQVRAIQRCKLLDDTVLERLRREALPARTDSNVRGVEEPISLNNFARSEEVNSEQVSVSDQLQEQVRRALEDAFAEYRSAPISLRPCLPRLPMHRRNISLVSALDSVLKPHWETSVDLCDTHSILYCGAVAVCRVAGVRFPNLHRATQPTNTKPFWQCRIERRINMARTLIAKLLCFQAGNNRPRVVRFVAQAFAGTGVAPVDYVAGVAERIDYWKQKVYAWAKRIRRYKARADRYHVNRTFQTNQRSVYQAWERPQERVSDVHLPNAAVMAEFWRKIWSVPVSHSEGEWFDVVGRSCGPIQEMEPVVISREDLACAVRAAPNWKSPGPDGLHAFWLKRLQGSHSRLATQFQEALQLGSLPSFMTSGVTHLIYKSGSTSEPKNYRPITCLPTVYKLLTSILRIKINNHLKAQHILSPTQNGCKGGSRGTKDLLLIDMAICQQVRRSRKNVSMAWIDYKKAYDSVPHTWLGRVLELYRVHPALCSFLGSCMGQWTTVLRHPGCGGLSGSSDLIKISRGIFQGDSLSPLWFCLALNPLSAILKDSKLGYHLRRESEPISHLLYMDDLKLYASKKIDLMELLKITGNFSNDIGMEFGVDKCAVIHVQRGRVEDSFNLQLSEDISLRSLSEMDSYKYLGMSQALSIAEQDMKQSLKDRFFARLIKVLKSLLSGGNKVRAFNGWVMPVLTYSFGILRWTQSELDALDRKVRRLLTAYRMHRPRSSVMRLYIPRKCGGRGFLNAKTLHNREVCNLRQYFLSVSVVMYRDVAAIDRGLTPLSLANENWRRPQVLSISDRTAIWKGKELHGRFYRALTGPDVDQLASVNWLRFSNLFGETEGFVFAIMDEVIMTNNYRKHILKDGTVDICRACHRPGESIRHVVSGCSRLANGEYLHRHNQVARIIHQQLALKYGLVDSEVPYYQYQPLPVLESGHITLYWDRSIITDRTIVANKPDIVIIDRSMRRVMLVDVTIPHDENLVKAEKEKLSKYLDLAHEVTAMWNVDSTIIIPMVVSVNGLIAKSFDKHLEKLSLGSWVKGLIQKAVMLDTARIVRRFLSLEP

SEQ ID NO: 27754 - protein, 1204 aa, Phalera bucephala
MTEPSRRNPVRLCRQRDARSPSARPTPLPGSPTSPQPSEDEDFFTPPTSGASSDDAGISASPPTLTSARRGRPPLPARLGPAGHCAPPTAPATGGVVRRMRWTPELNLSVMRAYYGATEGGTILTAYRPKLLSLFQGLHPTVAVTAQRLSDQVRAIQRCKLLDDTVLERLHREALPARTESNVRSVEDPISLNNFARSEEVNSEQVSVSDQLQEQVRRALEDAFAEYRSAPISLRPYLPRLPMHRRNISLVSALDNVLKPHWETSVDLCDTHSILYCGAVAVCRVAGVRFPNLHRATQPTNAKPLWQCRIERRINMARTLIAKLLCFQAGNNRPRVVRFVTQAFAGTRVAPVEYVAGVAERIDYWKQKVYAWAKRIRRYKARADRYHVNRTFQTNQRSVYQAWERPQERVTDVHLPNAAVMAEFWRKIWSVPVTHSEGEWFDVVGRSCGPIQEMEPVVISREDLACAVRAAPNWKSPGPDGLHAFWLKRLQGSHSRLATQFQEALQLGSLPSFMTSGVTHLIHKSGSTSEPKNYRPITCLPTVYKLLTSILRIKINNHLKAQHILSPTQNGCKGGSRGTKDLLLIDIAICQQVRRSRKNVSMAWIDYKKAYDSVPHTWLGRVLELYRVHPALCSFLGSCMRQWTTVLRHPGCGGLSGSSDLIKISRGIFQGDSLSPLWFCLALNPLSAILKDSKLGYHLRRESEPISHLLYMDDLKLYASKKTDLMELLKITGNFSNDIGMEFGVDKCAVIHVQRGRVEDSFNLQLSEDISLWSLSEMDSYKYLGMSQALSIAEQDMKQSLRDRFFARLIKVLKSLLSGGNRVRAFNGWVMPVLTYSFGILRWTQSELDALDRKVRRLLTAYRMHHPRSSVMRLYIPRKCGGRGFLNAKTLHNREVCNLRQYFLSVSVVMYRDVAAIDRGLTPLSLAIGNWRRPQVLSTSDRTAIWKGKELHGRFYRALTGPDVDQLASVTWLRFSNLFGETEGFVFAIMDEVIMTNNYRKYILKDGTVDICRACHRPGESIRHVVSGCSRLANGEYLHRHNQVARIIHQQLALKYGLVDSEVPYYQYQPLPVLESGHITLYWDRSVITDRTIVANKPDIVIIDRSMRRVMLVDVTIPHDENLVKAEKEKLSKYLDLAHEVTAMWNVDSTIIIPMVVSVNGLIAKSFDKHLEKLSLGRWVKGLIQKAVMLDTARIVRRFLSLEP

SEQ ID NO: 27755 - protein, 1105 aa, Phalera bucephala
MRWTSELNMSVMRAYYGATKGETILTAYRPKLLSLFQELHPTVAVTAQRLSDQVRAIQRCKLLDDTVLERLRSETCPARTESDLRSFEEPISLGNFARSEEVNSGQVSVGDQLQEQVRRALKDAFAEYRSAPISLRPCLPRLPMHRHNISLVGALDNVLKSHWETSVDLCDTHSILYCGAVAVCRVAGVRFPNLHRATQPTNAKPFWQCRIERRINMARTLIAKLLCFQAGNNRPRVVRFVAQAFAGTGVAPVDYMARVTERIDYWKQKVYAWANRIRRYRERADRYHVNRTFEVNQRSVYQAWECPQERVTDVHLPDAATMAEFWRKIWSVPVSHSEGEWFDVVGRSCEPIQEMEPVVITRDDVACAVRAAPNWKSPGPDGLHAFWLKRLQGSHARLATQFQEALELGSLPSLLTTGVTHLIHKSGSTLEPKNYRPITCLPTVYKLLTSILRTKINNHLKAQHILSPTQNGCKGGSRGTKDLLLIDMTICQQVRRSRKNVSMAWIDYKKAYDSVPHTWLGRVLELYKVHPALCSFLGLCMGQWTTVLRHPGYGGLSGSLDLIKISRGIFQGDSLSPLWFYLALNPLSAILKNSKLGYHLRRGSEPISHLLYMDDLMLYASKKTDLMELLKITGNFSNDIGMEFGVDKCAVIHVQRGRVEDSFNLQLSEDISLRSLSEMDSYKYLGMSQALSIAEQDMKQSLKDRFFARLMKVLKSLLSGGNRVRAFNGWVMPVLTYSFGILRWTQSELDALDRKVRRLLTAYRMHHPRSSVMRLYIPRRCGGRGFLNAKTLHNREVCNLRQYFLSVSVVMYRDVAAIDRGLTPLSLANGNWRRPQVLSISDRTAIWKGKELHGRFYRALTGPDVDQLASVTWLRFSNLFGETEGFVFAIMDEVIMTNNYRKHILKDGTVDICRACHRPGESIRHVVSGCSRLANGEYLHRHNQVAKIIHQQLALKYDLVDSEVPYYQYQPLPVLESGHITLYWDRSIITDRTIVANKPDIVIIDRSMRRVMLVDVTIPHDENLVKAEKEKISKYLDLAHEVTAMWNVDSTIIIPMVVSVIGLIAKSFDKHLEKLSLGSWVKGLIQKVVVLDTARIVRRFLSLEP

SEQ ID NO: 27756 - protein, 1105 aa, Phalera bucephala
MRWTPELNLSVMRAYYGATEGGTILTAYRPKLLSLFQGLHPTVAVTAQRLSDQVRAIQRCKLLDDTVLERLHREALPARTESNVRSVEDPISLNNFARSEEVNSEQVSVSDQLQEQVRRALEDAFAEYRSAPISLRPCLPRLPMHRRNISLVSALDNVLKPHWETSVDLCDTHSILYCGAVAVCRVAGVRFPNLHRATQPTNAKPLWQCRIERRINMARTLIAKLLCFQAGNNRPRVVRFVTQAFAGTRVAPVEYVAGVAERIDYWKQKVYAWAKRIRRYKARADRYHVNRTFQTNQRSVYQAWERPQERVTDVHLPNAAVMAEFWRKIWSVPVTHSEGEWFDVVGRSCGPIQEMEPVVISREDLACAVRAAPNWKSPGPDGLHAFWLKRLQGSHSRLATQFQEALQLGSLPSFMTSGVTHLIHKSGSTSEPKNYRPITCLPTVYKLLTSILRIKINNHLKAQHILSPTQNGCKGGSRGTKDLLLIDIAICQQVRRSRKNVSMAWIDYKKAYDSVPHTWLGRVLELYRVHPALCSFLGSCMRQWTTVLRHPGCGGLSGSSDLIKISRGIFQGNSLSPLWFCLALNPLSAILKDSKLGYHLRRESEPISHLLYMDDLKLYASKKTDLMELLKITGNFSNDIGMEFGVDKCAVIHVQRGRVEDSFNLQLSEDISLRSLSEMDSYKYLGMSQALSIAEQDMKQSLRDRFFARLIKVLKSLLSGGNRVRAFNGWVMPVLTYSFGILRWTQSELDALDRKVRRLLTAYRMHHPRSSVMRLYIPRKCGGRGFLNAKTLHNREVCNLRQYFLSVSVVMYRDVAAIDRGLTPLSLANGNWRRPQVLSTSDRTAIWKGKELHGRFFRALTGPDVDQLASVTWLRFSNLFGETEGFVFAIMDEVIMTNNYRKYILKDGTVDICRACHRPGESIRHVVSGCSRLANGEYLHRHNQVARIIHQQLALKYGLVDSEVPYYQYQPLPVLESGHITLYWDRSVITDRTIVANKPDIVIIDRSMRRVMLVDVTIPHDENLVKAEKEKLSKYLDLAHEVTAMWNVDSTIIIPMVVSVNGLIAKSFDKHLEKLSLGSWVKGLIQKAVMLDTARIVRRFLSLEP

SEQ ID NO: 27757 - protein, 1105 aa, Phalera bucephala
MRWTPELNLSVMRAYYGATEGGTILTAYRPKLLSLFQGLHPTVAVTAQRLSDQVRAIQRCKLLDDTVLERLRREALPAPTESNVRSVEEPISLNNFARSEEVNSEQVSVSDQLQEQVRIALEDAFAEYRSAPISLRPCLPRLPMHRRNISLVSALDSVLKPHWETSVDLCDTHSILYCGAVAVCRVAGVRFPNLHRATQPTNTKPFWQCRIERRINIARTLIAKLLCFQAGNNRPRVMRFVAQAFAGTGVAPVDYVAGVAERIDYWKQKVYAWAKRIRRYKARADRYHVNRTFQTNQRSVYQAWERPQERVTDVHLPNAAVMAKFWRKIWSVPVSHSEGEWFDVVGRSCGPIQEMEPVVISREDLACAVRAAPNWKSPGPDGLHAFWLKRLQGSHSRLATQFQEALQLGSLPCFMTSGVTHLIHKSGSTSEPKNYRPITCLPTVYKLLTSILKIKIYNHLKAQHILSPTQNGCKGGSRGTKDLLLIDMAICQQVRRSRKNVSMAWIDYKKAYDSVPHTWLGRVLELYKVHPALCSFLGSCMRQWTTVLRHPGCGGLSGSSDLIKISRGIFQGDSLSPLWFYLALNPLSAILKDSKLGYHLRRESEPISHLLYMDDLKLYASKKTDLMELLKITGNFSNDIGMEFGVDNCAVIHVQRGRVEDSFNLQLSEDISLRSLSEMDSCKYLGMSQALSIAEQDMKQSLKDRFFARLIKVLKSLLSGGNKVRAFNGWVMPVLTYSFGILRWTQSELDALDRKVRRLLTAYHMHHPRSSVMRLYIPRKCGGRGFLNAKTLHNREVCNLRQYFLSVSVVMYRDVAAIDRGLTPLSLANENWRRPQVLSISDRTAIWKGKELHGRFYRALTGLDVDQLASVNWLRFSNLFGETEGFVFAIMDEVIMTNNYRKHILKDGTVDICQACHRPGESIRHVVSGCSRLANGEYLHRHNQMARIIHQQLALKYDLVDSEVPYYQYQPLPVLESGHITLYWDRSIITDRTIVANKPDIVIIDRSMRRVMLVDVTIPHDENFVKAEKEKLSKYLDLAHEVTDVWNVDSTIIIPMVVSVNGLIAKSFDKHLEKLSLGSWVKGLIQKAVMLDTARIVRRFLSLEP

SEQ ID NO: 27758 - protein, 881 aa, Bombyx mori
MCFQKGNTRPRVMCFVDQAFAGTGISSNEYMTCIIERIDFWKQKVYAWARRIRRYRLRSERYHLNRVFQRDQRSVYRNWESSQSQVTDEPYNVNEEDMSTFWNNIWSIPIGHSEGEWIQTVRRECESYKEMDSITISAVDVSRAVRSMPNWKSPGPDGLHSYWIKWIRSSHERLAAQFQQALELGSLPDFMTSGITYLIYKSGNTSDPKNYRPITCLPTIYKLLTSILRIKIQNHIFNNNILSPNQNGCKAGSRGTKDLLLIDMTITQQVRRSKRNVHMAWIDYKKAYDSVPHTWLMRVLELYKINPILCSFLSSCMGQWSTFLSQPGQMTSSAAPNLIRIKRGIFQGDSLSPLWFCLALNPLSTLLKDSTLGYRLRRGAEAISHLLFMDDLKLFASKKPDLMSLLKITDNFSKAIGMEFGVDKCAFIDVQRGKVVSSDCLLLNHSVVLKSLCESETYKYLGMFEVLNIVDADMKQSFRDRFFGRLIKVLKSHLSGGNKIRAFNGWVMPMLTYSFGILRWTQSELDVLDRKVRRLLTAYRMHHPRSSVMRLYIPRKCGGRGILNAKDLHNREIYNLREYFLKMNVNMYRDVVAVDKGLTPLSLANGNWKRLKVESISDRITVWRSKELHGRFYRALTGPDVDQLASVAWLRFSNLFGETEGFIFAIMDEVIMTNNYRKYILKDGTVDICRACHRPGESIRHIVSGCSRFANGEYLHRHNQVARIIHQQLALKYGFLDSAVPYYQYQPQPVLDNGHVTLYWDRSIITDRYIVANKPDIVIIDRSARRAVLVDVTIPHDENLVKAEKDKLIKYLDLAHETTAMWHVDSTIIVPIVVSVHGLMAKSFDQHLKKLSLSSWVKGLIQKAVILDTARIVRRFLTLES

SEQ ID NO: 27759 - protein, 1194 aa, Clostera curtula
MATRRNPNRRCKQAAHLGARLPSPRVSSCSSNEEFFTPTSGTSSDETEVQTTSAPRRPVRRGRPPLPARLGPSEQAGPSTAPATGSAVRTRMRWTHQLNEDVMRAYYGATKGGTVLTSYRSKMLSLFQALHPTVSVTAQRLSDQVRVIQRLGLLDAPVLEQLRGESQPAPSEPALENVTMAPRDPFPESDANVHEQVSISHQDIERLRSTLENVINEYRSMPIFDRPQLPRLPLNPYNISLVNAFDQILKTYIDSSSDLTNTHSILYCGAVAACYEAGVRFPASYQNARPVGSPPLWKQRIERRITAARTIIAKLYCFQAGNTRPKIMRFVKQAFAGTEINSNNYLSHIIERIDYWKQKVYAWAKRIKRYSIRMERYSINKIFQRDQRSIYRKWHLKDQTPDKQLPNIDEMSTFWRNIWSNPINHSENECFEVVRRACENISEMSPVLITATDVKSAVGWAPNWKSPGPDRLHAYWIKSYRSSHERLATQFQQALESGNVPNFMTTGLTHLIHKSGSTSDPKNFRPITCLPIIYKILTSILRTKINAHVMDNNILSPSQNGCKAKSRGTKDLLLIDMAISQQVRRNKRNVFMAWIDYKKAYDSVPHSWLKKILNLYRIHPTLCDFLSTCMEQWSTILLHPGHVNYFDSSNLVKIKRGIFQGDSLSPLWFCLALNPLSTLLKCSGLGYRLRKENEAISHLLYMDDLKLYASKKPDLMELLKITDNFSKSIGMEFGVDKCAVLNIQRGRIVNSECLQVSRNVSLRCLSESETYKYLGMSEALGIADADMKQVLKERFYSRLTKVLKSLLSGGNKVRAFNSWVMPVLAYSFGILRWTQTELDAVDRKVRRLLTAHRMHHPRSSVMRMYISRKCGGRGFLNAKDLHNREIHNLREYFLKVNVDMYRNVVAIDKGLTPLSLAIENWRKPKVMSISDRTAIWKDKELHGRFYRALTGSDVDQLASVDWLRFGNLFGETEGFVFAIMDEVMMTNNYRKHILKDGTVDICRACHRPGESIRHIVSGCSRLANGEYLHRHNQVAKIIHQQLAFKYGLVSTEVPYYQYQPQPVLENDHVTLYWDRSIITDRYIAANKPDIVIIDRSTRRVKLVDITIPHDENLVKAEKEKMIKYLDLAHEVTAMWSAESTSIIPIVLSVHGLISKSFDGHLNQLSISGWVKRLMQKAVLLETARIVRRFLSLKH

SEQ ID NO: 27760 - protein, 840 aa, Clostera curtula
MRFVKQAFAGTEINSNNYLSHIIERIDYWKQKVYAWAKRIKRYSIRMERYSINKIFQRDQRSIYRKWHLKDQTPDKQLPNIDDMSTFWRNIWSNPINHSENECFEVVRRACENISEMSPVLITATDVKSAVGWAPNWKSPGPDRLHAYWIKSYRCSHERLATQFQQALESGNVPNFITTGLTHLIHKSGSTSDPKNFRPITCLPIIYKILTSILRTKINAHVMDNNILSPSQNGCKAKSRGTKDLLLIDMAISQQVRRNKRNVFMAWIDYKKAYDSVPHSWLKKILNLYRIHPTLCDFLSTCMEQWSTILLHPGHVNSFDSSNLVKIKRGIFQGDSLSPLWFCLALNPLSTLLKCSGLGYRLRKENEAISHLLYMDDLKLYASKKPDLMELLKITDNFSKSIGMEFGVDKCAVLNIQRGRIVNSECLQVSRNVSLRCLSESETYKYLGMSEALGVADADMKQVLKERFYSRLTKVLKSLLSGGNKIRAFNSWVMPVLAYSFGILRWTQTELDAVDRKVRRLLTAHRMHHPRSSVMRMYISRKCGGRGFLNAKDLHNREIYNLREYFLKVNVDMYRNVVAIDKGLTPLSLAIENWRKPKVMSISDRTAIWKDKELHGRFYRALTGSDVDQLASVDWLRFGNLFGETEGFVFAIMDEVMMTNNYRKHILKDGTVDICRACHRPGESIRHIVSGCSRLANGEYLHRHNQVAKIIHQQLAFKYGLVSTEVPYYQYQPQPVLENDHVTLYWDRSIITDRYIAANKPDIVIIDRSTRHVKLVDITIPHDENLVKAEKEKMMKYLDLAHEVTAMWNAESTSFTWRVDRSIITMSGLLAADYYRVAIK

SEQ ID NO: 27761 - protein, 1204 aa, Phalera bucephala
MAEPSRRNPVRLCRQRDARSPSARPTPLPGSPTSPQPSEDEDFFTPPTSGASSDDAGISASPPTLTSARRGRPPLPARLGPAGHCAPPTAPATGGVVRRMRWTPELNLSVMRAYYGATEGGTILTAYRPKLLSLFRGLHPTVAVTAQRLSDQVRAIQRCKLLDDTVLERLHREALPARTESNVRSVEDPISLNNFARSEEVNSEQASVSDQLQEQVRRALEDAFAEYRSAPISLRPCLPRLPMHRRNISLVSALDNVLKPHWETSVDLCDTHSILYCGAVAVCRVAGVRFPNLHRATQPTNAKPLWQCRIERRINMARTLIAKLLCFQAGNNRPRVVRFVTQAFAGTRVAPVDYVAGVAERIDYWKQKVYAWAKRIRRYKARADRYHVNRTFQTNQRSVYQAWERPQERVTDVHLPNAAVMAEFWRKIWSVPVTHSEGEWFDVVGRSCGPIQEMEPVVISREDLACAVRAAPNWKSPGPDGLHAFWLKRLQGSHARLATQFQEALQLGSLPSFMTSGVTHLIHKSGSTSEPKNYRPITCLPTVYKLLTSILRIKINNHLKAQHILSPTQNGCGGGSRGTKDLLLIDIAICQQVRRSRKNVSMAWIDYKKAYDSVPHTWLGRVLELYRVHPALCSFLGSCMGQWTTVLRHPGCGGLSGSSDLIKISRGIFQGDSLSPLWFCLALNPLSAILKDSKLGYHLRRESEPISHLLYMDDLKLYASKKTDLMELLKITGNFSNDIGMEFGVDKCAVIHVQRGRVEDSFNLQLSEDISLRSLSEMDSYKYLGMSQALSIAEQDMKQSLRDRFFARLIKVLKSLLSGGNRVRAFNGWVMPVLTYSFGILRWTQSELDALDRKVRRLLTAYRMHHPRSSVMRLYIPRKCGGRGFLNAKTLHNREVCNLRQYFLSVSVVMYRDVAAIDRGLTPLSLANGNWRRPQVLSTSDRTAIWKGKELHGRFYRALTGPDVDQLASVTWLRFSNLFGETEGFVFAIMDEVIMTNNYRKYILKDGTVDICRACHRPGESIRHVVSGCSRLANGEYLHRHNQVARIIHQQLALKYGLVDSEVPYYQYQPLPVLESGHITLYWDRSVITDRTIVANKPDIVIIDRSMRRVMLVDVTIPHDENLVKAEKEKLSKYLDLAHEVTAMWNVDSTIIIPMVVSVNGLIAKSFDKHLEKLSLGSWVKGLIQKAVMLDTARIVRRFLSLEP

SEQ ID NO: 27762 - protein, 1117 aa, Phalera bucephala
MAEPSRRNPVLLCRQRDARSPSARPTPLPGSPTSPQPSEDEDFFTPPTSGASSDDAGISASPPTLKSARRGRPPLPARLGPAGHCAPPTAPATGGVVRRMRWTPELNLSVMRAYYGATEGGTILTAYRPKLLSLFQGLHPTVAVTAQRLSDQVRAIQRCKLLDDTVLERLHREALPARAESNVRSVEDPISLNNFARSEEVNSEQVSVSDQLQEQVRRALEDAFAEYRSAPISLRPCLPRLPMHRRNISLVSALDNVLKPHWETSVDLCDTHSILYCGAVAVCRVAGVRFPNLHRATQPTNAKPLWQCRIERRINMARTLIAKLLCFQAGNNRPRVVRFVTQAFAGTRVAPVDYVAGVAERIDYWKQKVYAWAKRIRRYKARADRYHVNRTFQTNQRSVYQAWECPQERVTDVHLPNAAVMAEFWRKIWSVPVTHSEGEWFDVVGRSCGPIQEMEPVVISREDLACAVRAAPNWKSPGPDGLHAFWLKRLQGSHSRLATQFQEALQLGSLPSFMTSGVTHLIHKSGSTSEPKNYRPITCLPTVYKLLTSILRIKINNHLKAQHILSPTQNGCKGGSRGTKDLLLIDIAICQQVRRSRKNVSMAWIDYKKAYDSVPHTWLGRVLELYRVHPALCSFLGSCMRQWTTVLRHPGCGGLSGSSDLIKISRGIFQGDSLSPLWFCLALNPLSAILKDSKLGYHLRRESEPISHLLYMDDLKLYASKKTDLMELLKITGNFSNDIGMEFGVDKCAVIHVQRGRVEDSFNLQLSEDISLRSLSEMDSYKYLGMSQALSIAEQDMKQSLRDRFFARLIKVFKSLLSGGNRVRAFNGWVMPVLTYSFGILRWTQSELDALDRKARRLLTAYRMHHPRSSVMRLYIPRKCGGRGFLNAKTLHNREVCNLRQYFLSVSVVMYRDVAAIDRGLTPLSLANGNWRMPQVLSTSDRTAIWKGKELHGRFYRALTGPDVDQLASVTWLRFSNLFGETEGFVFAIMDEVIMTNNYRKYILKDGTVDICRACHRPGESIRHVVSGCSRLANGEYLHRHNQVARIIHQQLALKYGLVDSEVPYYQYQPLPVLESGHITLYWDRSVITDRTIVANKPDIVIIDRSMRRVMQCHHSA

SEQ ID NO: 27763 - protein, 1088 aa, Phalera bucephala
MVLQREEPSSPLTVRNCCLCFRGFTRLSPLLRNDYRIKYVPSSGASCWMTQCLSDCTAKHFLLVLNPTCEVLKISLNNFARSEEVNSEQVSVSDQLQEQVRRALEDAFAEYRSAPISLRPCLPRLPMHRRNISLVSALDNVLKPHWETSVDLCDTHSILYCGAVAVCRVAGVRFPNLHRATQPTNAKPLWQCRIERRINMARTLIAKLLCFQAGNNRPRVVRFVTQAFAGTRVAPVDYVAGVAERIDYWKQKVYAWAKRIRRYKARADRYHVNRTFQTNQRSVYQAWERPQERVTDVHLPNAAVMAEFWRKIWSVPVTHSEGEWFDVVGRSCGPIQEMEPVVISREDLACAVRAAPNWKSPGPDGLHAFWLKRLQGSHSRLATQFQEALQLGSLPSFMTSGVTRLIHKSGSTSEPKNYRPITCLPTVYKLLTSILRIKINNHLKAQHILSPTQNGCKGGSRGTKDLLLIDIAICQQVRRSRKNVSMAWIDYKKAYDSVPHTWLGRVLELYRVHPALCSFLGSCMRQWTTVLRHPGCGGLSGSSDLIKISRGIFQGDSLSPLWFCLALNPLSAILKDSKLGYHLRRESEPISHLLYMDDLKLYASKKTDLMELLKITGNFSNDIGMEFGVDKCAVIHVQRGRVEDSFNLQLSEDISLRSLSEMDSYKYLGMSQALSIAEQDMKQSLRDRFFARLIKVLKSLLSGGNRVRAFNGWVMPVLTYSFGILRWTQSELDALDRKVRRLLTAYRMHHPRSSVMRLYIPRKCGGRGFLNAKTLHNREVCNLRQYFLSVSVVMYRDVAAIDRGLTPLSLANGNWRRPQVLSTSDRTAIWKGKELHGRFYRALTGPDVDQLASVTWLRFSNLFGETEGFVFAIMDEVIMTNNYRKYILKDGTVDICRACHRPGESIRHVVSGCSRLANGEYLHRHNQVARIIHQQLALKYGLVDSEVPYYQYQPLPVLESGHITLYWDRSVITDRTIVANKPDIVIIDRSMRRVMLVDVTIPHDENLVKAEKEKLSKYLDLAHEVTAMWNVDSTIIIPMVVSVNGLIAKSFDKHLEKLSLGSWVKGLIQKAVMLDTARIVRRFLSLEP

SEQ ID NO: 27764 - protein, 1203 aa, Phalera bucephala
MAEPSRRNPVRLCRQRDARSPSARPTPLPGSPASPQPSEDEDFFTPPTSGASSDDAGISATPPTLTSARRGRPPLPARLGPAGHCAPPTAPATGGVVRRMKWTPELNLSVMRAYYGATEGGTILTAYRPKLLSLFQGLHPTVAVTAQRLSDQVRAIQQCKLLDDTVLERLRREALPARTDSNVRSVEEPISLNKFARSEEVNSEQVSVSDQLQEQVRRTLEDAFAEYRSAPISLRPCLPRLPMHRRNISLVSALDNVLKPHWETSVDLCDTHSILYCGAVAVCRVAGVRFPNLHRATQPTNTKPFWQCRIERRINMARTLIAKLLCFQAGNNRPRVVRFVAQAFAGTGVAPVDYVAGVAERIDYWKQKVYAWAKRIRRYKARADRYHVNRTFQTNQRSVYQAWERPQERVTDVHLPNAAVMAEFWRKIWSVPVSHSEGEWFDVVGRSCGIQEMEPVVISREDLACAVRAAPNWKSPGPDGLHAFWLKRLQGSHSRLATQFQEALQLGSLPSFMTSGVTHLIYKSGSTSEPKNYRPITCLPTVYKLLTSILRIKINNHLKAQHILSPTQNGCKGGSRGTKDLLLIDMAICQQVRRSKKNISMAWIDYKKAYDSVPHTWLGRVLELYRVHPALCSFLGSCMRQWTTVLRHPGCGGLSGSSDLIKISRGIFQGDSLSPLWFCLALNPLSAILKDSKLGYHLRRESEPISHLLYMDDLKLYASKKTDLMELLKITGNFSNDIGMEFGVDKCAVIHVQRGRVEDSFNLQLSEDISLRSLSEMDSYKYLGMSQALSIAEQDMKQSLKDRFFARLIKVLKSLLSGGNKVRAFNGWVMPVLTYSFGILRWTQSELDALDRKVRRLLTAYRMHHPRSSVMRLYIPRKCGGRGFLNAKTLHNREVCNLRQYFLSVSVVMYRDVAAIDRGLTPLSLANENWRRPQVLSISDRTAIWKGKELHGRFYRALTGPDVDQLASVNWLRFSNLFGETEGFVFAIMDEVIMTNNYLKHILKDGTVDICRACHRPGESIRHVVSGCSRLANGEYLHRHNQVARIIHQQLALKYGLVDSEVPYYQYQPLPVLESGHITLYWDRSIITDRTIVANKPDIVIIDRSMRRVMLVDVTIPHDENLVKAEKEKLSKYLDLAHEVTAMWNVDSTIIIPMVVSVNGLIAKSFDKHLEKLSLGSWVKGLIQKAVMLDTARIVRRFLSLEP

SEQ ID NO: 27765 - protein, 1102 aa, Phalera bucephala
MDSRNKFKMTAYYGATEGGTILTAYRPKLLSLFRGLHPTVAVTAQRLSDQVRAIQRCKLLDDTVLERLHREALPARTESNVRSVEDPISLNNFARSEEVNSEQVSVSDQLQEQVRRALEDAFAEYRSAPISLRPCLTRLPMHRRNISLVSALDNVLKPHWETSVDLCDTHSILYCGAVAVCRVAGVRFPNLHRATQPTNAKPLWQCRIERRINMARTLIAKLLCFQAGNNRPRVVRFVTQAFAGTRVAPVDYVAGVAERIDYWKQKVYAWAKRIRRYKARADRYHVNRTFQTNQRSVYQAWERPQERVTDVHLPNAAVMAEFWRKIWSVPVTHSEGEWFDVVGRSCGPIQEMEPVVISREDLACAVRAAPNWKSPGPDGLHAFWLKRLQGSHSRLATQFQEALQLGSLPSFMTSGVTHLMHKSGSTSEPKNYRPITCLPTVYKLFTSILRIKINNHLKAQHILSPTQNGCKGGSRGTKDLLLIDIAICQQVRRSRKNVSMAWIDYKKAYDSVPHTGLGRVLELYRVHPALCSFLGSCMRQWTTVLRHPGCGGLSGSSDLIKISRGIFQGDSLSPLWFCLALNPLSAILKDSKLGDHLRRESEPISHLLYMDDLKLYASKKTDLMELLKITGNFSNDIGMEFGVDKCAVIHVQRGRVEDSFNLQLSEDISLRSLSEMDSYKYLGMSQALSIAEQDMKQSLRDRIFARLIKVLKSLLSGGNRVRAFNGWVMPVLTYSFGILRWTQSELDALDRKVRRLLTAYRMHHPRSSVMRLYIPRKCGGRGFLNAKTLHNREVCNLRQYFLSVSVVMYRDVAAIDRGLTPLSLANGNWRRPQVLSTSDRTAIWKGKELHGRFYRALTGPDVDQLASVTWLRFSNLFGETEGFVFAIMDEVIMTNNYRKYILKDGTVDICRACHRPGESIRHVVSGCSGLANGEYLHRHNQVARIIHQQLALKYGLVDSEVPYYQYQPLPVLESGHITLYWDRSVITDRTIVANKPDIVIIDRSMRRVMLVDVTIPHDENLVKAEKEKLSKYLDLAHEVTAMWNVDSTIIFPVVVSVNGLIAKSFDKHLEKLSLGSWVKGLIQKAVMLETARIVRRFLSLEP

SEQ ID NO: 27766 - protein, 1197 aa, Bombyx mori
MSTTTALRKNPSRQCRQVTCGAQRTSPCIPSCSSDGSPSPTRIESLSSDETQPSPAPPRPVRRGRPPLARLGSTRRNAPSTVPATSGVVRSRMRWNENINMNVMRAYYEATEGETNLSAYRSKMFSVFQTLCPTVNVSTQRLSDQVRAIQRLRLLDQSLLDRLRYEALPVPIEPQENQVVTDTVAPIIQHDEEIQEQVCASNQDYERLSSALEDSIQEYRLVSACSRPRLPRLPMHRRNVSLVGALDSILKPYLESSTDLIDTHSLLYCGAVAVCRVAEVKSPNLTQTAYRPPTKPQWQCRIEKRIDRARILIAKLMCFQKGNTRPRVMCFVDQAFAGTGISSNEYMTCIIERIDFWKQKVYAWASRIRRYRLRSERYHLNRVFQRDQRSVYRNWESSQSQVTDEPYNVNEEDMSTFWNNIWSIPIGHSEGEWIQTVRRECESFKEMDSITISAVDVSRAVRSMPNWKSPGPDGLHSYWIKWIRSSHERLAAQFQQALELGSLPDFMTSGITYLIYKSGNTSDPKNYRPITCLPTIYKLLTSILRIKIQNHIFNNNILSPNQNGCKAGSRGTKDLLLIDMTITQQVRRSKRNVHMAWIDYKKAYDSVPHTWLMRVLELYKINPILCSFLSSCMGQWSTFLSQPGQMTSSATPNLIRIKRGIFQGDSLSPLWFCLALNPLSTLLKDSTLGYRLRRGAEAISHLLFMDDLKLFASKKPDLMSLLKITDNFSKAIGMEFGVDKCAFIDVQRGKVVSSDCLLLNHSVVLKSLCESETYKYLGMFEVLNIVDADMKQSFRDRFFGRLIKVLKSHLSGGNKIRAFNGWVMPMLTYSFGILRWTQSELDVLDRKVRRLLTAYRMHHPRSSVMRLYIPRKCGGRGILNAKDLHNREIYNLREYFLKMNVNMYRDVVAVDKGLTPLSLANGNWKRLKVESISDRITVWRSKELHGRFYRALTGPDVDQLASVAWLRFSNLFGETEGFIFAIMDEVIMTNNYRKYILKDGTVDICRACHRPGESIRHIVSGCSRFANGEYLHRHNQVARIIHQQLALKYGFLDSAVPYYQYQPQPVLYNGHVTLYWDRSIITDRYIVANKPDIVIIDRSARRAVLVDVTIPHDENLVKAEKDKLIKYLDLAHETTAMWHVDSTIIVPIVVSVHGLIAKSFDQHLKKLSLSSWVKGLIQKAVILDTARIVRRFLTLES

SEQ ID NO: 27767 - protein, 1197 aa, Bombyx mori
MSTTTALRKNPSRQCRQVTCGARRTSPCIPSCSSDGSPSPTRIENLSSDETQPSPAPPRPVRRGRPPLARLGSTRRNVPSTVPATSGVVRSRMRWNENINMNVMRAYYEATEGETNLSAYRSKMFSVFQTLCPTVNVSTQRLSDQVRAIQRLRLLDQSLLDRLRYEALPVPIEPQENQVVTDTVAPIIQHDEEIQEQVCASNQDYERLSSALEDSIQEYRLVSSCSRPRLPRLPMHRRNVSLVGALDSILKPYLESSTDLIDTHSLLYCGAVAVCRVAEVKSPNLTQTAYRPPTKPQWQCRIEKRIDRARILIAKLMCFQKGNTRPRVMCFVDQAFAGTGISSNEYMTCIIERIDFWKQKVYAWASRIRRYRLRSERYHLNRVFQRDQRSVYRNWESSQSQVTNEPYNVNEEDMSTFWKNIWSIPIGHSEGEWIQTVRRECESYKEMDPITISAIDVSRAVRSMPNWKSPGSDGLHSYWIKWIRSSHERLAAQFQQALEMGSLPDFMTSGITYLIYKSGNTSDPKNYRPITCLPTIYKLLTSILRIKIQNHIFNNNILSPNQNGCKAGSRGTKDLLLIDMTITQQVRRGKRNVHMAWIDYKKAYDSVPHTWLMRVLELYKINPILCSFLSSCMGQWSTFLSQPGQMTSSAAPNLIRIKRGIFQGDSLSPLWFCLALNPLSTLLKDSTLGYRLRRGAEAISHLLFMDDLKLFASKKPDLMSLLKITDSFSKAIGMEFGVDKCAFIDVQRGKVVSSDCLLLNHSVVLKSLCESETYKYLGMFEVLNIVDADMKQSFRDRFFGRLIKVLKSHLSGGNKIRAFNGWVMPMLTYSFGILRWTQSELDVLDRKVRRLLTAYRMHHPRSSVMRLYIPRKCGGRGILNAKDLHNREIYNLREYFLKMNVNMYRDVVAVDKGLTPLSLANGNWKRLKVEGISDRITVWRSKELHGRFYRALTGPDVDQLASVAWLRFSNLFGETEGFIFAIMDEVIMTNNYRKYILKDGTVDICRACHRPGESIRHIVSGCSRFANGEYLHRHNQVARIIHQQLALKYGFLDSAVPYYQYQPQPVLDNGHVTLYWDRSIITDRYIVANKPDIVIIDRSARRAVLVDVTIPHDENLVKAEKDKLIKYLDLAHETTAMWHVDSTIIVPIVVSVHGLIAKSFDQHLKKLSLSSWVKGLIQKAVILDTARIVRRFLTLES

SEQ ID NO: 27768 - protein, 868 aa, Eilema depressum
MRFVTRAFSGTDIRPREFLSRVTERIDFLKQKIYAWANRIRRYKRRVDRYSQNRTFQRDERWVYRSWERPDSNGTDMRRPDDDATNTFWRSIWSTPVSHTEGDWMRVVERSCESIGTMEPVTISDEDITSAVRLLPNWRSAGPDGLHNFWLKWFRSSHGRLAMQFQSCLESGSLPAFITTGVTHLLHKSGSTTDPKNYRPITCLPTVYKLLTSILREKISTHLIDNSIMSISQNGCRSGARGTKELLIIDMAICQQARRHRKDLATCWIDYKKAYDSVPHTWLLRVLELYKIDTTLCTFMKTCMGQWRTVLCYPGCRQICEDSGLIKIERGIFQGDSLSPLWFCLALNPLSTILDSSGLGCRLRRDGQVISHLLYMDDLKLFAPNNLRLIELLKLTETFSNSIRMDFGVDKCAVMHVKRGRIVESESVELSDSTKLRALSATDTYKYLGMSQALGISEAGMKQSLQERFFGRLKKVLKSLLSGGNKVRACNGWVMPVLMYSFGILRWTQTELEALDRKVRAHLTAYRMHHPRSSVMRLYIPRKCGGRGFLNAKTLHNREVCNLREYFLHNDADMHRDVVMVDNGLTPLGLAKENWRKPAVLSINDRKDVWKGKELHGRFYRALHGPEIDIPASLSWLRFGDLFGETEGFVFAIMDEVVMTNNYRRYIIKDGTVDICRACHRPGESLRHIISGCSRLANGEYLHRHNQVARIIHQQLALKYNLVESEVPYYRYVPDPVLENGHITLYWDRSIITDRTIVANKPDIVIIDRLERRAIIVDITIPHDENLMKAEKEKQIKYLDLAHEIVDMWDVDSAIIVPIVVSVHGLIAKSLDQHLKRLSLDGWLKGLMQKAVLLGTARIVRKFLSLEP

SEQ ID NO: 27769 - protein, 1204 aa, Phalera bucephala
MAEPSRRNPVRLCRQRDARSPSARPTPLPGSPTSPQPSEDEDFFTPPTSGASSDDAGISASPPTLTSARRGRPPLPARLGPAGHCAPPTAPATGGVVRRMRWTPELNLSVMRAYYGATEGGTILTAYRPKLLSLFQGLHPTVAVTAQRLSDQVRAIQRCKLLDDTVLERLHCEALPARTESNVRSVEDPISLNNFARSEEVNSEQASVSDQLQEQVRRALEDAFAEYRSAPISLRPCLSRLPMHRRNISLVSALDNVLKPHWETSVDLCDTHSILYCGAVAVCRVAGVRFPNLHRATQPTNAKPLWQCRIERRINMARTLIAKLLCFQAGNNRPRVVRFVTQAFAGTRVAPVDYVAGVAERIDYWKQKVYAWAKRIRRYKARADRYHVNRTFQTNQRSVYQAWERPQERVTDVHLPNAAVMAEFWRKIWSVPVTHSEGEWFDVVGRSCGPIQEMEPVVISREDLACAVRAAPNWKSPGPDGLHAFWLKRLQGSHSRLATQFQEALQLGSLPSFMTSGFTHLIHKSGSTSEPKNYRPITCLPTVYKLLTSILRIKINNHLKAQHILSPTQNGCKGGSRGTKDLLLIDIAICQQVRRSRKNVSMAWIDYKKAYDSVPHTWLGRVLELYRVHPALCSFLGSCMRQWTTVLRHPGCGGLSGSSDLIKISRGIFQGDSLSPLWFCLALNPLSAILKDSKLGYHLRRESEPISHLLYMDDLKLYASKKTDLMELLKITGNFSNDIGMEFGVDKCAVIHVQRGRVEDSFNLQLSEDISLRSLSEMDSYKYLGMSQALSIAEQDMKQSLRDRFFARLIKVLKSLLSGGNRVRAFNGWVMPVLTYSFGILRWTQSELDALDRKVRRLLTAYRMHHPRSSVMRLYIPRKCGGRGFLNAKTLHNREVCNLRQYFLSVSVVMYRDVAAIDRGLTPLSLANGNWRRPQVLSTSDRTAIWKGKELHGRFYRALTGPDVDQLASVTWLRFSNLFGETEGFVFAIMDEVIMTNNYRKYILKDGTVDICRACHRPGESIRHVVSGCSRLANGEYLHRHNQVARIIHQQLALKYGLVDSEVPYYQYQPLPVLESGHITLYWDRSVITDRTIVANKPDIVIIDRSMRRVMLVDVTIPHDENLVKAEKEKLSKYLDLAHEVTAMWNVDSTIIIPMVVSVNGLIAKSFDKHLEKLSLGSWVKGLIQKAVMLDTARIVRRFLSLEP

SEQ ID NO: 27770 - protein, 1204 aa, Phalera bucephala
MAEYPRRNPVRRCRQRIAQGHSARPSPLRGSPNSPQSSENELYFTPPTSGASSDETEPPASSHPLRPERRGRPPLPACIGPAEHCAPPTAPATGGVVRRMRWTSELNMSVMRAYYGATKGETILTAYRPKLLSLFQELHPTVAVTAQRLSYQVRAIQRCKLLDDTVLERLRSETCPARTESDLRSFEEPISLDNFARSEEVNSGQVSVGDQLQEQVRRALKDAFAEYRSAPISLRPCLPRLPMHRHNISLVGALDNVLKSHWETSVDLCDTHSILYCGAVAVCRVAGVRFPNLHRAAQPTNAKPFWQCRIERRINMARTLIAKLLCFQAGNNCPRVVRFVAQAFAGTGVAPVDYMARVTERIDYWKQKVYAWANRIRRYRERADRYHVNRTFEVNQRSVYQAWERPQERVTDVHLPDAATMAEFWRKIWSVPVSHSEGEWFDVVGRSCEPIQEMEPVVITRDDVACAVRAAPNWKSPGPDGLHAFWLKRLQGSHARLATQFQEALELGSLPSLLTTGVTHLIHKSGSTLEPKNYRPITCLPTVYKLLTSILRTKINNHLKAQHILSPTQNGCKGGSRGTKDLLLIDMTICQQVRRSRKNVSMAWIDYKKAYDSVPHTWLRRVLELYKVHPALCSFLGLCMGQWTTVLRHPGYGGLSGSSDLIKISRGIFQGDSLSPLWFCLALNPLSAILKNSKLGYHLRRGSEPISHLLYMDDLKLYASKNTDLMELLKITGNFSNDIGMEFGVDKCAVIHVQRGRVEDSFNLQLSEDISLRSLSEMDSYKYLGMLQALSIAEQDMKQSLKDRFFARLMKVLKSLLSGGNRVRAFNGWVMPVLTYSFGILRWTQSELDALDRKVRRLLTAYRMHHPRSSVMRLYIPRRCGGRGFLNAKTLHNREVCNLRQYFLSVSVVMYRDVAAIDRGLTPLSLANGNWRRPQVLSISDRTAIWKGKELHGRFYRALTGPDVDQLASVTWLRFSNLFGETEGFVFAIMDEVIMTNNYRKHILKDGTVDICRACHCPGESIRHVVSGCSRLANGEYLHRHNQVAKIIHQQLALKYDLVDSEVPYYQYQPLPVLESGHITLYWDRSIITDRTIVANKPDIVIIDRSMRRVMLVDVTIPHDENLVNAEKEKISKYLDLAHEVTAMWNVDSTIIIPMVVSVNGLIAKSFDKHLEKLSLGSWVKGLIQKVVVLDTARIVRRFLSLEP

SEQ ID NO: 27771 - protein, 1204 aa, Phalera bucephala
MAEPSRRNPVRLCRQRDARSPSARPTPLPGSPTSPQPSEDEDFFTPPTSGASSDDAGISASPPTSTSARRGRPPLPARLGPAGHCAPPTAPATGGVVRRMRWTTELNLSVMRAYYGATEGGTILTAYRPKLLSLFQGLHPTVAVTAQRLSDQVRAIQRCKLLDDTVLERLHREALPARTESNVRSVEDPISLNNFARSEEVNSEQVSVSDQLQEQVRRALEDAFAEYRSAPISLRPCLPRLPMHRRNISLVSALDNVLKPHWETSVDLCDTHSILYCGAVAVCRVAGVRFPNLHRATQPTNAKPLWQCRIERRINMARTLIAKLLCFQAGNNRPRVVRFVTQAFAGTRVAPVDYVAGVAERIDYWKQKVYAWAKRIRRYKARADRYHVNRTFQTNQRSVYQAWERPQERVTDVHLPNAAVMAEFWRKIWSVPVTHSEGEWFDVVGRSCGPIQEMEPVVISREDLACAVRAAPNWKSPGPDGLHAFWLKRLQGSHSRLATQFQEALQLGSLPSFMTSGVTHLIHKSGSTSEPKNYRPITCLPTVYKLLTSILRIKINNHLKAQHILSPTQNGCKGGSRGTKDLLLIDIAICQQVRRSRKNVSMAWIDYKKAYDSVPHTWLGRVLELYRVHPALCSFLGSCMRQWTTVLRHPGCGGLSGSSDLIKISRGIFQGDSLSPLWFCLALNPLSAILKDSKLGYHLRRESEPISHLLYMDDLKLYASKKTDLMELLKITGNFSNDIGMEFGVDKCAVIHVQRGRVEDSFNLQLSEDISLRSLSEMDSYKYLGMSQALSIAEQDMKQSLRDRFFARLIKVLKSLLSGGNRVRAFNGWVMPVLTYSFGILRWTQSELDALDRKVRRLLTAYRMHHPRSSVMRLYIPRKCGGRGFLNAKTLHNREVCNLRQYFLSVSVVMYRDVAAIDRGLTPLSLANGNWRRPQVLSTSDRTAIWKGKELHGRFYRALTGPDVDQLASVTWLRFSNLFGETEGFVFAIMDEVIMTNNYRKHILKDGTVDICRACHRPGESIRHVVSGCSRLANGEYLHRHNQVARIIHQQLALKYGLVDSEVPYYQYQPLPVLESGHITLYWDRSVITDRTIVANKPDIVIIDRSMRRVMLVDVTIPHDENLVKAEKEKLSKYLDLAHEVTTMWNVDSTIIIPMVVSVNGLIAKSFDKHLEKLSLGSWVKGLIQKAVMLDTARIVRRFLSLEP

SEQ ID NO: 27772 - protein, 1204 aa, Phalera bucephala
MAEPSRRNPVRLCRQRDARSPSARPTPLPGSPASPQPSEDEDFFTPPTSGASSDDAGISASPPTLTSARRGRPPLPARLGPAGHCAPPTAPATGGVVRRMRWTPELNLSVMRAYYGATEGGTILTAYRPKLLSLFQGLHPTVAVTAQRLSDQVRAIQRCKLLDDTVLERLHREALPARTESNVRSVEDPISLNNFARSEEINSEQASVSDQLQEQVRRALEDAFAEYRSAPISLRPCLPRLPMHRRNISLVSALDNVLKPHWETSVDLCDTHSILYCGAVAVCRVAGVRFPNLHRATQPTNAKPLWQCRIERRINMARTLIAKLLCFQAGNNRPRVVRFVTQAFAGTRVAPVDYVAGVAERIDYWKQKVYAWAKRIRRYKARADRYHVNRTFQTNQRSVYQAWERPQERVTDVHLPNAAVMAEFWRKICSVPVTHSEGEWFDVVGRSCGPIQEMEPVVISREDLVCAVRAAPNWKSPGPDGLHAFWLKRLQGSHSRLATQFQEALQLGSLPSFMTSGVTHLIHKSGSTSEPKNYRPITCLPTVYKLLTSILRIKINNHLKAQHILSPTQNGCKGGSRGSKDLLLIDIAICQQVRRSRKNVSMAWIDYKKAYDSVPHTWLGRVLELYRVHPALCSFLGSCMRQWTTVLRHPGCGGLSGSTDLIKISRGIFQGDSLSPLWFCLALNPLSAILKDSKLGYHLRRESEPISHLLYMDDLKLYASKKTDLMELLKITGNFSNDIGMEFGVDKCAVIHVQRGRVEDSFNLQLSEDISLRSLSEMDSYKYLGMSQALSIAEQDMKQSLRDRFFARLIKVLKSLLSGGNRVRAFNGWVMPVLTYSFGILRWTQSELDALDRKVRRLLTAYRMHHPRSSVMRLYIPRKCGGRGFLNAKTLHNREVCNLRQYFLSVSVVMYRDVAAIDRGLTPLSLANGNWRRPQVLSTSDRTAIWKGKELHGRFYRALTGPDVDQLASVTWLRFSNLFGETEGFVFAIMDEVIMTNNYRKYILKDGTVDICRACHRPGESIRHVVSGCSRLANGEYLHRHNQVARIIHQQLALKYGLVDSEVPYYQYQPLPVLESGHITLYWDRSVITDRTIVANKPDIVIIDRSMRRVMLVDVTIPHDENLVKAEKEKLSKYLDLAHEVTAMWNVDSTIIIPMVVSVNGLIAKSFDKHLEKLSLGSWVKGLIQKAVMLDTARIVRRFLSLEP

SEQ ID NO: 27773 - protein, 1105 aa, Phalera bucephala
MRWTPELNLSVIVGPYGATEGGTILTAYRPKLLSLFQGLHPTVAVTAQRLSDQVRAIQRCKLLDDTVLERLRREALPARTDFNVRSVEEPISLNNFARSEEVNSEQVSVSDQLQEQVRRALEDAFAEYRSAPISLRPCLPRLPMHRRNISLVSALDNVLKPHWETSVDLCDTHSILYCGAVAVCRVAGVRFPNLHRATQPTNTKPFWQCRIERRINMARTLIAKLLCFQAGNNRPRVVRFVTQAFAGTRVAPVDYVAGVAERIDYWKQKVYAWAKRIRRYKARADRYHVNRTFQTNQRSVYQAWERPQERVTDVHLPNAAVMAEFWRKIWSVPVTHSEGEWFDVVGRSCGPIQEMEPVVISREDLACAVRAAPNWKSPGPDGLHAFWLKRLQGSHSRLATQFQEALQLGSLPSFMTSGVTHLIHKSGSTSEPKNDRAITCLPTVYKLLTSILRIKINNHLKAQHILSPTQNGCKGGSRGTKDLLLIDIAICQQVRRSRKNVSMAWIDYKKAYDSVPHTWLGRVLELYRVHPALCSFLGSCMRQWTTVLRHPGCGGLSGSSDLIKISRGIFQGDSLSPLWFCLALNPLSAILKDSKLGYHLRRESEPISHLLYMDDLKLYASKKTDLMELLKITGNFSNDIGMEFGVDKCAVIHVQRGRVEDSFNLQLSEDIILRSLSEMDSYKYLGMSQALSIAEQDMKQSLKDRFFARLIKVLKSLLSGGNKVRAFNGWVMPVLTYSFGILRWTQSELDALDRKVRRLLTAYRMHHPRSSVMRLYIPRKCGGRGFLNAKTLHNREVCNLRQYFLSVSVVMYRDVAAIDRGLTPLSLANGNWRRPQVLSTSDRTAIWKGKELHGRFYRALTGPDVDQLASVTWLRFSNLFGETEGFVFAIMDEVIMTNNYRKHILKDGTVDICRACHRPGESIRHVVSGCSRLANGEYLHRHNQVARIIHQQLALKYGLVDSEVPYYQYQPLPVLESGHITLYWDRSVITDRTIVANKPDIVIIDRSMRRVMLVDVTIPHDENLVKAEKEKLSKYLDLAHEVTTMWNVNSTIIIPMVVSVNGLIAKSFDKHLEKLSLGSWVKGLIQKAVMLDTARIVRRFLSLEP

SEQ ID NO: 27774 - protein, 889 aa, Phalera bucephala
MARTLIAKLLCFQAGNNRPRVMRFVAQAFAGTGVAPVDYVAGVAERIDYWKQKVYAWAKRIRRYKARADRYHVNRTFQTNQRSVYQAWERPQERVTDVHLPNAAVMAEFWRKIWSVPVSHSEGEWFDVVGRSCGPIQEMEPVVISREDLACAVRAAPNWKSPGPDGLHAFWLKRLQGSHSRLATQFQEALQLGSLPSFMTSGVTHLIYKSGSTSEPKNYRPITCLPTVYKLLTSILRIKINNHLKAQHILSPTQNGCKGGSRGTKDLLLIDMAICQQVRRSRKNVSMAWIDYKRAYDSVPHTWLGRVLELYRVHPALCSFLGSCMRQWTTVLRHPGCGGLFGSSDLIKISRGIFQGDSLSPLWFCLALNPLSAILKDSKLGYHLRRESEPISHLLYMDDLKLYASKKTDLMELLKITGNFSNDIGMEFGVDKCAVIHVQRGRVEDSFNLQLSEDISLRSLSEMDSYKYLGMSQALSIAEQDMKQSLKDRFFARLIKVLKSLLSGGNKVRAFNGWVMPVLTYSFGILRWTQSELDALDRKVRRLLTAYRMHHPRSSVMRLYIPRKCGGRGFLNAKTLHNREVCNLRQYFLSVSVVMYRDVAAIDRGLTPLSLANENWRRPQVLSISDRTAIWKGKELHGRFYQALTGPDVDQLASVNWLRFSNLFGETEGFVFAIMDEVIMTNNYRKHILKDGTVDICRACHRPGESIRHVVSCCSRLANGEYLHRHNQVARIIHQQLALKYGLVDSEVPYYQYQPLPVLESGHITLYWDRSIITDRTIVANKHDIVIIDRSMRRVMLVDVTIPHDENLVKAEKEKLSKYLDLAHEVTAMWNVDSTIIIPMVVSVNGLIAKSFDKHLEKLSLGSWVKGLIQKAVMLDTAHIVRRFLSLEP

SEQ ID NO: 27775 - protein, 1110 aa, Clostera curtula
MRWTHQLNEDVMRAYYGATKGGTVLTSYRSKMLSLFQALHPTVNVTAQRLSDQVRVIQRLGLLDAPVLEQLRGESQPAPSEPALENVTMAPRDPFPESDANVHEQVSISHQDIERLRSTLENVINEYRSMPIFDRPQLPRLPLNPYNISLVNAFDQILKTYIDSSSDLTDTHSILYCGAVAACYEAGVRFPASYQNARPVGSPPLWKQRIERRITAARTIIAKLYCFQAGNTRPKIMRFVKQAFAGTEINSNNYLSHIIERIDYWKQKVYAWAKRIKRYSIRMERYSINKIFQRDQRSIYRKWHLKDQTPDKQLPNIDEMSTFWRNIWSNPINHSENECFEVVRRACENISEMSPVLITATDVKSAVGWAPNWKSPGPDRLHAYWIKSYRSSHERLATQFQQALESGNVPNFMTTGLTHLIHKSGSTSDPKNFRPITCLPIIYKILTSILRTKINAHVMDNNILSPSQNGCKAKSRGTKDLLLIDMAISQQVRRNKRNVFMAWIDYKKAYDSVPHSWLKKILNLYRIHPTLCDFLSTCMEQWSTILLHPGHVNYFDSSNLVKIKRGIFQGDSLSPLWFCLALNPLSTLLKCSGLGYRLRKENEAISHLLYMDDLKLYASKKPDLMELLKITDNFSKSIGMEFGVDKCAVLNIQRGRIVNSECLQVSRNVSLRCLSESETYKYLGMSEALGIADADMKQVLKERFYSRLTKVLKSLLSGGNKVRAFNSWVMPVLAYSFGILRWTQTELDAVDRKVRRLLTAHRMHHPRSSVMRMYISRKCGGRGFLNAKDLHNREIHNLREYFLKVNVDMYRNVVAIDKGLTPLSLAIENWRKPKVMSISDRTAIWKDKELHGRFYRALTGSDVDQLASDVDQLASVDWLRFGNLFGETEGFVFAIMDEVMMTNNYRKHILKDGTVDICRACHRPGESIRHIVSGCSRLANGEYLHRHNQVAKIIHQQLAFKYGLVSTEVPYYQYQPQPVLENDHVTLYWDRSIITDRYIAANKPDIVIIDRSTRRVKLVDITIPHDENLVKAEKEKMIKYLDLAHEVTAMWSAESTSIIPIVLSVHGLISKSFDGHLNQLSISGWVKRLMQKAVLLETARIVRRFLSLKH

SEQ ID NO: 27776 - protein, 944 aa, Clostera curtula
MKSYIHTCSTLSETHSLLYCGAIAACRVGGARFLNFHSSNRRTNTIPLWQCRIQKKIDSARTTIAKLYAFRMGNSRPRIMRYVVQAFAGTGISRHDYQAWITERIDFFKQKMYAWAKRIRRYKERSDRFTQNRLFQSDQKRIYRSWECPEQQFSGSSRPSRELVSSFWQNIWSVPATHSEGLWFNSVQRSCDSISEMDPVIICDEDVSSAIHGAPNWKAPGPDGLQNFWLKKFNCLHSVLATQFQNILDLGSLPAFMTTGVTYLLFKSGSTSEPNNYRPITCLPTLYKLLTSILKFKIMRHVSNNNILASVQNGCKPRSRGTKELLLIDMTICQQVRRVRKNISMAWVDYKKAYDSVPHSWLLRVCTLYKLHPNLCSFLHSCMSSWATRLCHMDGMDFSDSPDLIQIKRGIFQGDSLSPLWFCLALNPLSTLLRDSMLGYRLRRNGEIVSHLLYMDDVKLYAPNESDLVTLLKITHNFSNDIRMEFGIDKCAVIRVQRGQIVNSSGVDISESVFLHSLSESENYKYLGMSQGLCIADKDMLTARFLGRVKKVFKSLLSGGNKARAFNSWAIPALSYSFGILKWTQTELDKLDRKVRRLMTSFRMHHPRSSVMRLYIPRKCGGRGYLNAKSLHNREVCNLRDYFVRIDDNLHRDVVSVDNGLTPLSMAKQNWRRLKVLTTPDRIAVWQSKELHGRFYRAFTGPDVDQQASISWLSFGNLFAETEGFVCAIMDEVVMTNNYRRHIIKDGTVDICRACRCPGESIRHIVSGCSRLANGEYLHRHNQVAKIIHQQLALKYGLIDSEIPYYQYQPAPVLDNGLITLYWDRSIITDRTIVANRPDLVLIDRSVRKAMIVDITIPHDYNLIKAETEKLSKYLDLAHEITSMWGVDSTIIVPIVVSVNGLIAKSFNRYLEKLSLSCWVKHLAQKAVLLETARIVRRFLSADP

SEQ ID NO: 27777 - protein, 1206 aa, Blastobasis lacticolella
MITRSKRKNQTVNAQPPPTPAPVSSSPSSSNDEFTTASDTSESSDERGLSAAPPPPPARRGRPLPARLGPTGRPAPPIAPATGGVVRRMRWTQSINENVMRAYYGATEGGTNLSAYRDRMLPLFQVLEPAIDVTAQRLSDQVRAIQRLKRLDDSVLDRLRLESLPVRAVPISTMSLPATSPPQVSPPSPAPRVPRTDATVGVEDCTNVSSVSTETNEYVRRTLEETIARYRFAPNSRPRLPRLPTNRRNLALMGAINVLLDSYIRASDNLVDTHSIMYCGAITACRVARVKFSDADRAPRVAGAPAWQKRIERRINTSRTLIAKLICFKEGNNRPRVMRFVDQAFAGTGISSRDYMVCATERIDFLKQKVCAWANRIRRYRERVDRFRLNRLFQSDQRKVYRKWEGTNQSGSDGSLPDASASNNFWRSIWSVPVEHSEGDWMNVVKRECEIIEPMAAVSICPEDVSCAIDTAQNWKCPGPDGLHNFWIKWFRCSHERLAIQFQEALEHGSLPTLFTTGITFLLYKSGSTTEAKNYRPITCLPTLYKLLTSILRKKINNHIIENNILAMSQNGCRVGSRGTKELLLIDMTICQQVRRSRGSLSAAWIDYKKAYDSVPHSWLRRVLELYKINATLRSFLDACMRQWITVLSQPVGGIDHSPPQDFIRIERGIFQGDSLSPLWFCLALNPLSTLLKHSELGCRLRREGEVISHLLYMDDLKLFAPKRQDLMELLKITEIFSNAIRMEFGADKCAVMHVQRGKVANTTNLQLSETMSFRSLSEAENYKYLGMSQSLGIVDEGVKQAVKERFFCRLTKVLNSLLSGGNKVRSFNAWVMPLLTYSFGILRWTQTELDALDRRVRLLLTTHRMLHPRSSVMRLYIPRKCGGRGFLSAKTLHNREVCSLRDYFLNNECGMHRAVVAVDRGLTPLSLANENWRKPKVLSTIDRKDVWKSKELHGRFYRALTGPDVDLLASVNWLRFGDLFGETEGFVCAIADEVIMTNNYRRYILKDGTDDICRACRCPGESLRHITSGCGRLANGEYLHRHNLVARIIHQQLALQYGLVESEVPYYKYVPAPVLENGLATLYWDRSVITDRTIVANRPDIVLTDRSKRRAVLVDVTIPHDGNLVKAEKDKQCKYLDLAHEVTAMWNVDSTIIVPIVVSVNGLIAKSLDQHLKSLSLDGWVKGQIQKAVLLETARIVRRFLSLQP

SEQ ID NO: 27778 - protein, 1207 aa, Blastobasis lacticolella
MITRSKRKNQTVNAQPPPTPAPVSSSPSSSNDEFTTASDTSESSDERGLSAAPPPPPARRGRPLPARLGPTGRPAPPMAPATGSVVRRMRWTQSINENVMRAYYGATEGGTNLSAYRDRMLPLFQVLEPAIDVTAQRLSDQVRAIQRLKRLDDSVLDRLRLESLPVRAVPISTMSLPATSPPQVSPPRPAPRVPRTDATVGVEDCTNVSSVSTETNEYVRRTLEETIARYRFAPNSRPRLPRLPTNRRNLALMGAINVLLDSYIRASDNLVDTHSIMYCGAITACRVARVKFSDADRAPRVAGGAPAWQKRIERRINTFRTLIAKLICFKEGNNRPRVMRFVDQAFAGTGISSRDYMACATERIDFLKQKVCAWANRIRRYRERVDRFRLNRLFQSDQRKVYRKWEGTNQSGSDGSLPDASASNNFWRSIWSVPVEHSEGDWMNVVKRECEIIEPMAAVSICPEDVSCAIDTAQNWKCPGPDGLHNFWIKWFRCSHERLATQFQEALEHGSLPTLFTTGITFLLYKSGSTTEAKNYRPITCLPTLYKLLTSILRKKINNHIIENNILAMSQNGCRVGSRGTKELLLIDMTICQQVRRSRGSLSAAWIDYKKAYDSVPHSWLRRVLEVYKINATLRSFLDACMRQWITVLSQPVGGIDHSPPQDFIRIERGIFQGDSLSPLWFCLALNPLSTLLKHSELGCRLRREGEIISHLLYMDDLKLFAPKRQDLMELLKITEIFSNAIRMEFGADKCAVMHVQRGKVANTTNLQLSETMSFRSLSEAETYKYLGMSQSLGIVDEGVKQAVKERFFCRLTKVLNSLLSGGNKVRSFNAWVMPLLTYSFGILRWTQTELDALDRRVRLLLTTHRMLHPRSSVMRLYIPRKCGGRGFLSAKTLHNREVCSLRDNFLNNECRMHRAVVAVDRGLTPLSLANENWRKPKVLSTIDRKDVWKSKELHGRFYRALTGPDVDLLASVNWLRFGDLFGETEGFVCAIADEVIMTNNYRRYILKDGTVDICRACRCPGESLRHITSGCGRLANGEYLHRHNLVARIIHQQLALQYGLVESEVPYYKYVPAPVLENGLATLYWDRSVITDRTIVANRPDIVLTDRSKRRAVLVDVTIPHDGNLVKAEKDKQCKYLDLAHEVTAMWDVDSTIIVPIVVSVNGLIAKSLDQHLKSLSLDGWVKGQIQKAVLLETARIVRRFLSLQP

SEQ ID NO: 27779 - protein, 1069 aa, Peribatodes rhomboidaria
MLTRLKKKQLAAEASTRPPPPPASSSGSPSSEEDEYATPLDTTDSTDEEAAPTPAPPPPPARRGRPPLPARLGPAGRSAPPTAPATGGVVCRMRWTQVMNENCMRAYYGATEGGTNLTAYRVRMLSLFQVLEPTVTVSTQRLSDQVRAIHRCKLLDQSVLDRLCLEAIRARPIPASTRDRPVASSAPTLASVPASAVTLATMANTDVDGDRTSVNVSSQVREHLRRALEDAISQYRYAPDSRPRLPRLPTHRRNMALMGALNVLLAPYLRASENLTDTHSILYCGAIAACRVARVKFPDTSRAPRPAGGVPAWQVRIERRISTFRTLIAKLLCFSRGNTRPRVMRFVTQAFAGTDIRPQYYLANVTERIDYLKQKVYAWANRIRRYRERVDRYWQNRLFQSDQRKVYRGWEGTEQCVIDGHRPDASAMIDFWRGIWSVPVEHTEGEWMRVVERECESIESMESILIDSVDVSCAIRTAQNWKSPGPDGLHNFWIKWIRCSHDRLAIQFQEALELGSLPSFMTTGVTFLLHKSGSTTDPKNYRPITCLPTIYKLLTSILRNKINTHIVANNVLAPAQNGCRVGSRGTKELLLIDMAISQQVRRNKGALSVAWIDYKKAYDSVPHSWLERILELYKIDITLKSFLSACMRQWTTVLCQPGGGEVSADPRDLIRIERGIFQGDSLSPLWFCLALNPLSTLLKDLGLGHRLRRGGEVISHLLYMDDLKLFAPKRQDLMELLKTTEVFSSAITMEFGVDKCAVMHVQRGKVVNSPNLQLSETMTLRSLSEVETYKYLGMSESLGISVADIKKSIKERFFCRLTKVLDSLLSGGNKVRAFNGWVMPLLIYSFGILRWTQTELDALDRRVRQLLTTHRMLHPRSSVMRLYIPRKLGGRGMLNAKNLHNREVYRLRSFFRNNDCGMHCDVVAVDKGLTPLSLANENWRQPPVLSTEDRKIVWKGKELHGRFYRALTGPDVDLLASVNWLRFGDLFGETEGFACAIADEVIKTNNYRKYILKDGTVDICRACHRPGESLRHIISGCSHLANGEYLHRHNQVARIIHQQLALQYGLAVL

SEQ ID NO: 27780 - protein, 1195 aa, Bembecia ichneumoniformis
MLTRARTKTNARQTTPDSSLSSASQPPIPTPVIAETSSSSTSEEFFSPPLSPTPARRRGRGRPPTSLGPRGPPASNRVPAAGGNVHRIRWTTSMNENVMRAYLVATKGGVNLTAYRVRMLPLFQELEPAVNVSAQRLSDQVRAIQRCHLLEDTVLERLRSEVLSNPGIPTSSLRNTQPTIEPVLQSDRDYEDVMDTGSTNVSNHYNEQLRSVLECTVREYRFVPCVDRPRLPRLPTHKKNIALVGALDAMLSDYFDNSADLSDTHSILYCAAVAACRVANVKFPDYDIASRPQSAVPAWQCRIERRIAETRALIGKLTCFRLGNTRPRVMRFVTRAFSETGISPRDFLSRVTERIDYLKQKVYAWANRIRRYKKRVDRYSQNRAFQRDQRWVYRCWERPDLNTIDVHRPDDNATTTFWSSIWSLPVGHTEGDWMCDVRRSCEPIKKMEPVCISSLDVTNAVRLLPNWKSAGPDGLHNFWLKWFKSSHGCLASQFQSCLESGSLPDFITTGVTHLLYKSGSAMDPKNYRPITCLPTIYKLLTSILRRKISSHLTDNSIMSIFQNGCRSGARGTKELLIIDMALCQQARRNRKDLATCWIDYKKAYDSVPHTWLLRVLELYKIDTTLCTFMKACMGQWKTVLRYPGCRQVCGGHIKIERGIFQGDSLSPLWFCLALNPLSTILESSGLGCRLRKDGQVISHLLYMDDLKLFAPNNLQLTELIKVTETFSNSIRMEFGVDKCAVMYVKKGRVVESEGVELSDSTQFRSLSSTETYKYLGMSQALGISEASMKQSLQERFIGRLKKVLNSLLSGGNKVRACNGWVMPILMYSFGILRWTQTELDALDRKVRTLLTAYRMHHPRSSVMRLYIPRKCGGRGFLNAKTLHNREVCNLRDYFLHSDADVHRDVVTIDHGLTPLALAKENWRRPVVLSINDRRNVWKSKELHGRFYRALHGPDVDILSSVSWLRFGDLFGETEGFVCAIMDEVVMTNNYRRYILRDGTVDICRACHRPGESLRHIISGCSRLANGEYLHRHNQVARIIHQQLALKYNLVESEVPYYRYVPDSVLDNGHITLYWDRSIITDRTIVANKPDIVIIDRVERRAMIVDITVPHDENLVKAEKDKQVKYLDLAHEMVDMWDIDSTVIVPIVVSVHGLIAKSLDQHLKKLALDGWIKGLMQKAVLLDTARIVRRFLSLEP

SEQ ID NO: 27781 - protein, 1207 aa, Blastobasis lacticolella
MITRSKRKNQTVNAQPPPTPAPVSSSPSSSNDEFTTASDTSESSDERGLSAAPPPPPARRGRPLPARLGPTGRPAPPMAPATGSVVRRMRWTQSINENVMRAYYGATEGGTNLSAYRDRMLPLFQVLEPAIDVTAQKLSDQVRAIQRLKRLDDSVLDRLRLESLPVHAVPISTMSLPATSPPQVSPPSPAPRVPRTDATVGVEDCTNVSSVSTETNEYVRRTLEETIARYRFAPNSRPRLPRLPTNRRNLALMGAINVLLDPYIRASDNLVDTHSIMYCGAITACRVARVKFSDADRAPRVAGGAPAWQKRIERRINTFRTLIAKLICFKEGNNRPRVMRFVDQAFAGTGISSRDYMACATERIDFLKQKVCAWANRIRRYRERVDRFRLNRLFQSDQRKVYRKWEGTNQSGSDGSLPDASASNNFWRSIWSVPVEHSEGDWMNVVKRECEIIEPMVAVSICPEDVSCAIDTAQNWKCPGPDGLHNFWIKWFRCSHERLATLFQEALEHGSLPTLFTTGITFLLYKSGSTTEAKNYRPITCLPTLYKLLTSILRKKINNHIIENNILAMSQNGCRVGSRGTKELLLIDMTICQQVRRSRGSLSVAWIDYKKAYDSVPHSWLRRVLELYKINATLRSFLDACMRQWITVLSQPVGGIDHSPPQDFIRIERGIFQGDSLSPLWFCLALNPLSTLLKHSELGCRLRREGEVISHLLYMDDLKLFAPKRQDLMELLKITEIFSNAIRMEFGADKCAVMHVQRGKVANTTNLQLSETMSFRSLSEAETYKYLGMSQSLGIVDEGVKQAVKERFFCRLTKVLNSLLSGGNKVRSFNAWVMPLVTYSFGILRWTQTELDALDRRVRLLLTTHRMLHPRSSVMRLYIPRKCGGRGFLSAKTLHNREVCSLRDYFLNNECGMHRAVVAVDRGLTPLSLANENWRKPKVLSTIDRKDVWKSKELHGRFYRALTGPDVDLLASVNWLRFGDLFGETEGFVCAIADEVIMTNNYRRYILKDGTVDICRACRCPGESLRHITSGCGRLANGEYLHRHNQVARIIHQQLALQYGLVESEVPYYKYVPAPVLENGLATLYWDRSVITDRTIVANRPDIVLTDRSKRRAVLVDVTIPHDGNLVKAEKDKQCKYLDLAHKVTAMWDVDSTIIVPIVVSVNGLIAKSLDQHLKSLSLDGWVKGQIQKAVLLETARIVRRFLSLQP

SEQ ID NO: 27782 - protein, 1195 aa, Bembecia ichneumoniformis
MLTRARTKTNARQTTPDSSLSSASQPPIPTPVIAETSSSSTSEEFFSPPLSPTPARRRGRGRPPTSLGPRGPPASNRVPAAGGNVHRIRWTTSMNENVMRAYLVATKGGVNLTAYRVRMLPLFQELEPAVNVSAQRLSDQVRAIQRCHLLEDTVLERLRSEVLSNPGIPTSSLRNTQPTIEPVLQSDRDYEDVMDTGSTNVSNHYNEQLRSVLECTVREFRFVPCVDRPRLPRLPTHKKNIALVGALDAMLSDYFDNSADLSDTHSILYCAAVAACRVANVKFPDYDIASRPQSAVPAWQCRIERRIAETRALIGKLTCFRLGNTRPRVMRFVTRAFSETGISPRDFLSRVTERIDYLKQKVYAWANRIRRYKKRVDRYSQNRAFQRDQRWVYRCWERPDLNTIDVHRPDDNATTTFWSSIWSLPVGHTEGDWMCDVRRSCEPIKKMEPVCISSLDVTNAVRLLPNWKSAGPDGLHNFWLKWFKSSHGCLASQFQSCLESGSLPDFITTGVTHLLYKSGSAMDPKNYRPITCLPTIYKLLTSILRRKISSHLTDNSIMSISQNGCRSGARGTKELLIIDMALCQQARRNRKDLATCWIDYKKAYDSVPHTWLLRVLELYKIDRTLCTFMKACMGQWKTVLRYPGCRQVCGGHIKIERGIFQGDSLSPLWFCLALNPLSTILESSGLGCRLRKDGQVISHLLYMDDLKLFAPNNLQLTELIKVTETFSNSIRMEFGVDKCAVMYVKKGRVVESEGVELSDSTQFRSLSSTETYKYLGMSQALGISEASMKQSLQERFIGRLKKVLNSLLSGGNKVRACNGWVMPILMYSFGILRWTQTELDALDRKVRTLLTAYRMHHPRSSVMRLYIPRKCGGRGFLNAKTLHNREVCNLRDYFLHSDADVHRDVVTIDHGLTPLALAKENWRRPVVLSINDRRNVWKSKELHGRFYRALHGPDVDILSSVSWLRFGDLFGETEGFVCAIMDEVVMTNNYRRYILRDGTVDICRACHRPGESLRHIISGCSRLANGEYLHRHNQVARIIHQQLALKYNLVESEVPYYRYVPDSVLDNGHITLYWDRSIITDRTIVANKPDIVIIDRVERRAMIVDITVPHDENLVKAEKDKQVKYLDLAHEMVDMWDIDSTVIVPIVVSVHGLIAKSLDQHLKKLALDGWIKGLMQKAVLLDTARIVRRFLSLEP

SEQ ID NO: 27783 - protein, 955 aa, Blastobasis lacticolella
MGAINVLLDSYIRASDNLVDTHSILYCGAITACRVARAKFSDADRAPRVAGGAPAWQKRIERRINTFRTLIAKLICFKEGNNRPRVMRFVDQAFAGTGISSRDYMACATERIDFLKQKVCAWANRIRRYRERVDRFRLNRLFQSDQRKVYRKWEGTNQSGSDGSLPDASASNNFWRSIWSVPVEHSEGDWMNVVKRECEIIEPMAAVSICPEDVSCAIDTAQNWKCPGPDGLHNFWIKWFRCSHEHLATQFQEALEHGSLPTLFTTGITFLLYKSGSTTEAKNYRPITCLPTLYKLLTSILRKKINNHIIENNILAMSQNGCRVGSRGTKELLLIDMTICQQVRRSRGSLSAAWIDYKKAYDSVPHSWLRRVLELYKINATLRSFLDACMRQWITVLSQPVGGIDHSPPQDFIRIERGIFQGDSLSPLWFCLALNPLSTLLKHSELGCRLRREGEVISHLLYMDDLKLFAPKRQDLMELLKITEFFSNAIRMEFGADKCAVMHVQRGKVANTTNLQLSETMSFRSLSEAETYKYLGMSQSLGIVDEGVKQAVKERFFCRLTKVLNSLLSGGNKVRSFNAWVMPLLTYSFGILRWTQTELDALDRRVRLLLTTHRMLHPRSSVMRLYIPRKCGGRGFLSAKTFHNREVCSLRDYFLNNECGMHRAVVAVDRGLTPLSLANENWRKPKILSTIDRKDVWKSKELHGRFYRALTGPDVDLLASVNWLRFGDLFGETEGFVCAIADEVIMTNNYRRYILKDGTIDICRACRCPGESLRHITSGCGRLANGEYLHRHNLVARIIHQQLALQYGLVESEVPYYKYVPAPVLENGLATLYWDRSVITDRTIVANRPDIVLTDRSKRRAVLVDVTIPHDGNLVKAEKDKQCKYLDLAHEVTAMWDVDSTIIVPIVVSVNGLIAKSLDQHLKSLSLDGWVKGQIQKAVLLETARIVRRFLSLQP

SEQ ID NO: 27784 - protein, 1195 aa, Bembecia ichneumoniformis
MLTRARTKTNARQTTPDSSLSSASQPPIPTPVIAETSSSSTSEEFFSPPLSPTPARRRGRGRPPTSLGPRGPPASNRVPAAGGNVHRIRWTTSMNENVMRAYLVATKGGVNLTAYRVRMLPLFQELEPAVNVSAQRLSDQVRAIQRCHLLEDTVLERLRSEVLSNPGIPTSSLRNTQPTIEPVLQSDRDYEDVMDTGSTNVSNHYNEQLRSVLECTVREFRFVPCVDRPRLPRLPTHKKNIALVGALDAMLSDYFDNSADLSDTHSILYCAAVAACRVANVKFPDYDIASRPQSAVPAWQCRIERRIAETRALIGKLTCFRLGNTRPRVMRFVTRAFSETGISPRDFLSRVTERIDYLKQKVYAWANRIRRYKKRVDRYSQNRAFQRDQRWVYRCWERPDLNTIDVHRPDDNATTTFWSSIWSLPVGHTEGDWMCDVRRSCEPIKKMEPVCISSLDVTNAVRLLPNWKSAGPDGLHNFWLKWFKSSHGCLASQFQSCLESGSLPDFITTGVTHLLYKSGSAMDPKNYRPITCLPTIYKLLASILRRKISSHLTDNSIMSISQNGCRSGARGTKELLIIDMALCQQARRNRKDLATCWIDYKKAYDSVPHTWLLRVLELYKIDTTLCTFMKACMGQWKTVLRYPGCRQVCGGHIKIERGIFQGDSLSPLWFCLALNPLSTILESSGLGCRLRKDGQVISHLLYMDDLKLFAPNNLQLTELIKVTETFSNSIRMEFGVDKCAVMYVKKGRVVESEGVELSDSTQFRSLSSTETYKYLGMSQALGISEASMKQSLQERFIGRLKKVLNSLLSGGNKVRACNGWVMPILMYSFGILRWTQTELDALDRKVRTLLTAYRMHHPRSSVMRLYIPRKCGGRGFLNAKTLHNREVCNLRDYFLHSDADVHRDVVTIDHGLTPLALAKENWRRPVVLSINDRRNVWKSKELHGRFYRALHGPDVDILSSVSWLRFGDLFGETEGFVCAIMDEVVMTNNYRRYILRDGTVDICRACHRPGESLRHIISGCSRLANGEYLHRHNQVARIIHQQLALKYNLVESEVPYYRYVPDSVLDNGHITLYWDRSIITDRTIVANKPDIVIIDRVERRAMIVDITVPHDENLVKAEKDKQVKYLDLAHEMVDMWDIDSTVIVPIVVSVHGLIAKSLDQHLKKLALDGWIKGLMQKAVLLDTARIVRRFLSLEP

SEQ ID NO: 27785 - protein, 1203 aa, Blastobasis lacticolella
MITRSKRKNQTVNAQPPPTPAPVSSSPSSSNDEFTTASDTSESSDERGLSAAPPPPPARRGRPLPARLGPTGRPAPPMAPATGGVVRRMRWTQSINENVMRAYYGATEGGTNLSAYRDRMLPLFQVLEPAIDVTAQRLSDQVRAIQRLKRLDDSVLDRLRLESLPVRAVPISTMSLPATSPPQVSPPSPAPRVPRTDATVCVEDCTNVSSVSTETNEYVRRTLEETIARYRFAPNSRPRLPRLPTNRRNLALMGAINVLLDSYIRASDNLVDTHSIMYCGAITACRVARVKFSDADRAPRVAGGAPAWQKRIERRINTFRTLIAKLICFKEGNNRPRVMRFVDQAFAGTGISSRDYMACATERIDFLKQKVCAWANRIRRYRERVDRFRLNRLFQSDQRKVYRKWEGTNQSGSDGSMLDASASNNFWRSIWSVPVEHSEGDWMNVVKRECEIIEPMAAVSICPEDVSCAIDTAQNWKCPGPDGLHNFWIKWFRCSHERLATQFQEALEHGSLPTLFTTGITFLLYKSGSTTEAKNYRPITCLPTLYKFFTSILRKKINNHIIENNILAMSQNGCRVGSRGTKELLLIDMTICQKVRRSRGSLSAAWIDYKKAYDSVLRRVLELYKINATLRSFLDACMRQWITVLSQPVGGIDHSPPQDFIRIERGIFQGDSLSPLWFCLALNPLSTLLKHSELGCRLRREGEVISHLLYMDDLKLFAPKRPDLMELLKITEIFSNAIRMEFGADKCAVMHVQRGKVANTTNLQLSETMSFRSLSEAETYKYLGMSQSLGIVDEGVKQAVKERFFCRLTKVLNSLLSGGNKVRSFNAWVMPLLTYSFGILRWTQTELDALDRRVRLLLTTHRMLHPRSSVMRLYIPRKCGGRGFLSAKTLHNREVCSLRDYFLNNECEMHRAVVAVDRGLTPLSLANENWRKPKVLSTIDRINVWKSKELHGRFYRALTGPDVDLLASVNWLRFGDLFGETEGFVCAIADEVIMTNNYRRYILKDGTVDICRACRCPGESLRHITSGCGRLANGEYLHRHNLVARIIHQQLALQYGLVESEVPYYKYVPAPVLENGLATLYWDRSVITDRTIVANRPDIVLTDRSKRRAVLVDVTIPHDGNLVKAEKDKQCKYLDLAHEVTAMWDVDSTIIVPIVVSVNGLIAKSLDQHLKSLSLDGWVKGQIQKAVLLETARIVRRFLSLQP

SEQ ID NO: 27786 - protein, 1206 aa, Hypena proboscidalis
MIMLTRARAKAARSSPPDPSLSSTLQSSEPATAIPVIAEASSSSSSDEYFSPPTTPTPVRRAGRGRPPSCLGPRGPPASNRAPAVGGDVRRMKWTKEMNEHVMRAYYVATEGGINLSAYRDRILPVFQVLEPTVDVSAQRLSDQVRAIQRCRMLDEAVLERLRSDARNYTAALPLSQSVPVNSVPTSNVEETQAQLSVLDVGEDGGVLSVSTLSNEQLRSALECAVCEYRFLPIESRPRLPRLPTHRRNIALVCALDSLLPEYLENSGDLVDTHSILYCAAVATCRVAGVKFPVIEPAARPKLAKPAWQCRIEQRIARARVLIGKLITYRSGNTRPRVMRFVTQAFSGTNISPHEYISQVTERIDFFKQKVYAWANRIKRFRRRSDRYTLNRAFQRDERWVYRDWERPVSDVDGGCRPDDGVTHTFWRGIWSAPVVHTEGDWMGAVEQSCEGITQMEPLNIDKHDVACAVRSLPNWKSAGPDGLHNFWLKWLRSSHDCLASQFQLALETGSLPDFLTIGVTHLLHKSGDTADPKNYRPITCLPTVYKLLTSILRVKITSHIIDNNIFSISQNGCRKGARGTKELLICDIAINQQVRRNRRDLVTCWIDYKKAYDSVPHSWLLRVLELYKFDAALCTFLRACMGQWKTVLRYPGCRQVPREGDLVRIERGIFQGDSLSPLWFCLALNPLSTILEGSELGYRLRRDGQVISHLLYMDDLKLFASTKSQLLALLKVTETFSNSIGMEFGIDKCAVMHVRRGRIVESEGVQLSDSTQLRSLSATDTYKYLGMSQALGISEADMKQSLRERFFGRLGKVLNSLLSGGNKIRACNGWVMPVLMYSFGILRWTQTELDALDRRVRSLLTAHRMHHPRSSVMRLYIPRRCGGRGLLHTKDLHNREVCNLREYFLAVNSGMHRDVVAVDSGFTPLALGKENWRKPVVLSTSDRKDVWKSKELHGRFYRALHGPDVDTLASVSWLRFGDLFGETEGFVFAIMDEVVMTNNYRRYILKDGTVDVCRACHCPGESLRHIVSGCSRLANGEYLHRHNLVARIVHQQIALKYKLVAAEVPYYRYVPDPVLENGRATLYWDRSIITDRTIIANRPDIVLIDRLERRAVIVDITIPHDGNLVKAEKDKQIKYLDLAHEIVDMWDVDSAVIVPIVISVNGLIAKSLDQHLKRLALGGWTKNQMQKAVLLDTARIVRRFLSLEP

SEQ ID NO: 27787 - protein, 1204 aa, Hypena proboscidalis
MLTRARAKAARSSPPDPSLSSTLQSSEPATAIPVIAEASSSSSSDEYFSPPTTPTPVRRAGRGRPPSCLGPRGPPASNRAPAVGGDVRRMKWTKEMNEHVMRAYYVATEGGINLSAYRDRILPVFQVLEPTVDVSAQRLSDQVRAIQRCRMLDEAVLERLRSDARNYTAALPLSQSVPVNSVPTSNVEETQAQLSVLDVGEDGGVLSVSTLSNEQLGSALECAVCEYRFLPIESRPRLPRLPTHRRNIALVCALDSLLPEYLENSGDLVDTHSILYCAAVATCRVAGVKFPVIEPAARPKLAKPAWQCRIEQRIARARVLIGKLITYRSGNTRPRVMRFVTQAFSGTNISPHEYISQVTERIDFFKQKVYAWANRIKRFRRRSDRYTLNRAFQRDERWVYRDWERPVSDVDGGCRPDDGVTHTFWRGIWSAPVVHTEGDWMGAVEQSCEGITQMEPLNIDKHDVACAVRSLPNWKSAGPDGLHNFWLKWLRSSHDCLASQFQLALETGSLPDFLTIGVTHLLHKSGDTADPKNYRPITCLPTVYKLLTSILRVKITSHIIDNNIFSISQNGCRKGARGTKELLICDIAINQQVRRNRRDLVTCWIDYKKGYDSVPHSWLLRVLELYKFDAALCTFLRACMGQWKTVLRYPGCRQVPREGDLVRIERGIFQGDSLSPLWFCLALNPLSTILEGSELGYRLRRDGQVISHLLYMDDLKLFASTKSQLLALLKVTETFSNSIGMEFGIDKCAVMHVRRGRIVESEGVQLSDSTQLRSLSATDTYKYLGMTQALGISEADMKQSLRERFFGRLGKVLNSLLSGGNKIRACNGWVMPVLMYSFGILRWTQTELDALDRRVRSLLTAHRMHHPRSSVMRLYIPRRCGGRGLLNTKDLHNREVCNLREYFLAVNSGMHRDVVAVDSGFTPLALGKENWRKPVVLSTSDRKDVWKSKELHGRFYRALHGPDVDTLASVSWLRFGDLFGETEGFVFAIMDEVVMTNNYRRYILKDGTVDVCRACHCPGESLRHIVSGCSRLANGEYLHRHNLVARIVHQQIALKYKLVAAEVPYYRYVPDPVLENGRATLYWDRSIITDRTIIANRPDIVLIDRLERRAVIVDITIPHDGNLVKAEKDKQIKYLDLAHEIVDMWDVDSAVIVPIVISVNGLIAKSLDQHLKRLALGGWTKNQMQKAVLLDTARIVRRFLSLEP

SEQ ID NO: 27788 - protein, 868 aa, Hypena proboscidalis
MRFVTQAFSGTNISPHEYISQVTERIDFFKQKVYAWANRIKRFRRRSDRYTLNRAFQRDERWVYRDWERPVSDVDGGCRPDDGVTHTFWRGIWSAPVVHTEGDWVGAVEQSCEGITQMEPLNIDKHDVACAVRSLPNWKSAGPDGLHNFWLKWLRSSHDCLASQFQLALETGSLPDFLTIGVTHLLHKSGDTADPKNYRPITCLPTVYKLLTSILRVKITSHIIDNNIFSISQNGCRKGARGTKELLICDIAINQQVRRNRRDLVTCWIDYKKAYDSVPHSWLLRVLELYKFDAALCTFLRACMGQWKTVLRYPGCRQVPREGDLVRIERGIFQGDSLSPLWFCLALNPLSTILEGSELGYRLRRDGQVISHLLYMDDLKLFASTKSQLLALLKVTETFSNSIGMEFGIDKCAVMHVRRGRIVESEGVQLSDSTQLRSLSATDTYKYLGMTQALGISEADMKQSLRERFFGRLGKVLNSLLSGGNKIRACNGWVMPVLMYSFGILRWTQTELDALDRRVRSLLTAHRMHHPRSSVMRLYIPRRCGGRGLLNTKDLHNREVCNLREYFLAVNSGMHRDVVAVDSGFTPLALGKENWRKPVVLSTSDRKDVWKSKELHGRFYRALHGPDVDTLASVSWLRFGDLFGETEGFVFAIMDEVVMTNNYRRYILKDGTVDVCRACHCPGESLRHIVSGCSRLANGEYLHRHNLVARIVHQQIALKYKLVAAEVPYYRYVPDPVLENGRATLYWDRSIITDRTIIANRPDIVLIDRLERRAVIVDITIPHDGNLVKAEKDKQIKYLDLAHEIVDMWDVDSAVIVPIVISVNGLIAKSLDQHLKRLALGGWTKNQMQKAVLLDTARIVRRFLSLEP

SEQ ID NO: 27789 - protein, 868 aa, Hypena proboscidalis
MRFVTQAFSGTNISPHEYISQVTERIDFFKQKVYAWANRIKRFRRRSDRYTLNRAFQRDERWVYRDWERPVSDVDGGCRPDDGVTHTFWRGIWSAPVVHTEGDWMGAVEQSCEGITQMEPLNIDKHDVACAVRSLPNWKSAGPDGLHNFWLKWLRSSHDCLASQFQLALETGSLPDFLTIGVTHLLHKSGDTADPKNYRPITCLPTVYKLLTSILRVKITSHIIDNNIFSISQNGCRKGARGTKELLICDIAINQQVRRNRRDLVTCWIDYKKAYDSVPHSWLLRVLELYKFDAALCTFLRACMGQWKTVLRYPGCRQVPREGDLVRIERGIFQGDSLSPLWFCLALNPLSTILEGSELGYRLRRDGQVISHLLYMDDLKLFASTKSQLLALLKVTETFSNSIGMEFGIDKCAVMHVRRGRIVESEGVQLSDSTQLRSLSATDTYKYLGMTQALGISEADMKQSLRERFFGRLGKVLNSLLSGGNKIRACNGWVMPVLMYSFGILRWTQTELDALDRRVRSLLTAHRMHHPRSSVMRLYIPRRCGGRGLLNTKDLHNREVCNLREYFLAVNSGMHRDVVAVDSGFTPLALGKENWRKPVVLSTSDRKDVWKSKELHGRFYRALHGPDVDTLASVSWLRFGDLFGETEGFVFAIMDEVVMTNNYRRYILKDGTVDVCRACHCPGESLRHIVSGCSRLANGEYLHRHNLVARIVHQQIALKYKLVAAEVPYYRYVPDPVLENGRATLYWDRSIITDRTIIANRPDIVLIDRLERRAVIVDITIPHDGNLVKAEKDKQIKYLDLAHEIVDMWDVDSAVIVPIVISVNGLIAKSLDQHLKRLALGGWTKNQMQKAVLLDTARIVRRFLSLEP

SEQ ID NO: 27790 - protein, 1054 aa, Hypena proboscidalis
MLDEAVLERLRSDARNYTAALPLSQSVPVNSVPTSNVEETQAQLSVLDVGEDGGVLSVSTLSNEQLRSALECAVCEYRFLPIESRPRLPRLPTHRRNIALVCALDSLLPEYLENSGDLVDTHSILYCAAVATCRVAGVKFPVIEPAARPKLAKPAWQCRIEQRIARARVLIGKLITYRSGNTRPRVMRFVTQAFSGTNISPHEYISQVTERIDFFKQKVYAWANRIKRFRRRSDRYTLNRAFQRDERWVYRDWERPVSDVDGGCRPDDGVTHTFWRGIWSAPVVHTEGDWMGAVEQSCEGITQMEPLNIDKHDVACAVRSLPNWKSAGPDGLHNFWLKWLRSSHDCLASQFQLALETGSLPDFLTIGVTHLLHKSGDTADPKNYRPITCLPTVYKLLTSILRVKITSHIIDNNIFSISQNGCRKGARGTKELLICDIAINQQVRRNRRDLVTCWIDYKKAYDSVPHSWLLRVLELYKFDAALCTFLRACMGQWKTVLRYPGCRQVPREGDLVRIERGIFQGDSLSPLWFCLALNPLSTILEGSELGYRLRRDGQVISHLLYMDDLKLFASTKSQLLALLKVTETFSNSIGMEFGIDKCAVMHVRRGRIVESEGVQLSDSTQLRSLSATDTYKYLGMTQALGISEADMKQSLRERFFGRLGKVLNSLLSGGNKIRACNGWVMPVLMYSFGILRWTQTELDALDRRVRSLLTAHRMHHPRSSVMRLYIPRRCGGRGLLNTKDLHNREVCNLREYFLAVNSGMHRDVVAVDSGFTPLALGKENWRKPVVLSTSDRKDVWKSKELHGRFYRALHGPDVDTLASVSWLRFGDLFGETEGFVFAIMDEVVMTNNYRRYILKDGTVDVCRACHCPGESLRHIVSGCSRLANGEYLHRHNLVARIVHQQIALKYKLVAAEVPYYRYVPDPVLENGRATLYWDRSIITDRTIIANRPDIVLIDRLERRAVIVDITIPHDGNLVKAEKDKQIKYLDLAHEIVDMWDVDSAVIVPIVISVNGLIAKSLDQHLKRLALGGWTKNQMQKAVLLDTARIVRRFLSLEP

SEQ ID NO: 27791 - protein, 868 aa, Spilarctia lutea
MRFVKQAFLGTTISPQQYMSSVTERIDFLKQKVCAWANRIRRYKKRGDRFNQNRMFQTNEKWVYRKWEAPNPCDRDGHLPDENATNTFWRNIWSVPVTHTDGDWMRDVKRSCESITNMEPVRINKEDVSCAVRSLPNWKAPGPDGLHNFWLKWFRSSHACLASQFQAALDSGSLPQFLTTGITHLLYKSGGTMDPKNFRPITCLPTLYKLLSSILRIKITTHINHNSILSISQNGCRSGTRGTKELLIIDMTISQQVRRNRRNLATCWIDYKKAYDSVPHTWLLKVLELYKIDKTLCTFLKSCMGQWRTVLRYPGCRQSPMTDVLIKIERGIFQGDSLSPLWFCLALNPLSTLLEGSELGYGLRKDDRVISHLLYMDDLKLLAPTKLQLTALLKITENFSNSIKMEFGVDKCAVMYVKKGLIVESEGVELSDSTKLRSLSVTEGYKYLGFTQSLGIPESDMKQALRERFFGRLKKVLKSLLSGGNKVRAYNGWVMPVLMYSFGILRWTQTELDALDRGVRTLLTAFRMHHPRSSVMRLYIPRKLGGRGLLNIKTLHNREIYNLREYFLHIDVGMHRSVVAVDTGLTPLALAKENWRKPVVLSTDDRREVWKGKELHGRFYRALHGPDIDFKTSTSWLRYGDLFGETEGFVCAIMDEVIMTNNYRKYILKDGTVDICRACHRPGESIRHIISGCSRLANGEYLHRHNQVARIVHQQLALKYNLVISEVPYYRYVPDPVLENGRATLYWDRSIITDRTIVANKPDIVVIDRLERRAIIIDIAVPHDENLVKVEKEKQIKYLDLSHEIVDMWNVDSVIIVPIVVSVHGLIARSLDQHLKRLTLDGWIKGLIQKAVLLDTARIVRRFLSLEP

SEQ ID NO: 27792 - protein, 1204 aa, Hypena proboscidalis
MLTRARAKAARSSPPDPSLSSTLQSSEPATAIPVIAEASSSSSSDEYFSPPTTPTPVRRAGRGRPPSCLGPRGPPASNRAPAVGGDVRRMKWTKEMNEHVMRAYYVATEGGINLSAYRDRILPVFQVLEPTVDVSAQRLSDQVRAIQRCRMLDEAVLERLRSDARNYTAALPLSQSVPVNSVPTSNVEETQAQLSVLDVGEDGGVLSVSTLSNEQLRSALECAVCEYRFLPIESRPRLPRLPTHRRNIALVCALDSLLPEYLENSGDLVDTHSILYCAAVATCRVAGVKFPVIEPAARPKLAKPAWQCRIEQRIARARVLIGKLITYRSGNTRPRVMRFVTQAFSGTNISPHEYISQVTERIDFFKQKVYAWANRIKRFRRRSDRYTLNRAFQRDERWVYRDWERPVSDVDGGCRPDDGVTHTFWRGIWSAPVVHTEGDWMGAVEQSCEGITQMEPLNIDKHDVACAVRSLPNWKSAGPDGLHNFWLKWLRSSHDCLASQFQLALETGSLPDFLTIGVTHLLHKSGDTADPKNYRPITCLPTVYKLLTSILRVKITSHIIDNNIFSISQNGCRKGARGTKELLICDIAINQQVRRNRRDLVTCWIDYKKAYDSVPHSWLLRVLELYKFDAALCTFLRACMGQWKTVLRYPGCRQVPREGDLVRIERGIFQGDSLSPLWFCLALNPLSTILEGSELGYRLRRDGQVISHLLYMDDLKLFASTKSQLLALLKVTETFSNSIGMEFGIDKCAVMHVRRGRIVESEGVQLSDSTQLRSLSATDTYKYLGMTQALGISEADMKQSLRERFFGRLGKVLNSLLSGGNKIRACNGWVMPVLMYSFGILRWTQTELDALDRRVRSLLTAHRMHHPRSSVMRLYIPRRCGGRGLLNTKDLHNREVCNLREYFLAVNSGMHRDVVAVDSGFTPLALGKENWRKPVVLSTSDRKDVWKSKELHGRFYRALHGPDVDTLASVSWLRFGDLFGETEGFVFAIMDEVVMTNNYRRYILKDGTVDVCRACHCPGESLRHIVSGCSRLANGEYLHRHNLVARIVHQQIALKYKLVAAEVPYYRYVPDPVLENGRATLYWDRSIITDRTIIANRPDIVLIDRLERRAVIVDITIPHDGNLVKAEKDKQIKYLDLAHEIVDMWDVDSAVIVPIVISVNGLIAKSLDQHLKRLALGGWTKNQMQKAVLLDTARIVRRFLSLEP

SEQ ID NO: 27793 - protein, 1104 aa, Phalera bucephala
MRWTPELNLSVMQAYYGATEGGTILTAYRPKLLSLFQGLHPTVAVTAQRLSDQVRAIQRCKLLDDTVLERLRREALPARTDSNVRSVEEPISLNNFARSEEVNSEQVSVSDQLQEQVRRALEDAFAEYRSAPISLRPCLPRLPMHRRNISLVSALDNVLKPHWETSVDLCDTHSILYCGAVAVCRVAGVRFPNLHRATQPTNTKPFWQCRIERRINMARTLIAKLLCFQAGNNRPRVMRFVAQAFAGTGVAPVDYVAGVAERIDYWKQKVYAWAKRIRRYKARADRYHVNRTFQANQRSVYQAWERPQERVTDVHLPNAAVMAEFWRKIWSVPVSHSEGEWFDVVGRSCGPIQEMEPVVISREDLAYAVRAAPNWKNPGPDGLHAFWLKRLQGSHSRLATQFQEALQLGSLPSFMTSGVTHLIYKSGSTSEPKNYRPITCLPTVYKLLTSILRIKINNHLKAQHILSPTQNGCKGGSRGTKDLLLIDMAICQQVRRSRKNVSMAWIDYKKAYDSVPHAWLGSVLELYRVHPALCSFLGSCMGQWTTVLRHPGCGGLSGSSDLIKISRGIFQGDSLSPLWFCLALNPLSAILKDSKLGYHLRRESEPISHLLYMDDLKLYASKKTDLMELLKITGNFSNDIGMEFGVDKCAVIHVQRGRVEDSFNLQLSEDISLRSLSEMDSYKYLGMSQALSIAEQDMKQSLNRFFARLIKVLKSLLSGGNKVRAFNGWVMPVLTYSFGILRWTQSELDALDRKVRRLLTAYRMHHPRSSVMRLYIPRKCGGRGFLNAKTLHNREVCNLRQYFLSVSVVMYRDVAAIDRGLTPLSLANENWRRPQVLSISDRTAIWKGKELHGRFYRALTGPDVDQLASVNWLRFSNLFGETEGFVFAIMDEVIMTNNYRKHILKDGTVDICRACHRPGESIRHVVSGCSRLANGEYLHRHNQVARIIHQQLALKYGLVDFEVLYYQYQPLPVLESGHITLYWDRSIITDRTIVANKPDIVIIDRSMRRVILVDVTIPHDENLVKAEKEKLSKYLDLAHEVTAMRNVDSTIIIPMVVSVNGLIAKSFDKHLEKLSLGSWVRGLIQKAVMLDTARIVRRFLSLEP

SEQ ID NO: 27794 - protein, 1195 aa, Bembecia ichneumoniformis
MLTRARTKTNARQTTPDSSLSSASQPPIPTSVIAETSSSSTSEEFFSPPLSPTPARRRGRGRPPTSLGPRGPPASNRVPAAGGNVHRIRWTTSMNENVMRAYLVATKGGVNLTAYRVRMLPLFQELEPAVNVSAQRLSDQVRAIQRCHLLEDTVLERLRSEVLSNPGIPTSSLRNTQPTIEPVLQSDRDYEDVMDTGSTNVSNHYNEQLRSVLECTVREYRFVPCVDRPRLPRLPTHKKNIALVGALDAMLSDYFDNSADLSDTHSILYCAAVAACRVANVKFPDYDIASRPQSAVPAWQCRIERRIAETRALIGKLTCFRLGNTRPRVMRFVTRAFSETGISPRDFLSRVTERIDYLKQKVYAWANRIRRYKKRVDRYSQNRTFQRDQRWVYRCWERPDLNTIDVHRPDDNATTTFWSSIWSLPVGHTEGDWMCDVRRSCEPIKKMEPVCISSLDVTNAVRLLPNWKSAGPDGLHNFWLKWFKSSHGCLASQFQSCLESGSLPDFITTGVTHLLYKSGSAMDPKNYRPITCLPTIYKLLTSILRRKISSHLTDNSIMSISQNGCRSGARGTKELLIIDMALCQQARRNRKDLATCWIDYKKAYDSVPHTWLLRVLELYKIDTTLCTFMKACMGQWKTVLRYPGCRQVCGRHIKIERGIFQGDSLSPLWFCLALNPLSTILESSGLGCRLRKDGQVISHLLYMDDLKLFAPNNLQLTELIKVTETFSNSIRMEFGVDKCAVMYVKKGRVVESEGVELSDSTQFRSLSSTETYKYLGMSQALGISEASMKQSLQERFIGRLKKVLNSLLSGGNKVRACNGWVMPILMYSFGILRWTQTELDALDRKVRTLLTAYRMHHPRSSVMRLYIPRKCGGRGFLNAKTLHNREVCNLRDYFLHSDADVHRDVVTIDHGLTPLALAKENWRRPVVLSINDRRNVWKSKELHGRFYRALHGPDVDILSSVSWLRFGDLFGETEGFVCAIMDEVVMTNNYRRYILRDGTVDICRACHRPGESLRHIISGCSRLANGEYLHRHNQVARIIHQQLALKYNLVESEVPYYRYVPDSVLDNGHITLYWDRSIITDRTIVANKPDIVIIDRVERRAMIVDITVPHDENLVKAEKDKQVKYLDLAHEMVDMWDIDSTVIVPIVVSVHGLIAKSLDQHLKKLALDSWIKGLMQKAVLLDTARIVRRFLSLEP

SEQ ID NO: 27795 - protein, 1207 aa, Blastobasis lacticolella
MITRSKRKNQTVNAQPPPTPAPVSSSPSSSNDEFTTASDTSESSDERGLSAAPPPPPARRGRPLPARLGPTGRPAPPMAPATGSVVRRMRWTQSINENVMRAYYGATEGGTNLSAYRDRMLPLFQVLEPAIDVTAQRLSDQVRAIQRLKRLDDSVLDRLRLESLPVRAVPISTMSLPATSPPQVSPPSPAPRVPRTDATVGVEDCTNVSSVSTETNEYVRRTLEETIARYRFAPNSRPRLPRLPTNRRNLALMGAINVLLDPYIRASDNLVDTHSIMYCGAITACRVARVKFPDADRAPRVAGGAPAWQKRIERRINTFRTLIAKLICFKEGNNRPRVMRFVDQAFAGTGISSRDYMACATERIDFLKQKVCAWANRIRRYRERVDRFRLNRLFQSDQRKVYRKWEGTNQSGSDGSLPDASASNNFWRSIWSVPVEHSEGDWMNVVKRECEIIEPMAAVSICPEDVSCAIDTAQNWKCPGPDGLHNFWIKWFRCSHERLATLFQEALEHGSLPTLFTTGITFLLYKSGSTTEAKNYRPITCLPTLYKLLTSILRKKINNHIIENNILAMSQNGCRVGSRGTKELLLIDMTICQQVRRSRGSLSAAWIDYKKAYDSVPHSWLRRVLELYKINATLRSFLDACMRQWITVLSQPVGGIDHFPPQDFIRIERGIFQGDSLSPLWFCLALNPLSTLLKHSELGCRLRREGEVISHLLYMDDLKLFAPKRQDLMELLKITEIFSNAIRMEFGADKCAVMHVQRGKVANTTNLQLSETMSFRSLSEAETYKYLGMSQSLGIVDEGVKQAVKERFFCRLTKVLNSLLSGGNKVRSFNAWVMPLVTYSFGILRWTQTELDALDRRVRLLLTTHRMLHPRSSVMRLYIPRKCGGRGFLSAKTLHNREVCSLRDYFLNNECGMHRAVVAVDRGLTPLSLANENWRKPKVLSTIDRKDVWKSKELHGRFYRALTGPDVDLLASVNWLRFGDLFGETEGFVCAIADEVIMTNNYRRYILKDGTVDICRACRCPGESLRHITSGCGRLANGEYLHRHNQVARIIHQQLALQYGLVESEVPYYKYVPAPVLENGLATLYWDRSVITDRTIVANRPDIVLTDRSKRRAVLVDVTIPHDGNLVKAEKDKQCKYLDLAHEVTAMWDVDSTIIVPIVVSVNGLIAKSLDQHLKSLSLDGWVKGQIQKAVLLETARIVRRFLSLQP

SEQ ID NO: 27796 - protein, 1176 aa, Blastobasis lacticolella
MNLPPRPIPASRATSAGCLLRRRHHLRDVEDHCRHALGPTGRPAPPMAPATGSVVRRMRWTQSINENVMRAYYGATEGGTNLSAYRDRMLPLFQVLEPAIDVTAQRLSDQVRAIQRLKRLDDSVLDRLRLESLPVRAVPISTMSLPATSLPQVSPPSPAPRVPRTDSTVGVEDCTNVSSVSTETNEYVRRTLEETIARYRFAPNSRPRLPRLPTNRRNLALMGAINVLLDSYIRASDNLVDTHSIMYCGAITACRVARVKFSDADRAPRVAGGAPAWQKRIERRINTFRTLIAKLICFKEGNNRPRVMRFVDQAFAGTGISSRDYMACATERIDFLKQKVCAWANRIRRYRERVDRFRLNRLFQSDQRKVYRKWEGTNQSGFDGSLPDASASNNFWRSIWSVPVEHSEGDWMNVVKRECEIIEPMAEVSICPEDVSCAIDTAQNWKCPGPDGLHNFWIKWFRCSHERLATQFQEALEHGSLPTLFTTGITFLLYKSGSTTEAKNYRPITCLPTLYKLLTSILRKKINNHIIENNILAMSQNGCRVGSRGTKELLLIDMTICQQVRRSRGSLSAAWIDYKKAYDSVPHSWLRRVLELYKINATLRSFLDACMRQWITVLSQPVGGIDHSPPQDFIRIERGIFQGDSLSPLWFCLALNPLSTLLKHSELGCRLRREGEVISHLLYMDDLKLFAPKRQDLMELLKITEIFSNAIRMEFGADKCAVMHVQRGKVANTTNLQLSETMSFRSLSEAETYKYLGMSQSLGIVDEGVKQAVKERFFCRLTKVLNSLLSGGNKVRSFNAWVMPLLTYSFGILRWTQTELDALDRRVRLLLTTHRMLHPRSSVMRLYIPRKCGGRGFLSAKTLHNREVCSLRDYFINNECGMHRAVVAVDRGLTPLSLANENWRKPKVLSTIDRKDVWKSKELHGRFYRALTGPDVDLLASVNWLRFGDLFGETEGFVCAIADEVIMTTNYRRYILKDGTVDICRACRCPGESLRHITSGCGRLANGEYLHRHNLVARIIHQQLALQYGLVESEVPYYKYVPAPVLENGLATLYWDRSVITDRTIVANRPDIVLTDRSKRGAVLVDVTIPHDGNLVKAEKDKQCKYLDLAHEVTAMWDVDSTIIVPIVVSVNGLIAKSLDQHLKSLSLDGWVKGQIQKAVLLETARIVRRFLSLQP

SEQ ID NO: 27797 - protein, 1195 aa, Bembecia ichneumoniformis
MLTRARTKTNARQTTPDSSLSSASQPPVPTPVIAETSSSSTSEEFFSPPLSPTPARRRGRGRPPTSLGPRGPPASNRVPAAGGNVHRIRWTTSMNENVMRAYLVATKGGVNLTAYRVRMLPLFQELEPAVNVSAQRLSDQVRAIQRCHLLEDTVLERLRSEVLSNPGIPTSSLRNTQPTIEPVLQSDRDYEDVMDTGSTNVSNHYNEQLRSVLECTVREYRFVPCVDRPRLPRLPTHKKNIALVGALDAMLSDYFDNSADLSDTHSILYCAAVAACRVANVKFPDYDIASRPQSAVPAWQCRIERRIAETRALIGKLTCFRLGNTRPRVMRFVTRAFSETGISPRDFLSRVTERIDYLKQKVYAWANRIRRYKKRVDRYSQNRAFQRDQRWVYRCWERPDLNTIDVHRPDDNATTTFWSSIWSLPVGHTEGDWMCDVRRLCEPIKKMEPVCISSLDVTNAVRLLPNWKSAGPDGLHNFWLKWFKSSHGCLASQFQSCLESGSLPDFITTGVTHLLYKSGSAMDPKNYRPITCLPTIYKLLTSILRRKISSHLTDNSIMSISQNGCRSGARGTKELLIIDMALCQQARRNRKDLATCWIDYKKAYDSVPHTWLLRVLELYKIDTTLCTFMKACMGQWKTVLRYPGCRQVCGGHIKIERGIFQGDSLSPLWFCLALNPLSTILESSGLGCRLRKDGQVISHLLYMDDLKLFAPNNLQLTELIKVTETFSNSIRMEFGVDKCAVMYVKKGRVVESEGVELSDSTQFRSLSSTETYKYLGMSQALGISEASMKQSLQERFIGRLKKVLNSLLSGGNKVRACNGWVMPILMYSFGILRWTQTELDALDRKVRTLLTAYRMHHPRSSVMRLYIPRKCGGRGFLNAKTLHNREVCNLRDYFLHSDADVHRDVVTIDHGLTPLALAKENWRRPVVLSINDRRNVWKSKELHGRFYRALHGPDVDILSSVSWLRFGDLFGETEGFVCAIMDEVVMTNNYRKYILRDGTVDICRACHRPGESLRHIISGCSRLANGEYLHRHNQVARIIHQQLALKYNLVESEVPYYRYVPDSVLDNGHITLYWDRSIITDRTIVANKPDIVIIDRVERRAMIVDITVPHDENLVKAEKDKQVKYLDLAHEMVDMWDIDSTVIVPIVVSVHGLIAKSLDQHLKKLALDSWIKGLMQKAVLLDTARIVRRFLSLEP

SEQ ID NO: 27798 - protein, 955 aa, Blastobasis lacticolella
MGAINVLLDPYIRASDNLVDTHAIMYCGAITACRVARVKFPDADRAPRVAGGAPAWQKRIERRVNTFRTLIAKLICFKEGNNRPRVLRFVDQAFAGTGISSRDYMACATERIDFLKQKVCAWANRIRRYRERMDRFRLNRLFQSDQRKVYRKWEGTNQSGSDGSLPDASASNNFWRSIWSVPVEHSEGDWMNVVKRECEIIEPMAAVSICPEDVSCAIDTAQNWKCPGPDGLHNFFIKWFRCSHERLATQFQEALEHGSLPTLFTTGITFLLYKSGSTTEAKNYRPITCLPTLYKLLTSILRKKINNHIIENNILAMSQNGCRVGSRGTKELLLIDMTICQQVRWSRGSLSAAWIDYKKAYDSVPHSWLRRVLELYKINATLRSFLDACMRQWITVLSQPVGGDDHSPPQDFIRIERGIFQGDSLSPLWFCLALNPLSTLLKHSELGCRLRREGEVISHLMYMDDLKLFAPKRQDLMELLKITEFFSNAVRMEFGVDKCAVMHVQRGKVANTTNLELSETMSFRSLSEAETYKYFSMSQSLGIVDEGVKQAVKERFFCRLTKVLNSLLSGGNKVRSFNAWVMPLLTYSFGILRWTQTELDALDRRVRLLLTTHRMLHPRSSVMRLYIPRKCGGRGFLSAKTLHNREVCSLRDYFLNNECGMHRAVVAVDKGFTPLSLANENWRKPKVISTIDRRDVWKSKELHGRFYRALTGPDVDLLASVNWLRFGDLFGETEGFVCAIADEVIMTNNYRRYILKDGTVDICRACRCPGESLRHITSGCGRLANDDYLHRHNLVARIIHQQLALQYGLVESEVPYCKYVPAPVLENGLATLYWDRSVITDRTIVANRPDIVLTDRSKRRAVLVDVTIPHDGNLVKAEKDKQCKYLDLAHEVTAMWDVDSTIIVPIVVSVNGLIAKSLDQHLKSLSLDGWVKGQIQKAVLLETARIVRRFLSLQP

SEQ ID NO: 27799 - protein, 1082 aa, Blastobasis lacticolella
MLPLFQVLEPAIDVIAQRLSDQVRAIQRLKRLDVFVLDRLRLESLPVRAVPISTMSLPATSPPQVSPPSPTDATVGVEDCTNVSSVSTETNEYVRRTLEETIARYRFAPNSRPRLPRLPTNGRNLALMGAINVLLNSYIRASDNLVDTHSIMYCGAITACRVARVKFSDADRAPRVAGGAPAWQKRIERRINTFRTLIAKLICFKEGNNRPRVMRFVAQAFAGTGISSRDYMACATERIDFLKQKVCAWANRIRRYRERVDRFRLNRLFQSDQRKVYRKWEGTNQSGSDGSLPDASASNNFWRSIWSVPVEHSEGDWMNVVKRECEIIEPMAAVSICSEDVSCAIDTAQNWKCPGPDGLHNFWIKWFRCSHERLATQFQEALEHGSLPTLFTTGITFLLYKSGSTTEAKNYRPITCLPTLYKLLTSILRKKINNHIIENNILAMSQNGCRVGSRGTKELLLIDMTICQQVRRSRGSLSAAWIDYKKAYDSVPHSWLRRVLELYKINATLRSFLDACMRQWITVLSQPVGGIDHSPPQDFIRIERGIFQGDSLSPLWFCLALNSLSTLLKHSELGCRLRREGEVISHLLYMDDLKLFAPKRQDLMELLKITEIFSNAIRMKFGADKCAVMHVQRGKVANTTNLQLSETMSFRSISVAETYKYLGMSQSLGIVDEGVKQAVKERFFCRLTKVLNSLLSGGNKVRSFNAWVMPLLTYSFGILRWTQTELDALDRRVRLMLTTHRMLHPRSSVMRLYIQRKCGGRGFLSAKTLHNREVCSLRDYFLNNECGMHRAVVAVDRGLTPLSLANKNWRKPKIISAIDRKDVWKSKELHGRFYRALTGPDVDLLASVNWLRFGDLFGETEGFVCAIADEVIMTNNYRRYILKDGTVDLCRACRCHGESLRHITSGCGRLANGEYLHIHNLVARIIHQQLALQYGLVESEVPYYKYVPAPVLENGLATLYWDRSVITDRTIVAKRPDIVLTDRSKRRAVLVDVTIPHDGNLVKAEKDKQCKYLDLAHEVTAMWDVDSTIIVPIVVSVNGLIAKSLDQHLKSLSLDGWVKGQIQKAVLLETARIVRRFLSLQP

SEQ ID NO: 27800 - protein, 1195 aa, Bembecia ichneumoniformis
MLTRARTKTNARQTTPDSSLSSASQPPIPTPVIAETSSSSTSEEFFSPPLSPTPARRRGRGRPPTSLGPRGPPASNRVPAAGGNVHRIRWTTSMNENVMRAYLVATKGGVNLTAYRVRMLPLFQELEPAVNVSAQRLSDQVRAIQRCHLLEDTVLERLRSEVLSNPGIPTSSLRNTQPTIEPVLQSDRDYEDVMDTGSTNVSNHYNEQLRSVLECTVREYRFVPCVDRPRLPRLPTHKKNIALVGALDAMLSDYFDNSADLSDTHSILYCAAVAACRVANVKFPDYDIASRPQSAVPAWQCRIERRIAETRALIGKLTCFRLGNTRPRVMRFVTRAFSETGISPRDFLSRVTERIDYLKQKVYAWANRIRRYKKRVDRYSQNRAFQRDQRWVYRCWERPDLNTIDVHRPDDNATTTFWSSIWSLPVGHTEGDWMCDVRRSCEPIKKMEPVCISSLDVTNAVRLLPNWKSAGPDGLHNFWLKWFKSSHGCLASQFQSCLESGSLPDFITTGVTHLLYKSGSAMDPKNYRPITCLPTIYKLLTSILRRKISSHLTDNSIMSISQNGCRSGARGTKELLIIDMALCQQARRNRKDLATCWIDYKKAYDSVPHTWLLRVLELYKIDTTLCTFMKACMGQWKTVLRYPGCRQVCGGHIKIERGIFQGDSLSPLWFCLALNPLSTILESSGLGCRLRKDGQVISHLLYMDDLKLFAPNNLQLTELIKVTETFSNSIRMEFGVDKCAVMYVKKGRVVESEGVELSDSTQFRSLSSTETYKYLGMSQALGISEASMKQSLQERFIGRLKKVLNSLLSGGNKVRACNGWVMPILMYSFGILRWTQTELDALDRKVRTLLTAYRMHHPRSSVMRLYIPWKCGGRGFLNAKTLHNREVCNLRDYFLHSDADVHRDVVTIDHGLTPLALAKENWRRPVVLSINDRRNVWKSKELHGRFYRALHGPDVDILSSVSWLRFGDLFGETEGFVCAIMDEVVMTNNYRRYILRDGTVDICRACHRPGESLRHIISGCSRLANGEYLHRHNQVARIIHQQLALKYNLVESEVPYYRYVPDSVLDNGHITLYWDRSIITDRTIVANKPDIVIIDRVERRAMIVDITVPHDENLVKAEKDKQVKYLDLAHEMVDMWDIDSTVIVPIVVSVHGLIAKSLDQHLKKLALDGWIKGLMQKAVLLDTARIVRRFLSLEP

SEQ ID NO: 27801 - protein, 862 aa, Clostera curtula
MRYVIQAFAGTGVRQCDYTACIAERIDYFKQKVYAWAKRIRRYRERADRFNQNRLFQNDQKIIYRNWERRQPPLADVMTPDADTMLAFWRNIWSRPVDHLEGQWIGVVGRACKHITQMEPVHIELDDVTSAIRSAPNWKSPGPDGLHNFWIKKVCSCHARLATLFQEALEAGSLPDFMTTGVTHLIHKSGRISEPKNYRPITCLPTIYKLLTSIIKFKIVKHILANQNGCNAGSRGTKDLLLIDMAICQQVRRSKKNISMAWIDYKKAYDSVPHSWLMRVLDLYKVDANLCFFLRSCMGQWSTVLYHPGHRHFSEPSERIWIKRGIFQGDSLSPLWFCLALNPLSILLNDSMPGYRLHRGGKTVSHLLYMDDLKLYAPKQSDLMALLQVTETFSSAISMEFGVDKCAVINVQKGRVVNSENLQLSENVVLRSLCESDTYKYLGMSEALGIADSDVKQQLKTRFLGRLTKVLKSLLSGGNKVRAFNCWVIPVIAYSFGILRWTQSELDALDRTVRRQLTAFRMHHPRSSVMRLYIPRRCGGRGFLNVKSLHNREVCNLRDYFLRVDDEMHRDVVGVDSGLTALSMAKQNWRRPQVLSISERKAIWKGKELHGRFYSALTGPEIDQLASVSWLRFGNLFGETEGFVFAIMDEVVKTNNYRKYIIKDGTVDICRACHCPGESIRHVVSGCSRLANGEYLHRHNQVAGIIHQQLALRYGIVESEVPYYQYKPEPVLSNNHVTLYWDRSIVTDRTIMANKPDIVVIDRSTRRAMLIDITIPHDINLVKAEHEKISKYLDLSHEVSAMWNMDSTIIVPIVISVHGLMAKSFDQHLQKLSLGSWVKSLIQKAVLLETARIVRRFLTLDP

SEQ ID NO: 27802 - protein, 1203 aa, Clostera curtula
MERRINPRRQCREPYEANARITSAAVSSNRVQSSDEEYFTPPGTASSSEDEPTPSPSLNRRPARRGRPPLPASLGSTGHRALPKAPATGGVVRRMRWTNNLNESVMRAYYGATDGGTNLTAYRSRLLALFQELHPDVTVTAQRLSDQVRAIQRLNLLEQPVLERLRLETLPPQPVSSVQVTTPTAACLLPPTSVEQLDLGQIEEVSLNDQYQEQLRRILEETIEEYRLIPMTSRPRIPRLPMHKRNMALVSALDSLLMDKLNSVGDLTELHFILYCGAVAVCRVAGVTFPKNSTASRHPECKPAWQYRIEKRITAARTLIAKLYCFMTGNTRPRVMRYVIQAFAGTGVRQCDYAACVTERIDYFKQKVYAWAKRIRRYRERADRFNQNRLFQNDQKIIYRNWERPQPPTADLSTPDADTMLAFWRNIWSRPVDHLEGQWIGVVGRACEQITQMEPVHIELDDVISAIRSAPNWKSPGPDGLHNFWIKKVCSCHARLATLFQAALEAGSLPDFMTTGVTHLIHKSGRISEPTNYRPITCLPTIYKLLTSIIKFKIVNHILANNILASNQNGCNAGSRGTKDLLLIDMAICQQVRRSKKNISMAWIDYKKAYDSVPHSWLMRVLDLYKVDANLCLFLSSCMRQWSTVLYHPGHRHFFEASERIWIKRGIFQGDSLSPLWFCLALNPLSILLNDSMPGYRLHRGGKTISHLLYMDDLKLYAPKQSDLMALLKVTETFSSAISMEFGVDKCAVINVQKGRVVNSENLQLSENVILRSLCESDTYKYLGMSEALGIADSDVKQQLKTRFLGRLTKVLKSLLSGGNKVRAFNCWVIPVIAYSFGILRWTQSELDALDRMVRRQLTAFRMHHPRSSVMRLYIPRRCGGRGFLNVKSLHNREVCNLRDYFLRVDDEMHRDVVKVDSGLTALSMAKQNWRRPQVLSISERKAIWKGKELHGRFYSALTGPEIDQLASVSWLRFGNLFGETEGFVFAIMDEVVKTNNYRKYIIKDGTVDICRACHCPGESIRHVVSGCSRLANGEYLHRHNQVAGIIHQQLALRYGIVESEVPYYQYKPEPVLSNNHVTLYWDRSIVTDRTIMANKPDIVVIDRSTRRAMLIDITIPHDVNLVKAEHEKISKYLDLSHEVGAMWNMDSTIIVPIVISVHGLMAKSFDQHLQKLSLGSWVKNLIQKAVLLDTARIVRRFLTLDP

SEQ ID NO: 27803 - protein, 1207 aa, Phalera bucephala
MARNNNNNNNPVRLCRQRDARSPSARPTPLPGSPTSPQPSEDEDFFTPPTSGASSDDAGISASQPTITSARRGRPPLPARLGPAGHCAPPTAPATGGVVRRMRWTPELNLSVMRAYYGATEGGTILTAYRPKLLSLFQGLHPTVAVTAQRLSDQVRAIQRCKLLDDTVLERLHREALPARTESNVRSVEDPISLNNFARSEEVNSEQVSVSDQLQEQVRRALEDAFAEYRSAPISLRPCLPRLPMHRRNISLVSALDNVLKSHWETSVDLCDTHSILYCGAVAVCRVAGVRFPNLHRATQPTNAKPLWQCRIERRINMARTLIAKLLCFQAGNNRPRVVRFVTQAFAGTRVAPVDYVAGVAERIDYWKQKVYAWAKRIRRYKARADRYHVNRTFQTNQRSVYQAWERPQERVTNVHLPNAAVMAEFWRKIWSVPVTHSEGEWFDVVGRSCGPIQEMEPVVISREDLACAVRAAPNWKSPGPDGLHAFWLKRLQGSHSRLATQFQEALQLGSLPSFMTSGVTHLIHKSGSTSEPKNYRPITCLPTVYKLLTSILRIKINNHLKAQHILSPTQNGCKGGSRGTKDLLLIDIAICQQVRRSRKNVSMAWIDYKKAYDSVPHTWLGRVLELYRVHPALCSFLGSCMRQWTTVLRHPGCGGLSGSSDLIKISRGIFQGDSLSPLWFCLALNPLSAILKDSKLGYHLRRESEPISHLLYMDDLKLYASKKTDLMELLKITGNFSNDIGMEFGVDKCAVIHVQRGRVEDSFNLQLSEDISLRSLSEMDSYKYLGMSQALSIAEQDMKQSLRDRFFARLIKVLKSLLSGGNRVRAFNGWVMPVLTYSFGILRWTQSELDALDRKVRRLLTAYRMHHPRSSVMRLYIPRKCGGRGFLNAKTLHNREVCNLRQYFFNGVSVVMYRDVAAIDRGLTPLSLANGNWRRPQVLSTSDRTAIWKGKELHGRFYRALTGPDVDQLASVTWLRFSNLFGETEGFVFAIMDEVIMTNNYRKYILKDGTVDICRACHRPGESIRHVVSGCSRLANGEYLHRHNQVARIIHQQLALKYGLVDSEVPYYQYQPLPVLESGHITLYWDRSVITDRTIVANKPDIVIIDRSMRRVMLVDVTIPHDENLVKAEKEKLSKYLDLAHEVTAMWNVDSTIIIPMVVSVNGLIAKSFDKHLEKLSLGSWVKGLIQKAVMLDTARIVRRFLSLEP

SEQ ID NO: 27804 - protein, 1205 aa, Phalera bucephala
MAEPSRRNPVRLCRQRDARSPSARPTPLPGSPASPQPSEDEDFFTPPTSGASSDDAGISATPPTLTSARRGRPPLPARLGPAGHCAPPTAPATGGVVRRMRWTPELNLSVMQAYYGATEGGTILTSYRPKLLSLFQGLHPTVTVTAQRLSNQVRAIQRCKLLDDTVLEQLRREALPARTDSNVRSVEEPISLNNFARSEEVNSEQVSVSDQLQEQVRRALEDAFAEYRSAPISLRPCLPRLPMHRRNISLVSALDNVLKPHWETSVDLCDTHSILYCGAVAVCRVAGVRFPNLHRATQPTNTKPFWQCRIERHINMARTLIAKLLCFQAGNNRPRVMRFVAQAFAGTGVAPVDYVAGVAERIDYWKQKVYAWAKRIRRYKARADRYHVNRTFQTNQRSVYQAWKRPQERVTDVHLPNAAVMAEFWRKIWSVPVSHSEGEWFDVVGRSCGPIQEMEPVVISREDLACAVRAAPNWKSPGPDGLHAFWLKRLQGSHSRLATQFQEALQLGSLPSFMTSGVTHLIYKSGSTSEPKNYRPITCLPTVYKLLTSILRIKINNHLKAQRILSPTQNGCKGGSRGTKDLLLIDMAICQQVRRSRKNVSMAWIDYKKAYDSVPHTWLGRVLELYRVHPALCSFLGSCMGQWTTVLRHPDCGGLSGSSDVIKISRGIFQGDSLSPLWFCLALNPLSAILKDLKLGYHLRRESEPISHLLYMDDLKLYASKKTDLMELLKITGNFSNDIGMEFGVDKCAVIHVQRGRVEDSFYILQLSEDISLRSLSEMDSYKYLGMSQALSIAEQDMKQSLKDRFFARLIKVLKSLLSGGNKVRAFNGWVMPVLTYSFGILRWTQSELDALDRKVRRLLTAYRMHHPRSSVMRLYIPRKCGGRGFLNAKTLHNREVCNLRQYVLSVSVVMYRDVAAIDRGLTPLSLANENWRRPQVLSISDRTAIWKGKELHGRFYRALTGPDVDQLASVNWLRFSNLFGETEGFVFAIMDEVIMTNNYRKHILKDGTVDICRACHRPGESIRHVVSGCSRLANGEYLHRHNQVARIIHQQLALKYGLVDSEVPYYPYQPLPVLESGHITLYWDRSIITDRTIVANKPDIVIIDRSMRRVMLVDVTIPHDENLVKAEKEKLSKYLDLAHEVTAMWNVDSTIIIPMVVSVNGLIAKSFDKHLEKLSLGSWVKGLIQKAVMLDTARIVRRFLSLEP

SEQ ID NO: 27805 - protein, 1207 aa, Taractrocera maevius
MRRNPHRTCRKRIAVDNDARPTPRSASLSSTSGNEQYFTPPSTSDDSIGDNDDAGPFSPPSQCRRPATRGRQLPHRLGLSKPCASSTAPASGGVVRRMRWNFNLNESVMRAYYRATEGGTNLTAYRSKMLALFQTFNPNVTVTAQRLSDQVRAIQRCHLLNDSVLERLRHESQSLQNATQSNEMNSIPTESNNNNNNHLEVSEEINEVVCVSDQYKERLRSALENAILEYRSMSPCDRPRIPRLPAHKRNMLLVNALDHILSSYIINSVDLCDTHSLLYCGAVAVCRVAGVKFSNPDHNTRRIGTDPAWQCRIQNRINMARAFIGKLISFKAGNNRPRVMRFVNQAFVGTGIRPNEYISNVTERIDFWKQKIYAWSSRIRRYKMRLARYNQNRIFQNNQKCVYRSWERPQAQVSDIRLPDSTNSIEFWSRIWSMPITHTEGDWIDVIRRACNDISEMDPIVITPLDVRDIVCSVPNWKSPGPDRIQNFWLKWFRCSHARLAAQFQDAVELNTLPIFMTTGITYLIYKSGCTTDPKNYRPITCLPTIYKLLTSILKIKIESHIYSNKIMAPNQNGCKAGSRGTKDCLLIDMAICQQVRRNRKSISMAWIDYKKAYDSVPHTWLSRVLELYRVNSSLRTFLATCMSQWITTLHQPGNRNIFSSSDYIEIRRGIFQGDSLSPLWFCLALNPLSTLLRNTDLGYRLRREGEIISHLLYMDDLKLYASKTPQLMELLKITENFSKAIGMEFGVDKCAIINIQRGRVSNAENLQLSQDMSLISLSESESYKYLGMSEAVGINDRIMKQLLKERFLGRLKKVLKSLLSGGNRTRAFNSWVMPVLTYSFGILRWSQTELDTLDRKVRRLLTAYRLHHPRSSVMRLYISRKYGGRGFLNAKDLHNREVNNLREYFLKVNVGMYQDVVSMDKGLTPLSLATVNWRRLKVMSISDRTAVWKGKELHGRFYRALTGPDVDQVASVAWLRFSNLFGETEGFVFAIMDEVIMTNNYRKHILKDGTVDICRACHRPGESIRHIVSGCSRLANGEYLHRHNQVAKILHQQLALKYSLVDDEVPYYQYQPSSVLENDHITLYWDRSIITDRTITFNKPDIVIIDRSTRRVMLVDVTVPHDENLVKAEKEKMIKYTDLAYEITAMWGMESTNIIPIVVSVNGLIAKSFDKYLTKLSLNTWIKGLIQKAVILETARIVRRFLSLNL

SEQ ID NO: 27806 - protein, 1063 aa, Phalera bucephala
MAEPSRRNPVRLCRQRDARSPSARPTPLPGSPTSPQPSEDEDFFTPPTSGASSDDAGISASPPTLTSARRGRPPLPARLGPAGHCAPPTAPATGGVVRRMRWTPELNLSVMRAYYGATEGGTILTAYRPKLLSLFQGLHPTVAVTAQRLSDQVRAIQRCKLLDDTVLERLHREALPARTESNVRSVEDPISLNNFARSEEVSSEQLSVSDQLQEQVRRALEDAFAEYRSAPISLRPCLPRLPMHRRNISLVSALDNVLKPHWETSVDLCDTHSILYCRAVAVCRVAGVRFPNLHRATQPTNAKPLWQCRIEQRINMARTLIAKLLCFQAGNNRPRVMRFVTQAFAGTGVAPVDYVAGVAERIDYWKQKVYAWAKRIRRYKARADRYHVNRTFQTNQRSVYQAWERPQERVTDVHLPNAAVMAEFWRKIWSVPVTHSEGEWFDVVGRSCEPIQEMEPVVISREDLACAVRAAPNWKSPGPDGLHAFWLKRLQGSHSRLATQFQEALQLGSLPSFMTSGVTHLIHKSGSTSEPKNYRPITCLPTVYKLLTSILRIKINNHLKAQHILSPTQNGCKGGSRGTKDLLLIDIAICQQVRRSRKNVSMAWIDYKKAYDSVPHTWLGRVLELYRVHPELCSFLGSCMGQWTTVLRHPGCGGLSGSSDLIKISRGIFQGESLSPLWFCLALNPLSAILKESKLGYHLRRESEPISHLLYMDDLKLYASKITDLMELLKITGNFSNDIGMEFGVDKCAVIHVQRGRVEDSFNLQLSEDISLRSLSEMDSYKYLGMSQALSIAEQDMKQSLKDRFFARLIKVLKSLLSGGNKVRAFNGWVMPVLTYSFGILRWTQSELDALDRKVRRLLTAYRMHHPRSSVMRLYIPRKCGGRGFLNAKTLHNREVCNLRQYFLSVSVVMYRDVAAIDRGLTPLSLANGNWRRPQVLSTSDRTAIWKGKELHGRFYRALTGPDVDQLASVTWLRFSNLFGETEGFVFAIMDEVIMTNNYRKHILKDGTVDICRACHRPGESIRHVVSGCSRLANGEYLRRHNQVARIIHQQLALKYGLVMRTL

SEQ ID NO: 27807 - protein, 1197 aa, Papilio dardanus
MKRRNPTRQCRNVVQFAQLSPARPALGCDMAGVETLDAPPNLVSSSDAASAGPPTPTTSPITPTGSGRPPPARLESAGISSSPMAPATSGVVRRMRWESLNESVMRAYFGATEGGTNLTAYRPRMLSLFQALHPTVSVTAQRLSDQVRVIQRRHMLDDSVLERLRHEARPLHNDGEVRNDAPVTPVVADVLTEPLTEEVCVSDKDIERLRSTLEDVILKYRSLSIDDRPRLPRLPVNKRNILLVNAVDRLLTTYVDSSLDLCDTHSILYCGALTACRVAGVGILNPNPGSRRGEARPLWQCRIERRINVARRLIAKLLCFQSGNYRPKIMRFVTQAFAGTGTRPSEYMSRVMERIDFWKQKVFAWANRVRRYRERSERFLQNRMFQRDQRCVYRVWEQPQSRVIDLQRPDSAVTNAFWSSIWSVPVDHTEGVWLDAVRRACEPVTEMEPVVITGSDISAAVRSAPNWKSPGPDGLQNFWLKWFRSSHERLAAQFQSAIESGTLPGFMTLGITHLIYKSGSTTDPKNYRPITCLPTIYKLLTSVLRIKIEAHVCANKLLAPTQNGCKAGSRGTKDCLLIDMAICQQVRRSKKNISMAWIDYKKAYDSVPHGWLSKVLEVYKIHPTLRTFLNTCMGQWTTSFSNPEHRNLSASSCRIGIRRGIFQGDSLSPLWFCLALNPLSTLLKSSELGYRLRRGGEIISHLLYMDDLKLYASKKSDLTSLLKITDDFSRAIGMTFGVDKCAVINVQKGKVVTSENLQLTQDVSLVSLSENESYKYLGMSEAVGINDKDMKQLIKERFFGRLKKVLKSLLSGGNKCRAFNSWVMPVLTYSFGILRWSQTDLDALDRKVRRLLTAYRMHHPRSSVMRLYIPRKKGGRGYLNAKNLHNHEVYNLREYFLKVDVDMYRDVVAMDKGLTPLSMATTNWRRFPVLSVSDRISVWKSKELHGRFHRALTGPDVDQLSSVAWLRFSNLFGETEGFVFAIMDEVIVTNNYRKHILKDGTTDICRAYRRPGESIRHIVSGCSRLADGAYLHRHNQVAKIIHQQLALKYAFVDTEVPYYQYQPSPVLENSRITLYWDRSIITDRTIVANRPDIVIIDRSESRVMLVDVTIPHDENLVKAENEKLLKYLDLAHEVTAMWRMKSATIIPIVVSVHGLIAKSFDQHLKKLSLNGWIKGPIQKAVILETARLVRRFLSLQP

SEQ ID NO: 27808 - protein, 1233 aa, Clostera curtula
MSDSAPRRNPSRRCRLRSAYGTNCARPTSSSSSSPTSGNEYHTPPVTAASSDDAGSPVPPAAQSSARRGRPLPASLRSTEHTATSMASATGGSVRRMRWSQELNEKVMRAYYGATEGGTNLTAYRSRMFALFQDLNPGTTVTVQRLSDQVRAIQRLQLLAQPVLDRLRLETLSSRPVVRPQPNPAVSAIAVQPDPPLVAPAELVQNEEVNVNNQYDEQLRRALDDAILVYRDVPASDRPRLPRLPMNKHILALTSVLNTFLQSHFDKSENLTETHSILYCGAVAVCRVGGARFPNQNRPTTQMETIPAWQHRIELRINTARTIIAKLYTYKNGNSRPRVMRFVHQAFNGTGVRPQDYSAWITERIDFYKQKVQAWAKRIRRFKERSDRYKQNRLFQSDAKKVYRNWEQNSRQISLGVTPDPVRMYTFWQDIWAQPINHTEGEWMTIVRRSCEHITAMEQVIISQADIARALRLAPNWKSPGPDGLHNFWLKRFHSSHERLATQFHNAISSKTLPTFLTNGVTYLLYKSGSTSEPKNYRPITCLPTTYKLLTSILKFKIMDHILANNIMATAQNGCKPRSRGTKELLLIDMTICQQVRRVKKNISMAWVDYKKAYDSVPHSWLSRVLDLYRLHPNLCSFLSVCMSQWTTRLCLPDMAGFSDSTGLLRIKRGIFQGDSLSPLWFCLAMNPLSTLLMDSKIGYLLRRDGEVISHLLYMDDLKLYAPKKSDLVSLLKITENFSNDIKMEFGVDKCAAIHVQRGRVVTSEELQLSENMSFRCLSESETYRYLGMAEGLGIADKEIKQALTTCFFSRLTKVLKSLLSGGNKVRAVNGWVMPALAYSFGILRWTQTELDALDRRVRRQLTLYRMHHPRSSVMRLYIPRKCGGRGFLNVKNLHNREVCNLREYFLQSTEDVHRDMANVDNSFTPLSLAKQNWRKPQVLSISDRTTIWKSKELHGRFYKALTGPDVDQLASVAWLRFSNLFGETEGFACAIMDEVIMTNNYRRHILKDGTADICRACHRPGESIRHIVSGCSRLANGEYLHRHNQVAKIVHQQLALKYSLVDTEVPYYQYQPAPVLDNGHVTLYWDRSIITDRTILAIKPDIVIIDRSASRAMLVDVTIPHDENLVKAEKEKLTKYLDLAHEVTAMWHVDSTIIVPIVVSVNGLIAKSFDQHLKKLSLGCWIKGLIQIKSNQIKSNLFVKHAFTHRLCMQDVIDSFILDSARIVRRFLSLEP

SEQ ID NO: 27809 - protein, 1206 aa, Clostera curtula
MSQHTRRNPQRQCRLRAAYGTASARLTPQSSSSPSSEDEYHTPPVTAASSDDTGSPVPPAPRCSARRGRPLPASLMSTEQIATSMTSATGGSVRRMRWSQKLNENVMRAYYRATEGGTNPTAYRSRMFALFQDLNPGTTLTVQRLSDQVRAIQRLQLLAQPVLDRLRLETLSSRPVVRTQPDPAISAIAVQPDPPLLAPVELVQSEEVNVNNQYNEQLRRALDDAILEYRDVRPSDRPRLPRLPMTKHNLALTSILDKILPSYFNTTENLTETHSILYCGAVAVCRVGGVRFPNLNRPTPQTTTTPAWQYRIEKRINAARTIIAKLLTFRSGNNRPRVMRFVHQAFEGTGIRPQDYTASVTERMDFYKQKVQAWAKRIRRFKKRSDRYNQNRLFQSDAKKVYRNWEENSGQMSPGVTPDPAGMYSFWQDIWSEPVIHSEGEWMSVVRRACEPITAMGPINIDEADIARAVSSAPNWKSPGPDSLHNFWLKRFHSSHVRLATQFQNAIATGSLPTFLTTGVTYLLYKSGSTSEPKNYRPITCLPTTYKLLTSILKFKIMEHILANNIMAPVQNGCKPRSRGTKELLLIDMTICQQVRRVKKNISMAWIDYKKAYDSVPHSWLSRVLDLYRLHPNLCSFLSVCMSQWTTRLCLPVMAGFSDSTGLLRIKRGIFQGDSLSPLWFCLAMNPLSTLLMDSKIGYRLRRDGEVISHLLYMDDLKLYAPKKSDLVSLLKITEIFSKDIKMEFGVDKCAAIHVQRGRVVTSEELQLSENMSLRCLSESETYRYLGMAEGLGIADKEIKQSLTACFLSRLTKVLKSLLSGGNKARAVNGWVMPALAYSFGILRWTQSELDALDRKVRRQLTLYRMHHPRSSVMRLYIPRKCGGRGFLNVKNLHNREVCNLREYFLQSTEDVHRDMANVDNSFTPLSLAKQNWRRPQVLSISDRTTIWKSKELHGRFYKALTGPDVDQLASVAWLRFSNLFGETEGFACAIMDEVIMTNNYRRHILKDGTADICRACHRPGESIRHIVSGCSRLANGEYLHRHNQVAKIVHQQLALKYSLVDTEVPYYQYQPAPVLDNGHVTLYWDRSIITDRTIPANKPDIVIIDRSASRAMLVDVTIPHDENLVKAEKEKLTKYLDLAHEVTTMWHVDSTIIVPIVVSVNGLIAKSFDQHLKKLSLSFWIKGLIQKAVILDSARIVRRFLSLEP

SEQ ID NO: 27810 - protein, 1207 aa, Clostera curtula
MSEFALRRNPSRRCRLRAAYGTNSARPTSSSSSSSTSANEYHTPPVTAASSDDAGSPVPPAAQSSARRGRPLPASLRSTEHTATSMASATGGSVRRMRWSQELNENVMRAYYGATGGGTNLTAYRSRMFALFQDLNPGTTVTVQRLSDQVRAIQRLQLLAQPVLDRLRLETLSTRPVVRPQPDPAVSAIAVQPDPPLPAPAELVQNEEVNVNNQYDEQLRRALDDAILVYRDVPVSDRPRLPRLPMNKHILALTSVLNTFLQFHFDKSENLTETHSILYCGAVAVCRVGGVRFPNQNRLTRQMETIPAWQHRIELRINTARTIIAKLYAYKNGNSRPRVMRFVHQAFNGTGVRPQDYSAWITERIDFYKQKVQAWAKRIRRFKERSDRYKQNRLFQSDARKVYRNWEQNSRQISLGVTPDPVRMYTFWQDIWAQPINHTEGEWMTIVRRSCENITAMEQVIISQADIARAVRLAPNWKSPGPDGLHNFWLKRFHSSHERLATQFQNAISSKTLPTFLTNGVTYLLYKSGSTSEPKNYRPITCLPTTYKLLTSILKFKIMDHILANNIMATAQNGCKPRSRGTKELLLIDMTICQQVRRVKKNISMAWIDYKKAYDSVPHSWLSRVLDLYRLHPNLCSFLSVCMSQWTTRLCLPDMAGFSDTTDLLRIKRGIFQGDSLSPLWFCLAMNPLSTLLMDSKIGYRLRRDGEVISHLLYMDDLKLYAPKKSDLVSLLKITENFSNDIKMEFGVDKCAAIHVQRGRVVTSEELQLSENMSFRCLSESETYRYLGMAEGLGIADKEIKQSLTACFFSRLTKVLKSLLSGGNKVRAVNGWVMPALAYSFGILRWTQTELDALDRRVRRQLTLYRMHHPRSSVMRLYIPRKCGGRGFLNVKNLHNREVCNLREYFLQSTEDVHRDMANVDNSFTPLSLAKQNWRKPQVLSISDRTTIWKSKELHGRFYKALTGPDVDQLASVAWLRFSNLFGETEGFACAIMDEVIMTNNYRRHILKDGTADICRACHRPGESIRHIVSGCSRLANGEYLHRHNQVAKIVHQQLALKYSLVDTEVPYYQYQPAPVLDNGHVTLYWDRSIITDRTILANKPDIVIIDRSASRAMLVDVTIPHDENLVKAEKEKLTKYLDLAHEVTAMWHVDSTIIVPIVVSVNGLIAKSFDQHLKKLSLSCWIKGLIQKAVILDSARIVRRFLSLEP

SEQ ID NO: 27811 - protein, 1206 aa, Clostera curtula
MSQHTRRNPQRQCRLRAAYGTASARLTPQSSSSPSSEDEYHTPPVTAASSDDTGSPVPPAPRCSARRGRPLPASLMSTEQIATSMTSATGGSVRRMRWSQQLNENVMRAYYGATEGGTNLTAYRSRMLALFQDLNPGTTVTVQRLSDQVRAIQRLQLLAQPVLDRLRLETLSSHPVVRPQPDPAVPAIAEQPDPLPLALAESLQNEEVNVNNQYNEQLRRALDDAILDYRDVPPSDRPRLPRLPMTKHNSALTSILDKILPSYFSTTENLTETHSILYCGAVAVCRVGGVRFPNHNRPTPQTTTTPAWQYRIEKRINAARTIIAKLLTFRSGNNRPRVMRFVHQAFEGTGIRPQEYTASVTERMDFYKQKIQAWAKRIRRFKKRSDRYNQNRLFQSDAKKVYRNWEQNSRQMSPGVTPDPVGMYSFWQDIWSQPVIHSEGEWMSVVRRACEPITAMGPINIDEADIARAISSAPNWKSPGPDSLHNFWLKRFHSSHVRLATQFQNAIATGSLPTFLTTGVTYLLYKSGSTSEPKNYRPITCLPTTYKLLTSILKFKIMEHILANNIMAPVQNGCKPRSRGTKELLLIDMTICQQVRRVKKNISMAWIDYKKAYDSVPHSWLSRVLDLYRLHPNLCSFLSVCMSQWTTRLCLPDMAGFSDSTGLLRIKRGIFQGDSLSPLWFCLAMNPLSTLLMDSKIGYRLRRDGEVISHLLYMDDLKLYAPKKSDLVSLLKITENFSKDIKMEFGVDKCAAIHVQRGRVVTSEELQLSENMSLRCLSESETYRYLGMAEGLGIADKEIKQSLTACFLSRLTKVLKSLLSGGNKARAVNGWVMPALAYSFGILRWTQSELDALDRKVRRQLTLYRMHHPRSSVMRLYIPRKCGGRGYLNVKNLHNREVCNLREYFLQSTEDVHRDVANVDNSFTPLSLAKQNWRKPQVLSISDRTTIWKSKELHGRFYKALTGPDVDQLASVAWLRFSNLFGETEGFACAIMDEVIMTNNYRRHILKDGTADICRACHRPGESIRHIVSGCSRLANGEYLHRHNQVAKIVHQQLALKYSLVDTEVPYYQYQPAPVLDNGHVTLYWDRSIITDRTIPANKPDIVIIDRLASRAMLVDVTIPHDENLVKAEKEKLTKYLDLAHEVTAMWHVDSTIIVPIVVSVNGLIAKSFDQHLKKLSLSCWIKGLIQKAVILDSARIVRRFLSLEP

SEQ ID NO: 27812 - protein, 962 aa, Clostera curtula
MNKHILALTSVLNTFLQFHFDKSENLTETHSILYCGAVAVCRVGGVRFPNQNRLTRQMETIPAWQHRIELRINTARTIIAKLYAYKNGNSRPRVMRFVHQAFNGTGVRPQDYSAWITERIDFYKQKVQAWAKRIRRFKERSDRYKQNRLFQSDARKVYRNWEQNSRQISLGVTPDPVRMYTFWQDIWAQPINHTEGEWMTIVRRSCENITAMEQVIINQADIARAVRLAPNWKSPGPDGLHNFWLKRFHSSHERLATQFQNAISSKTLPTFLTNGVTYLLYKSGSTSEPKNYRPITCLPTTYKLLTSILKFKIMDHILANNIMATAQNGCKPRSRGTKELLLIDMTICQQVRRVKKNISMAWIDYKKAYDSVPHSWLSRVLDLYRLHPNLCSFLSVCMSQRTTRLCLPDMAGFSDSTDLLRIKRGIFQGDSLSPLWFCLAMNPLSTLLMDSKIGYRLRRDGEVISHLLYMDDLKLYAPKKSDLVSLLKITENFSNDIKMEFGVDKCAAIHVQRGRVVTSEELQLSENMSFRCLSESETYRYLGMAEGLGIADKEIKQSLTACFFSRLTKVLKSLLSGGNKVRAVNGWVMPALAYSFGILRWTQTELDALDRRVRRQLTLYRMHHPRSSVMRLYIPRKCGGRGFLNVKNLHNREVCNLREYFLQSTEDVHRDMANVDNSFTPLSLAKQNWRKPQVLSISDRTTIWKSKELHGRFYKALTGPDVDQLASVAWLRFSNLFGETEGFACAIMDEVIMTNNYRRHILKDGTADICRACHRPGESIRHIVSGCSRLANGEYLHRHNQVAKIVHQQLALKYSLVDTEVPYYQYQPAPVLDNGHVTLYWDRSIITDRTILANKPDIVIIDRSASRAMLVDVTIPHDENLVKAEKEKLTKYLDLAHEVTAMWHVDSTIIVPIVVSVNGLIAKSFDQHLKKLSLGCWIKGLIQKAVILDSARIVRRFLSLEP

SEQ ID NO: 27813 - protein, 1206 aa, Clostera curtula
MSQSTRRNPPRRCRLRAAYGTASARLTPQSSSSSSSEDEYHTPPVTAASSDDAGSPVPPTAQRSARRGRPLPASLRSTEHTATSMASATGGSVRRMRWSQELNENVMRAYYGATEGGTNLTAYRSRMFALFQDLIPGTTVTVQRLSDQVRAIQRLQLLAQPVLDRLRLETLSSRPVVRPQPDPAVSAIAIQPDPPLLAPAELVQNEEVNVNNQYDEQLRRALDDAILVYRDVPASDRPRLPRLPMNKHILALTSVLNTFLQSHFDKSENLTETHSILYCGAVAVCRVGGVRFPNQNRLTTQMETIPAWQHRIELRINTARTIIAKLYAYKNGNSRPRVMRFVHQAFNGTGVRPQDYNAWITERIDFYKQKVQAWAKRIRRFKERSNRYKQNRLFQSDAKKVYRNWEQNSRQISLGVTPDSVRMYTFWQDIWAQPINHTEGDWMTIVRRSCEHITAMEQVIISQADIARAVRLAPNWKSPGPDGLHNFWLKRFHSSHERLATQFQNAISSKTLPTFLTNGVTYLLYKSGSTSEPKNYRPITCLPTTYKLLTSILKFKIMDHILANNIMATAQNGCKPRSRGTKELLLIDMTICQQVRRVKKNVSMAWIDYKKAYDSVPHSWLSRVLDLYRLHPNLCSFLSVCMSQWTTRLCLPDMARFSDSTGLLRIKRGIFQGDSLSPLWFCLAMNPLSTLLMDSKIGYRLRRDGEVISHLLYMDDLKLYAPKKSDLVSLLKITENFSNDIKMEFGVDKCAAIHVQRGRVVTSEELQLSENMSFRCLSESETYRYLGMAEGLGIADKEIKQALTTCFFSRLTKVLKSLLSGGNKVRAVNGWVMPALAYSFGILRWTQTELDALDRRVRRQFTLYRMHHPRSSVMRLYIPRKCGGRGFLNVKTLHNREVCNLREYFLQSTEDVHRDMANVDNSFTPLSLAKLNWRKPQVLSISDRTTIWKSKELHGRFYKALTGPDVDQLASVAWLRFSNLFGETEGFACAIMDEVIMTNNYRRHILKDGTADICRACHRPGESIRHIVSGCSRLANGEYLHRHNQVAKIVHQQLALKYSLVDTEVPYYQYQPAPVLDNGHVKLYWDRSIITDRTILTNKPDIVIIDRLASRAMLVDVTIPHDENLVKAEKEKLTKYLDLAHEVTAMWHVDSTIIVPIVVSVNGLIAKSFDQHLKKLSLGCWIKGLIQKAVILDSARIVRRFLSLEP

SEQ ID NO: 27814 - protein, 1205 aa, Clostera curtula
MSAPRRNPSRRCRSRAAYGTYSARPTPSSSSSPTSGNEYHTPPVTAASSDDAGSPVPPAAQSSARRGRPLPASLRSTEHNATSMASATGGSVRRMRWSQQLNENVMRAYYGATEGGTNLTAYRSRMFTLFQDLNPGTTVTVQRLSDQVRAIQRLQLLAQPVLDRLRLETLSSHPVVRPQPDPAVPAIAEQPDPLPLALVESLQNEEVNVNNQYNEQLRRALDDAILEYRDVPPSDRPRLPRLPMTKHNLALTSILDKILPPYFSTTENLTETHSILYCGAVAVCRVGGVRFPNHNRPTPQTTTTPAWQYRIEKRINAARTIIAKLLTFRSGNNRPRVMRFVHQAFEGTGIRPQEYTASVTERMDFYKQKVQAWAKRIRRFKKRSDRYNQNRLFQSDAKKVYRNWEQNSRQMSPGVTPDPVGMYSFWQDIWSQPVIHSEGEWMSVVRRACEPITAMGPINVDEADIARAVSSAPNWKSPGPDSLHNFWLKRFHSSHVRLATQFQNAIATGSLPTFLTTGVTYLLYKSGSTSEPKNYRPITCLPTTYKLLTSILKFKIMEHILANNIMAPVQNGCKPRSRGTKELLLIDMTICQQVRRVKKNISMAWIDYKKAYDSVPHSWLSRVLDLYRLHPNLCSFLSVCMSQWTTRLCLPDMAGFSDSTGLLRIKRGIFQGDSLSPLWFCLAMNPLSTLLMDSKIGYRLRRDGEVISHLLYMDDLKLYAPKKSDLVSLLKITENFSKDIKMEFGVDKCAAIHVQRGRVVTSEELQLSENMSLRCLSESETYRYLGMAEGLGIADKEIKQSLTACFLSRLTKVLKSLLSGGNKARAVNGWVMPALAYSFGILRWTQSELDALDRKVRRQLTLYRMHHPRSSVMRLYIPRKCGGRGYLNVKNLHNREVCNLREYFLQSTEDVHRDVANVDNSFTPLSLAKQNWRKPQVLSISDRTTIWKSKELHGRFYKALTGPDVDQLASVAWLRFSNLFGETEGFACAIMDEVIMTNNYRRHILKDGTADICRACHRPGESIRHIVSGCSRLANGEYLHRHNQVAKIVHQQLALKYSLVDTEVPYYQYQPAPVLDNGHVTLYWDRSIITDRTIPANKPDIVIIDRLASRAMLVDVTIPHDENLVKAEKDKLTKYLDLAHEVTAIWHVDSTIIVPIVVSVNGLIAKSFDQHLKKLSLNCWIKGLIQKAVILDSARIVRRFLSLEP

SEQ ID NO: 27815 - protein, 1048 aa, Clostera curtula
MRMSCERIMGRQRGEPTSLPTVPECLPCFRTLTQERQLLYNGCRTKCVLSSGFSCSHSPYWRALDDAILVYRDVPVSDRPRLPRLPMNKHILALTSVLNTFLQFHFDKSENLTETHSILYCGAVAVCRVGGVRFPNQNRLTTQMETIPAWQHRIELRINTARTIIAKLYAYKNGNSRPRVMRFVHQAFNGTGVRPQDYNAWITERIDFYKQKVQAWAKRIRRFKERSDRYKQNRLFQSDAKKVYRNWEQNSRQISLGVTPDPVRMYTFWQDIWAQPINHTEGEWMTLVRRSCENITAMEQVIISQADIARAVRLAPNWKSPGPDGLHNFWLKRFHSSHERLATQFQNAISSKSLPTFLTNGVTYLLYKSGSTSEPKNYRPITCLPTTYKLLTSILKFKIMDHILANNIMATAQNGCKPRSRGTKELLLIDMTICQQVRRVKKNISMAWIDYKKAYDSVPHSWLSRVLDLYRLHPNLCSFLSVCMSQWTTRLCLPDMAGFSDSTDLLRIKRGIFQGDSLSPLWFCLAMNPLSTLLMDSKIGYRLRRDGEVISHLLYMDDLKLYAPKKSDLVSLLKITENFSNDIKMEFGVDKCAAIHVQRGRVVTSEELQLSENMSFRCLSESETYRYLGMAEGLGIADKEIKQSLTACFFSRLTKVLKSLLSGGNKVRAVNGWVMPALAYSFGILRWTQTELDALDRRVRRQLTLYRMHHPRSSVMRLYIPRKCGGRGFLNVKNLHNREVCNLREYFLQSTEDVHRDMANVDNSFTPLSLAKQNWRKPQVLSISDRTTIWKSKELHGRFYKALTGPDVDQLASVAWLRFSNLFGETEGFACAIMDEVIMTNNYRRHILKDGTADICRACHRPGESIRHIVSGCSRLANGEYLHRHNQVAKIVHQQLALKYSLVDTEVPYYQYQPAPVLDNGHVTLYWDRSIITDRTILANKPDIVIIDRLASRAMLIDVTIPHDENLVKAEKEKLTKYLDLAHEVTAMWHVDSTIIVPIVVSVNGLIAKSFDQHLKKLSLGCWIKGLIQKAVILDSARIVRRFLSLEP

SEQ ID NO: 27816 - protein, 1209 aa, Clostera curtula
MMLPTRRNPLRQCRQHVAIGTSSARPTQGTSSSSLSSSSEEAYFTPNSEGSSDVVTSPPEPSPLRRSTRRRPPPLPASLGSSDTSVPSMTPATGGVVRRMRWTLQLNESVMRAYYGATLGGTVLTAYRSRMLSLFQELNPTTTITAQRLSDQIRAIQRLNLLEQPVLDGLRLESLSALPAVNQRSVMSQAVTASVGSITQEPAESTHIDEVSVTNQFSEKLKSALEEAILEFRDIPISARPRLPRLPTHTQNIVLVGVLNNILKSYIHTCSTLSETHSLLYCGAIAACRVGGARFLNFHSSNRRTNTIPLWQCRIQKKIDSARTTIAKLYAFRMGNSRPRIMRYVVQAFAGTGISRHDYQAWITERIDFFKQKMYAWAKRIRRYKERSDRFTQNRLFQSDQKRIYRSWECPEQQFSGSSRPSRELVSSFWQNIWSVPATHSEGLWFNSVQRSCDSISEMDPVIICDEDVSSAIHGAPNWKAPGPDGLQNFWLKKFNCLHSVLATQFQNILDLGSLPAFMTTGVTYLLFKSGSTSEPNNYRPITCLPTLYKLLTSILKFKIMRHVSNNNILASVQNGCKPRSRGTKELLLIDMTICQQVRRVRKNISMAWVDYKKAYDSVPHSWLLRVCTLYKLHPNLCSFLHSCMSSWATRLCHMDGMDFSDSPDLIQIKRGIFQGDSLSPLWFCLALNPLSTLLRDSMLGYRLRRNGEIVSHLLYMDDVKLYAPNESDLVTLLKITHNFSNDIRMEFGIDKCAVIRVQRGQIVNSSGVDISESVFLHSLSESENYKYLGMSQGLCIADKDMKQLLTARFLGRVKKVFKSLLSGGNKARAFNSWAIPALSYSFGILKWTQTELDKLDRKVRRLMTSFRMHHPRSSVMRLYIPRKCGGRGYLNAKSLHNREVCNLRDYFVRIDDNLHRDVVSVDNGLTPLSMAKQNWRRLKVLTTPDRIAVWQSKELHGRFYRAFTGPDVDQQASISWLSFGNLFAETEGFVCAIMDEVVMTNNYRRHIIKDGTVDICRACRCPGESIRHIVSGCSRLANGEYLHRHNQVAKIIHQQLALKYGLIDSEIPYYQYQPAPVLDNGLITLYWDRSIITDRTIVANRPDLVLIDRSVRKAMIVDITIPHDDNLIKAETEKLSKYLDLAHEITSMWGVDSTIIVPIVVSVNGLIAKSFNRYLEKLSLSCWVKHLAQKAVLLETARIVRRFLSADP

SEQ ID NO: 27817 - protein, 1080 aa, Clostera curtula
MFALFQDLNPGTTVTVQRLSDQVRAIQRLQLLAQPVLDRLRLETLSSRPVVRPQPDPAVSAIAVQPDPSLVAPAGLVQNEEVNVNNQYDEQLRRALDDAILVYRDVPASDRPRLPRLPMNKHILALTSVLNTFLQSHFDKSENLTETHSILYCGAVAVCRVGGVRFPNQNRPTTQMETIPAWQHRIELRINTARTIIAKLYTYKNGNSRPRVMRFVHQAFNGTGVRPQDYSAWITERIDFYKQKVQAWAKRIRRFKERSDRYKQNRLFQSDAKKVYRNWEQNSRQISLGVTPDPVRMYTFWQDIWAQPINQTEGEWMTIVRRSCEHITAMEEVIISQADIARALRLAPNWKSPGPDGLHNFWLKRFHSSHERLATQFHNAISSKTLPTFLTNGVTYLLYKSGSTSEPKNYRPITCLPTTYKLLTSILKFKIMDHILANNIMTTAQNGCKPRSRGTKELLLIDMTICQQVRRVKKNISMAWIDYKKAYDSVPHSWLSRVLDLYRLHPNLCSFLSVCMSQWTTRLCLPDMAGFSDSTGLLRIKRGIFQGDSLSPLWFCLAMNPLSTLLKDSKIGYLLRRDGEVISHLLYMDDLKLYAPKKSDLVSLLKITENFSNDIKMEFGVDKCAAIHVQRGRVVTSEELQLSENMSFRCLSESETYRYLGMAEGLGIADKEIKQALTTCFFSRLTKVFKSLLSGGNKVRAVNGWVMPAVAYSFGILRWTQTELDALDRRVRRQLTLYRMHHPRSSVMRLYIPRKCGGRGFLNVKNLHNREVCNLREYFLQSTEDVHRDMANVDNSFTPLSLAKQNWRKPQVLSISDRTTIWKSKELHGRFYKALTGPDVDQLASVAWLRFSNLFGETEGFTCAIMDEVIMTNNYRRHILKDGTADICRACHRPGESIRHIVSGCSRLANGEYLHRHNQVAKIVHQQLALKYSLVDTEVPYYQYQPAPVLDNGHVTLYWDRSIITDRTILANKPDIVIIDRSASRAMLVDVTIPHDENLVKAEKEKLTKYLDLAHEVTAMWHVDSTIIVPIVVSVNGLIAKSFDQHLKKLSLGCWIKGLIQKAVILDSARIVRRFLSLEP

SEQ ID NO: 27818 - protein, 1207 aa, Clostera curtula
MSEFALRRNPSRRCRLRAAYGTNSARPTSSSSSSSTSANEYHTPPVTAASSDDAGSPVPPAAQSSARRGRPLPASLRSTEHTATSMASATGGSVRRMRWSQELNENVMRAYYGATGGGTNLTAYRSRMFALFQDLNPGTTVTVQRLSDQVRAIQRLQLLAQPVLDGLRLETLSTRPVVRPQPDPAVSAIAVQPDPPLPAPAELVQNEEVNVNNQYDEQLRRALDDAILVYRDVPVSDRPRLPRLPMNKHILALTSVLNTFLQFHFDKSENLTETHSILYCGAVAVCRVGGVRFPNQNRLTRQMETIPAWQHRIELRINTARTIIAKLYAYKNGNSRPRVMRFVHQAFNGTGVRPQDYSAWITERIDFYKQKVQAWAKRIRRFKERSNRYKQNRLFQSDAKKVYRNWEQNSRQISLGVTPDPVRMYTFWQDIWAQPINHTEGDWMTIVRRSCENITAMEQVIISQADITRAVRLAPNWKSPGPDGLHNFWLKRFHSSHERLATQFQNAISSKTLPTFLTNGVTYLLYKSGSTSEPKNYRPITCLPTTYKLLTSILKFKIMDHILANNIMATAQNGCKPRSRGTKELLLIDMTICQQVRRVKKNISMAWIDYKKAYDSVPHSWLSRVLDLYRLHPNLCSFLSVCMSQWTTRLCLPDMAGFSDSTDLLRIKRGIFQGDSLSPLWFCLAMNPLSTLLMDSKIGYRLRRDGEVISHLLYMDDLKLYAPKKSDLVSLLKITENFSNDIKMEFGVDKCAAIHVQRGRVVTSEELQLSENMSFRCLSESETYRYLGMAEGLGIADKEIKQSLTACFFSRLTKVLKSLLSGGNKVRAVNGWVMPALAYSFGILRWTQTELDALDRRVRRQLTLYRMHHPRSSVMRLYIPRKCGGRGFLNVKNLHNREVCNLREYFLQSTEDVHRDMANVDNSFTPLSLAKQNWRKPQVLSISDRTTIWKSKELHGRFYKALTGPDVDQLASVAWLRFSNLFGETEGFACAIMDEVIMTNNYRRHILKDGTADICRACHRPGESIRHIVSGCSRLANGEYLHRHNQVAKIVHQQLALKYSLVDTEVPYYQYQPAPVLDNGQVTLYWDRSIITDRTILANKPDIVIIDRSASRAMLVDVTIPHDENLVKAEKEKLTKYLDLAHEVTAMWHVDSTIIVPIVVSVNGLIAKSFDQHLKKLSLGCWIKGLIQKAVILDSARIVRRFLSLEP

SEQ ID NO: 27819 - protein, 1201 aa, Clostera curtula
MATRRNPNRRCKQAAQLGARLPSPQVSSCSSNEEFLTPTSGTSSDETEVQTASAPRRPVRRGRPPLPARLWPSEQTGPSTAPATGGSVRRMRWSQQINENVMRAYYGATEGGTNLTAYRSRMFALFQDLNPGTTVTVQRLSDQVRAIQRLQLLAQPVLDRLRLETLSSPPVVHPQPDPAISAIAVQPDPLILAPAELVQSEEVNVNNQYNEQLRRALDDAILEYRDVLPTDRPRLPRLPMTKHNLALTSILDKILPTYFNISENLTETHSILYCGAVAVCRVGGVRFPNLNRPTPQATITPAWQYRIEKRINAARTIIAKLLTFRSGNNRPRVMRFVHQAFEGTGIRPQDYTASVTERMDFYKQKVQAWAKRIRRFKMRSNRYNQNRLFQSDAKKVYRNWEQNSRQMSPGVTPDPVGMYSFWQDIWSQPVIHSEGEWMSVIRRACEPITAMGPINVDEADIARAVSSAPNWKSPGPDSLHNFWLKRFHSSHVRLATQFQNAIASGSLPTFLTTGVTYLLYKSGSTSEPKNYRPITCLPTTYKLLTSILKFKIMEHILANNIMASVQNGCKPRSRGTKELLLIDMTICQQVRRVKKNISMAWIDYKKAYDSVPHSWLSRVLDLYRLHPNLCSFLSVCMSQWTTRLCLPDMAGFSDSTGLLRIKRGIFQGDSLSPLWFCLAMNPLSTLLMDSKIGYLLRRDGEVISHLLYMDDLKLYAPKKSDLVSLLKITENFSNDIKMEFGVDKCAAIHVQRGRVVTSEELQLSENMSFRCLSESETYSYLGMAEGLGIADKEIKQALTTCFFSRLTKVLKSLLSGGNKVRAVNGWVMPALAYSFGILRWTQTELDALDRRVRRQLTLYRMHHPRSSVMRLYIPRKCGGRGFLNVKNLHNREVCNLREYFLQPTEGVHRDMANVDNSFTPLSLAKQNWRKPQVLSISDRTTIWKSKELHGRFYKALTGPDVDQLASVAWLRFSNLFGETEGFACAIMDEVIMTNNYRRHILKDGTADICRACHRPGESIRHIVSGCSRLANGEYLHRHNQVAKIVHQQLALKYSLVDTEVPYYQYQPAQVLDNGHVTLYWDRSIITDRTIPANKPDIVIIDRSASRAMLVDVTIPHDENLVKAETEKLTKYLDLAHEVTAMWHVDSTIIVPIVVSVNGLIAKSFDQHLKKLSLGCWIKGLIQKAVILDSARIVRRFLSLEP

SEQ ID NO: 27820 - protein, 1206 aa, Clostera curtula
MSQSTRRNPPRRCRLRAAYGTASARLTPQSSSSSSSEDEYHTPPVTAASSDDAGSPVPPTAQRSARRGRPLPASLRSTEHTATSMASATGGSVRRMRWSQELNENVIRAYYGATEGGTNLTAYRSRMFALFQDLNPGTTVTVQRLSDQVRAIQRLQLLAQPVLDRLRLETLSSRPVVRPQPDPAVSAIAIQPDPPLLAPAELVQNEEVNVNNQYDEQLRRALDDAILVYRDVAASDRPRLPRLPMNKHILALTSVLNTFLQSHFDKSENLTETHSILYCGAVAVCRVGGVRFPNQNRLTTQMETIPAWQHRIELRINTARTIIAKLYAYKNGNSRPRVMRFVHQAFNGTGVRPQDYNAWITERIDFYKQKVQAWAKRIRRFKERSNRYKQNRLFQSDAKKVYRNWEQNSRQISLGVTPDPVRMYTFWQDIWAQPINHTEGDWMTIVRRSCEHITAMEQVIISQADIARAVRLAPNWKSPGPDGLHNFWLKRFHSSHERLATQFQNAISSKTLPTFLTNGVTYLLYKSGSTLEPKNYRPITCLPTTYKLLTSILKFKIMDHILANNIMATAQNGCKPRSRGTKELLLIDMTICQQVRRVKKNISMAWIDYKKAYDSVPHSWLSRVLDLYRLHPNLCSFLSVCMSQWTTRLCLPDMAGFSDSTGLLRIKRGIFQGDSLSPLWFCLAMNPLSTLLMDSKIGYRLRRDGEVISHLLYMDDLKLYAPKKSDLVSLLKITENFSNDIKMEFGVDKCAAIHVQRGRVVTSEELQLSENMSFRCLSESETYRYLGMAEGLGIADKEIKQALTTCFFSRLTKVLKSLLSGGNKVRAVNGWVMPALAYSFGILRWTQTELDALDIRVRRQLTLYRMHHPRSSVMRLYIPRKCGGRGFLNVKNLHNREVCNLREYFLQSNEDVHRDMANVDNSFTPLSLAKQNWRKPQVLSISDRTTIWKSKELHGRFYKALTGPDVDQLASVAWLRFSNLFGETEGFACAIMDEVIMTNNYRRHILKDGTADICRACHRPGESIRHIVSGCSRLANGEYLHRHNQVAKIVHQQLALKYSLVDTEVPYYQYQPAPVLDNGHVTLYWDRSIITDRTILANKPDIVIIDRSASRAMLVDVTIPHDENLVKAEKEKLTKYLDLAHEVTAMWHVDSTIIVPIVVSVNGLIAKSFDQHLKKLSLGCWIKGLIQKAVILDSARIVRRFLSLEP

SEQ ID NO: 27821 - protein, 1243 aa, Clostera curtula
MQKILQNYFKMWYFIYKYVEFWIIYSKKLVVLQYRYYFWSAPRRNPSRRCRSRAAYGTYSARPTPSSSSSPTSGNEYHTPPVTAASSDDAGSPVPLAAQSSARRGRPLPASLRSTEHNATSMASATGGSVRRMRWSQQLNENVMRAYYGATEGGTNLTAYRSRMFALFQDLNPGTTVTVQRLSDQVRAIQRLQLLAQPVLDRLRLETLSSHPVVRPQPDPAVPAIAELPDPLPLALAESLQNEEVNVNNQYNEQLRRALDDAILEYRDVPPSDRPRLPRLPMTKHNLALTSILDKILPSYFSTTENLTETHSILYCGAVAVCRVGGVRFPNHNRPTPQTTTTPAWQYRIEKRINAARTIIAKLLTFRSGNNRPRVMRFVHQAFEGTGIRPQEYTASVTERMDFYKQKIQAWAKRIRRFKKRSDRYNQNRLFQSDAKKVYRNWEQNSRQMSPGVTPDPVGMYSFWQDIWSQPVIHSEGEWMSVVRRACEPITAMGPINVDEADIARAISSAPNWKSPGPDSLHNFWLKRFHSSHVRLATQFQNAIATGSLPTFLTTGVTYLLYKSGSTSEPKNYRPITCLPTTYKLLTSILKFKIMEHILANNIMAPVQNGCKPRSRGTKELLLIDMTICQQVRRVKKNISMAWIDYKKAYDSVPHSWLSRVLDLYRLHPNLCSFLSVCMSQWTTRLCLPDMAGFSDSTGLLRIKRGIFQGDSLSPLWFCLAMNPLSTLLMDSKIGYRLRRDGEVISHLLYMDDLKLYAPKKSDLVSLLKITENFSKDIKMEFGIDKCAAIHVQRGRVVTSEELQLSENMSLRCLSESETYRYLGMAEGLGIADKEIKQALTTCFFSRLTKVLKSLLSGGNKVRAVNGWVMPALAYSFGILRWTQTELDALDRRVRRQLTLYRMHHPRSSVMRLYIPRKCGGRGFLNVKNLHNREVCNLREYFLQSTENVHRDMANVDNSFTPLSLAKQNWRKPQVLSISDRTTIWKSKELHGRFYKALTGPDVDQLASVAWLRFSNLFGETEGFACAIMDEVIMTNNYRRHILKDGTADICRACHRPGESIRHIVSGCSRLANGEYLHRHNQVAKIVHQQLALKYSLVDTEVPYYQYQPAPVLDNGHVTLYWDRSIITDRTILANKPDIVIIDRLASRAMLVDVTIPHDENLVKAEKEKLTKYLDLAHEVTAMWHVDSTIIVPIVVSVNGLIAKSFDQHLKKLSLSCWIKGLIQKAVILDSARIVRRFLSLEP

SEQ ID NO: 27822 - protein, 1207 aa, Clostera curtula
MSDSAPRRNPSRRCRLRAAYGTNCARPTSSSSSSPTSGNEYHTPPVTAASSDDAGSPVPPAAQSSARRGRPLPASLRSTEHTATSMASATGGSVRRMRWSQELNEKVMRAYYGATEGGTNLTAYRSRMFALFQDLNPGTTVTVQRLSDQVRAIQRLQLLAQPVLDRLRLETLSSRPVVRPQPDPAVSAIAVQPDPPLVAPAELVQNEEVNVNNQYDEQLRRALDDAILVYRDVPASDRPRLPRLPMNKHILALTSVLNTFLQSHFDKSENLTETHSILYCGAVAVCRVGGVRFPNQNRPTTQMETIPAWQHRIELRINTARTIIAKLYTYKNGNSRPRVMRFVHQAFNGTGVRPQDYSAWITERIDFYKQKVLAWAKRIRRFKERSDRYKQNRLFQSDAKKVYRNWEQNSRQISLGVTPDPVRMYTFWQDIWAQPINHTEGEWMTIVRRSCEHITAMEQVIISQADIARALRLAPNWKSPGPDGLHNFWLKRFHSSHERLATQFHNAISSKTLPTFLTNGVTYLLYKSGSTSEPKNYRPITCLPTTYKLLTSILKFKIMDHILANNIMATAQNGCKPRSRGTKELLLIDMTICQQVRRVKKNISMAWIDYKKAYDSVPHSWLSRVLDLYRLHPNLCSFLSVCMSQWTTRLCLPDMAGFSDSTGLLRIKRGIFQGDSLSPLWFCLAMNPLSTLLMDSKIGYLLRRDGEVISHLLYMDDLKLYAPKKSDLVSLLKITENFSNDIKMEFGVDKCAAIHVQRGRVVTSEELQLSENMSFRCLSESETYRYLGMAEGLGIADKEIKQALTTCFFSRLTKVLKSLLSGGNKVRAVNGWVMPALAYSFGILRWTQTELDALDRRVRRQLTLYRMHHPRSSVMRLYIPRKCGGRGFLNVKNLHNREVCNLRDYFLQSTENVHRDMANVDNSFTPLSLAKQNWRKPQVLSISDRTTIWKSKELHGRFYKALTGPDVDQLASVAWLRFSNLFGETEGFACAIMDEVIMTNNYRRHILKDGTADICRACHRPGESIRHIVSGCSRLANGEYLHRHNQVAKIVHQQLALKYSLVDTEVPYYQYQPAPVLDNGHVTLYWDRSIITDRTILANKPDIVIIDRSASRAMLVDVTIPHDENLVKAEKEKLTKYLDLAHEVTAMWHVDSTIIVPIVVSVNGLIAKSFDQHLKKLSLGCWIKGLIQKAVILDSARIVRRFLSLEP

SEQ ID NO: 27823 - protein, 1111 aa, Clostera curtula
MRWSQQINENVMRAYYGATEGGTNLTAYRSRMFALFQDLNPGTTVTVQRLSDQVRAIQRLQLLAQPVLDRLRLETLSSRPVVLPQPDPAISAIAVQPDPLILAPAELVQSEEVNVNNQFNEQLRRALDDAILEYRDVLPTDRPRLPRLPMTKHNLALTSILDKILPTYFNISENLTETHSILYCGAVAVCRVGGVRFPNLNRPTPQATITPAWQYRIEKRINAARTIIAKLLTFRSGNNRPRVMRFVHQAFEGTGIRPQDYTASVTERMDFYKQKVQAWAKRIRRFKMRSNRYNQNRLFQSDAKKVYRNWEQNSRQMSPGVTPDPVGMYSFWQDIWSQPVIHSEGEWMSVIRRACEPITAMGPINVDEADIARAVSSAPNWKSPGPDSLHNFWLKRFHSSHVRLATQFQNAIASGSLPTFLTTGVTYLLYKSGSTSEPKNYRPITCLPTTYKLLTSILKFKIMEHILANNIMASVQNGCKPRSRGTKELLLIDMTICQQVRRVKKNISMAWIDYKKAYDSVPHSWLSRVLDLYRLHPNLCSFLSVCMSQWTTRLCLPDMAGFSDSTGLLRIKRGIFQGDSLSPLWFCLAMNPLSTLLMHSKIGYRLRSGGEVISHLLYMDDLKLYAPNKSDLVSLLKITENFSNDIKMEFGVDKCAAIHVQRGRVVTSEELQFSQNMSLRCLSESETYRYLGMAEGLGIADKEIKQSLTACFFSRLTKVLKSLLSGGNKVRAVNGWVMPALAYSFGILRWTQTELDALDRKVRRQLTLYRMHHPRSSVMRLYIPRKCGGRGFLNVKNLHNREVCNLREYFLQPTEGVHRDMANVDNSFTPLSLAKQNWRKPQVLSISDRTTIWKSKELHGRFYKALTGPDVDQLASVAWLRFSNLFGETEGFACAIMDEVIMTNNYRRHILKDGTADICRACHRPGESIRHIVSGCSRLANGEYLHRHNQVAKIVHQQLALKYSLVDTEVPYYQYQPAPVLDNGHVTLYWDRSIITDRTIPANKPDIVIIDRSASRAMLVDVTIPHDENLVKAEKEKLTKYLDLAHEVTAMWHVDSTIIVPIVVSVNGLIAKSFDQHLKKLSLGCWIKGLIQKAVILDSARIVRRFLSLEP

SEQ ID NO: 27824 - protein, 1206 aa, Clostera curtula
MSQSTRRNPPRRCRLRAAYGTASARLTPQSSSSSSSEDEYHTPPVTAASSDDAGSPVPPTAQRSARRGRPLPASLRSTEHTATSMASATGGSVRRMRWSQELNENVMRAYYGATEGGTNLTAYRSRMFALFQDLNPGTTVTVQRLSDQVRAIQRLQLLAQPVLDRLRLETLSFRPVVRPQPDPAVSAIAIQPDPPLLAPAELVQNEEVNVNNQYDEQLRRALDDAILVYRDVPASDRPRLPRLPMNKHILALTSVLNTFLQSHFDKSENLTETHSILYCGAVAVCRVGGVRFPNQNRLTTQMETIPAWQHRIELRINTARTIIAKLYAYKNGNSRPRVMRFVHQAFNGTGVRPQDYNAWITERIDFYKQKVQAWAKRIRRFKERSNRYKQNRLFQSDAKKVYRNWEQKSRQISLGVTPDPVRMYTFWQDIWAQPINHTEGDWMTIVRRSCEHITAMEQVIISQADIACAVRLAPNWKSPGPDGLHNFWLKRFHSSHERLATQFQNAISSKTLPTFLTNGVTYLLYKSGSTSEPKNYRPITCLPTTYKLLTSILKFKIMDHILANNIMATAQNGCKPRSRGTKELLLIDMTICQQVRRVKKNISMAWIDYKKAYDSVPHSWLSRVLDLYRLHPNLCSFLSVCMSQWTTRLCLPDMAGFSDSTGLLRIKRGIFQGDSLSPLWFCLAMNPLSTLLMDSKIGYRLRRDGEVISHLLYMDDLKLYAPKKSDLVSLLKITEKFSNDIKMEFGVDKCAAIHVQRGRVVTSEELQLSENMSFRCLSESETYRYLGMAEGLGIADKEIKQALTTCFFSRLTKVLKSLLSGGNKVRAVNGWVMPALAYSFGILRWTQTELDALDRRVRRQFTLYRMHHPRSSVMRLYIPRKCGGRGFLNVKTLHNREVCNLREYFLQSTEDVHRDMANVDNSFTPLSLAKQNWRKPQVLSISDRTTIWKSKELHGRFYKALTGPDVDQLASVAWLRFSNLFGETEGFACAIMDEVIMTNNYRRHILKDGTADICRACHRPGESIRHIVSGCSRLANGEYLHRHNQVAKIVHQQLALKYSLVDTEVPYYQYQPAPVLDNGHVTLYWDRSIITDRTILANKPDIVIIDRLASRAMLVDVTIPHDENLVKAEKEKLTKYLDLAHEVTAMWHVDSTIIVPIVVSVNGLIAKSFDQHLKKLSLGCWIKGLIQKAVILDSARIVRRFLSLEP

SEQ ID NO: 27825 - protein, 1209 aa, Clostera curtula
MMLPTRRNPLRQCRQHVAIGTSSARPTQGTSSSSLSSSSEEAYFTPNSEGSSDVVTSPPEPSPLRRSTRRRPPPLPASLGSSDTSVPSMTPATGGVVRRMRWTLQLNESVMRAYYGATQGGTVLTAYRSRMLSLFQELNPTTTITAQKLSDQVRAIQRLNLLEQPVLDGLRLESLSALPAVNQRSVMSQAVTASVGSITQEPAESTHIDEVSVTNQFSEKLRSALEEAILEFRDIPISARPRLPRLPTHTQNIVLVGVLNNILKSYIHTCSTLSETHSLLYCGAIAACRVGGARFLNFHSSNRRTNTIPLWQCRIQKKIDSARTTIAKLYAFRMGNSRPRIMRYVVQAFAGTGISRHDYQAWITERIDFFKQKMYAWAKRIRRYKERSDRFTQNRLFQSDQKRIYRSWECPEQQFSGSSRPSRELVSSFWQNIWSVPATHSEGLWFNSVQRSCDSISEMDPVIICDEDVSSAIHGAPNWKAPGPDGLQNFWLKKFNCLHSVLATQFQNILDLGSLPAFMTTGVTYLLFKSGSTSEPNNYRPITCLPTLYKLLTSILKFKIMRHVSNNNILAFVQNGCKPRSRGTKELLLIDMTICQQVRRVRKNISMAWVDYKKAYDSVPHSWLLRVCTLYKLHPNLCSFLHSCMSSWATRLCHMDGMDFSDSPDLIQIKRGIFQGDSLSPLWFCLALNPLSTLLRDSMLGYRLRRNGEIVSHLLYMDDVKLYAPNESDLVTLLKITHNFSNDIRMEFGIDKCAVIRVQRGQIVNSSGVDISESVFLHSLSESENYKYLGMSQGLCIADKDMKQLLTARFLGRVKKVFKSLLSGGNKARAFNSWAIPALSYSFGILKWTQTELDKLDRKVRRLMTSFRMHHPRSSVMRLYIPRKCGGRGYLNAKSLHNREVCNLRDYFVRIDDNLHRDVVSVDNGLTPLSMAKQNWRRLKVLTTPDRIAVWQSKELHGRFYRAFTGPDVDQQASISWLSFGNLFAETEGFVCAIMDEVVMTNNYRRHIIKDGTVDICRACRCPGESIRHIVSGCSRLANGEYLHRHNQVAKIIHQQLALKYGLIDSEIPYYQYQPAPVLDNGLITLYWDRSIITDRTIVANRPDLVLIDRSVRKAMIVDITIPHDDNLIKAETEKLSKYLDLAHEITSMWGVDSTIIVPIVVSVNGLIAKSFNRYLEKLSLSCWVKHLAQKAVLLETARIVRRFLSADP

SEQ ID NO: 27826 - protein, 1205 aa, Clostera curtula
MSAPRRNPSRRCRSRAAYGTYSARPTPSSSSSPTSGNEYHTPPVTAASSDDAGSPVPPAAQSSARRGRPLPASLRSTEHNATSMASATGGSVRRMRWSQQLNENVMRAYYGATEGGTNLTAYRSRMFTLFQDLNPGTTVTVQRLSDQVRAIQRLQLLAQPVLDRLRLETLSSHPVVRPQPDPAVPAIAEQPDPLPLALVESLQNEEVNVNNQYNEQLRRALDDAILEYRDVPPSDRPRLPRLPMTKHNLALTSILDKILPPYFSTTENLTETHSILYCGAVAVCRVGGVRFSNHNRPTPQTTTTPAWQYRIEKRINAARTIIAKLLTFRSGNNRPRVMRFVHQAFEGTGIRPQEYTASVTERMDFYKQKVQAWAKRIRRFKKRSDRYNQNRLFQSDAKKVYRNWEQNSRQMSPGVTPDPVGMYSFWQDIWSQPVIHSEGEWMSVVRRACEPITAMGPINVDEADIARAVSSAPNWKSPGPDSLHNFWLKRFHSSHVRLATQFQNAIATGSLPTFLTTGVTYLLYKSGSTSEPKNYRPITCLPTTYKLLTSILKFNIMEHILANNIMAPVQNGCKPRSRGTKELLLIDMTICQQVRRVKKNISMAWIDYKKAYDSVPHSWLSRVLDLYRLHPNLCSFLSVCMSQWTTRLCLPDMAGFSDSTGLLRIKRGIFQGDSLSPLWFCLAMNPLSTLLMDSKIGYRLRRDGEVISHLLYMDDLKLYAPKKSDLVSLLKITENFSKDIKMEFGVDKCAAIHVQRGRVVTSEELQLSENMSLRCLSESETYRYLGMAEGLGIADKEIKQSLTACFLSRLTKVLKSLLSGGNKARAVNGWVMPALAYSFGILRWTQSELDALDRKVRRQLTLYRMHHPRSSVMRLYIPRKCGGRGYLNVKNLHNREVCNLREYFLQSTEDVHRDVANVDNSFTPLSLAKQNWRKPQVLSISDRTTIWKSKELHGRFYKALTGPDVDQLASVAWLRFSNLFGETEGFACAIMDEVIMTNNYRRHILKDGTADICRACHRPGESIRHIVSGCSRLANGEYLHRHNQVAKIVHQQLALKYSLVDTEVPYYQYQPAPVLDNGHVTLYWDRSIITDRTIPANKPDIVIIDRLASRAMLVDVTIPHDENLVKAEKDKLTKYLDLAHEVTAMWHVDSTIIVPIVVSVNGLIAKSFDQHLKKLSLSCWIKGLIQKAVILDSARIVRRFLSLEP

SEQ ID NO: 27827 - protein, 1207 aa, Clostera curtula
MSEFALRRNPSRRCRLRAAYGTNSARPTSSSSSSSTSANEYHTPPVTAASSDDAGSPVPPAAQSSARRGRPLPASLRSTEHTATSMASATGGSVRRMRWSQELNENVMRAYYGATGGGTNLTAYRSRMFALFQDLNPGTTVTVQRLSDQVRAIQRLQLLAQPVLDRLRLETLSTRPVVRPQPDPAVSAIAVQPDPPLPAPAELVQNEEVNVNNQYDEQLRRALDDAILVYRDVPVSDRPRLPRLPMNKHILALTSVLNTFLQFHFDKSENLTETHSILYCGAVAVCRVGGVRFPNQNRLTTQMETIPAWQHRIELRINTARTIIAKLYTYKNGNSRPRVMRFVHQAFNGTGVRPQDYSAWITERIDFYKQKVQAWAKRIRRFKERSDRYKQNRLFQSDARKVYRNWEQNSRQISLGVTPDPVRMYTFWQDIWAQPINHTEGEWMTIVRRSCENITAMEQVIISQADIARAVRLAPNWKSPGPDGLHNFWLKRFHSSHERLATQFQNAISSKTLPTFLTNGVTYLLYKSGSTSEPKNYRPITCLPTTYKLLTSILKFKIMDHILANNIMATAQNGCKPRSRGTKELLLIDMTICQQVRRVKKNISMAWIDYKKAYDSVPHSWLSRVLDLYRLHPNLCSFLSVCMSQWTTRLCLPDMAGFSDSTDLLRIKRGIFQGDSLSPLWFCLAMNPLSTLLMDSKIGYRLRRDGEVISHLLYMDDLKLYAPKKSDLVSLLKITENFSNDVKMEFGVDKCAAIHVQRGRVVTSEELQLSENMSFRCLSESETYRYLGMAEGLGIADKEIKQSLTACFFSRLTKVLKSLLSGGNKVRAVNGWVMPALAYSFGILRWTQTELDALDRRVRRQLTLYRMHHPRSSVMRLYIPRKCGGRGFLNVKNLHNREVCNLREYFLQSTEDVHRDMANVDNSFTPLSLAKQNWRKPQVLSISDRTTIWKSKELHGRFYKALTGPDVDQLASVAWLRFSNLFGETEGFACAIMDEVIMTNNYRRHILKDGTADICRACHRPGESIRHIISGCSRLANGEYLHRHNQVAKIVHQQLALKYSLVDTEVPYYQYQPAPVLDNGHVTLYWDRSIITDRTILANKPDIVIIDRSASRAMLVDVTIPHDENLVKAEKEKLTKYLDLAHEVTAMWHVDSTIIVPIVVSVNGLIAKSFDQHLKKLSLGCWIKGLIQKAVILDSARIVRRFLSLEP

SEQ ID NO: 27828 - protein, 1207 aa, Clostera curtula
MSDSAPRRNPSRRCRLRAAYGTNCARPTSSSSSSPTSGNEYHTPPVTAASSDDAGSPVPPAAQSSARRGRPLPASLRSTEHTATSMASATGGSVRRMRWSQELNEKVMRAYYGATEGGTNLTAYRSRMFALFQDLNPGTTVTVQRLSDQVRAIQRLQLLAQPVLDRLRLETLSSRPVVRPQPDPAVSAIAVQPDPPLVAPAELVQNEEVNVNNQYDEQLRRALDDAILVYRDVPASDRPRLPRLPMNKHILALTSVLNTFLQSHFDKSENLTETHSILYCGAVAVCRVGGVRFPNQNRPTTQIETIPAWQHRIELRISTARTIIAKLYTYKNGNSRPRVMRFVHQAFNGTGVRPQDYSAWITERIDFYKQKVLAWAKRIRRFKERSDRYKQNRLFQSDAKKVYRNWEQNSRQISLGVTPDPVRMYTFWQDIWAQPINHTEGEWMSIVRRSCEHITAMEQVIISQADIARALRLAPNWKSPGPDGLHNFWLKRFHSSHERLATQFHNAISSKTLPTFLTNGVTYLLYKSGSTSEPKNYRPITCLPTTYKLLTSILKFKIMDHILANNIMATAQNGCKPRSRGTKELLLIDMTICQQVRRVKKNISMAWIDYKKAYDSVPHSWLSRVLDLYRLHPNLCSFLSVCMSQWTTRLCLPDMAGFSDSTGLLRIKRGIFQGDSLSPLWFCLAMNPLSTLLMDSKIGYLLRRDGEVISHLLYMDDLKLYAPKKSDLVSLLKITENFSNDIKMEFGVDKCAAIHVQRGRVVTSEELQLSENMSFRCLSESETYRYLGMAEGLGIADKEIKQALTTCFFSRLTKVLKSLLSGGNKVRAVNGWVMPALAYSFGILRWTQTELDALDRRVRRQLTLYRMHHPRSSVMRLYIPRKCGGRGFLNVKNLHNREVCNLRDYFLQSTEDVHRDMANVDNSFTPLSLAKQNWRKPQVLSISDRTTIWKSKELHGRFYKALTGPDVDQLASVAWLRFSNLFGETEGFACAIMDEVIMTNNYRRHILKDGTADICRACHRPGESIRHIVSGCSRLANGEYLHRHNQVAKIVHQQLALKYSLVDTEVPYYQYQPAPVLDNGHVTLYWDRSIITDRTILANKPDIVIIDRSASRAMLVDVTIPHDENLVKAEKEKLTKYLDLAHEVTAMWHVDSTIILPIVVSVNGLIAKSFDQHLKKLSLGCWIKGLIQKAVILDSARIVRRFLSLEP

SEQ ID NO: 27829 - protein, 1207 aa, Clostera curtula
MSEFALRRNPSRRCRLRAAYGTNSARPTSSSSSSSTSANEYHTPPVTAASSDDAGSPVPPAAQSSARRGRPLPASLRSTEHTATSMASATGGSVRRMRWSQELNENVMRAYYGATGGGTNLTAYRSRMFALFQDLNPGTTVTVQRLSDQVRAIQRLQLLAQPVLDGLRLETLSTRPVVRPQPDPAVSAIAVQPDPPLPAPAELVQNEEVNVNNQYDEQLRRALDDAILVYRDVPVSDRPRLPRLPMNKHILALTSVLNTFLQFHFDKSENLTETHSILYCGAVAVCRVGGVRFPNQNRLTRQMETIPAWQHRIELRINTARTIIAKLYAYKNGNSRPRVMRFVHQAFNGTGVRPQDYSAWITERIDFYKQKVQAWAKRIRRFKERSNRYKQNRLFQSDAKKVYRNWEQNSRQISLGVTPDPVRMYTFWQDIWAQPINHTEGDWMTIVRRSCENITAMEQVIISQADIARAVRLAPNWKSPGPDGLHNFWLKRFHSSHERLATQFQNAISSKTLPTFLTNGVTYLLYKSGSTSEPKNYRPITCLPTTYKLLTSILKFKIMDHILANNIMATAQNGCKPRSRGTKELLLIDMTICQQVRRVKKNISMAWIDYKKAYDSVPHSWLSRVLDLYRLHPNLCSFLSVCMSQWTTRLCLPDMAGFSDSTDLLRIKRGIFQGDSLSPLWFCLAMNPLSTLLMDSKIGYRLRRDGEVISHLLYMDDLKLYAPKKSDLVSLLKITENFSNDIKMEFGVDKCAAIHVQRGRVVTSEELQLSENMSFRCLSESETYRYLGMAEGLGIADKEIKQSLTACFFSRLTKVLKSLLSGGNKVRAVNGWVMPALAYSFGILRWTQTELDALDRRVRRQLTLYRMHHPRSSVMRLYIPRKCGGRGFLNVKNLHNREVCNLREYFLQSTEDVHRDMANVDNSFTPLSLAKQNWRKPQVLSISDRTTIWKSKELHGRFYKALTGPDVDQLASVAWLRFSNLFGETEGFACAIMDEVIMTNNYRRHILKDGTADICRACHRPGESIRHIVSGCSRLANGEYLHRHNQVAKIVHQQLALKYSLVDTEVPYYQYQPAPVLDNGQVTLYWDRSIITDRTILANKPDIVIIDRSASRAMLVDVTIPHDENLVKAEKEKLTKYLDLAHEVTAMWHVDSTIIVPIVVSVNGLIAKSFDQHLKKLSLGCWIKGLIQKAVILDSARIVRRFLSLEP

SEQ ID NO: 27830 - protein, 1207 aa, Clostera curtula
MSEFALRRNPSRRCRLRAAYGTNSARPTSSSSSSSTSANEYHTPPVTAASSDDAGSPVPSAAQSSARRGRPLPASLRSTEHTATSMASATGGSVRRMRWSQELNENVMRAYYGATEGGTNLTAYRSRMFALFQDLNPGTTVTVQRLSDQVRAIQRLQLLAQPVLDRLRLETLSTRPVVRPQPDPAVSAIAVQPDPPLPAPADLVQNEEVNVNNKYDEQLRRALDDAILVYRDVPVSDRPRLPRLPMNKHILALTSVLNTFLQFHFDKSENLTETHSILYCGAVAVCRVGGVRFPNQNRLTTQMETIPAWQHRIELRINTARTIIAKLYAYKNGNSRPRVMRFVHQAFNGTGVRPQDYNAWITERIDFYKQKVQAWAKRIRRFKERSDRYKQNRLFQSDAKKVYRNWEQNSRQISLGVTPDPVRMYTFWQDIWAQPINHTEGEWMTLVKRSCENITAMEQVIISQADIARAVRLAPNWKSPGPDGLHNFWLKRFHSSHERLATQFQNAISSKSLPTFLTNGVTYLLYKSGSTSEPKNYRPITCLPTTYKLLTSILKFKIMDHILANNIMATAQNGCKPRSRGTKELLLIDMTICQQVRRVKKNISMAWIDYKKAYDSVPHSWLSRVLDLYRLHPNLCSFLSVCMSQWTTRLCLPDMAGFSDSTDLLRIKRGIFQGDSLSPLWFCLAMNPLSTLLMDSKIGYRLRRDGEVISHLLYMDDLKLYAPKKSDLVSLLKITENFSNDIKMEFGVDKCAAIHVQRGRVVTSEELQLSENMSFRCLSESETYRYLGMAEGLGIADKEIKQSLTACFFSRLTKVLKSLLSGGNKVRAVNGWVMPALAYSFGILRWTQTELDALDRRVRRQLTLYRMHHPRSSVMRLYIPRKCGGRGFLNVKNLHNREVCNLREYFLQSTEDVHRDMANVDNSFTPLSLAKQNWRKPQVLSISDRTTIWKSKELHGRFYKALTGPDVDQLASVAWLRFSNLFGETEGFACAIMDEVIMTNNYRRHILKDGTADICRACHRPGESIRHIVSGCSRLANGEYLHRHNQVAKIVHQQLALKYSLVDTEVPYYQYQPAPVLDNGHVTLYWDRSIITDRTILANKPDIVIIDRLASRAMLIDVTIPHDENLVKAEKEKLTKYLDLAHEVTAMWHVDSTIIVPIVVSVNGLIAKSFDQHLKKLSLGCWIKGLIQKAVILDSARIVRRFLSLEP

SEQ ID NO: 27831 - protein, 1209 aa, Clostera curtula
MMLPTRRNPLRQCRQHVAIGTSSARPTQGTSSSSLSSSSEEAYFTPNSEGSSDVVTSPPEPSPLRRSTRRRPPPLPASLGSSDTSVPSMTPATGGVVRRMRWTLQLNESVMRAYYGATQGGTVLTAYRSRMLSLFQELNPTTTITAQRLSDQVRAIQRLNLLEQPVLDGLRLESLSALPAVNQRSVMSQAVTASVGSITQEPAESTHIDEVSVTNQFSEKLRSALEEAILEFRDIPISARPRLPRLPTHTQNIVLVGVLNNILKSYIHTCSTLSETHSLLYCGAIAACRVGGARFLNFHSSNRRTNTIPLWQCRIQKKIDSARTTIAKLYAFRMGNSRPRIMRYVVQAFAGTGISRHDYQAWITERIDFFKQKMYAWAKRIRRYKERSDRFTQNRLFQSDQKRIYRSWECPEQQFSGSSRPSRELVSSFWQNIWSVPATHSEGLWFNSVQRSCDSISEMDPVIICDEDVSSAIHGAPNWKAPGPDGLQNFWLKKFNCLHSVLATQFQNILDLGSLPAFMTTGVTYLLFKSGSTSEPNNYRPITCLPTLYKLLTSILKFKIMRHVSNNNILASVQNGCKPRSRGTKELLLIDMTICQQVRRVRKNISMAWVDYKKAYDSVPHSWLLRVCTLYKLHPNLCSFLHSCMSSWATRLCHMDGMDFSDSPDLIQIKRGIFQGDSLSPLWFCLALNPLSTLLRDSMLGYRLRRNGEIVSHLLYMDDVKLYAPNESDLVTLLKITHNFSNDIRMEFGIDKCAVIRVQRGQIVNSSGVDISESVFLHSLSESENYKYLGMSQGLCIADKDMKQLLTARFLGRVKKVFKSLLSGGNKARAFNSWAIPALSYSFGILKWTQTELDKLDRKVRRLMTSFRMHHPRSSVMRLYIPRKCGGRGYLNAKSLHNREVCNLRDYFVRIDDNLHRDVVSVDNGLTPLSMAKQNWRRLKVLTTPDRIAVWQSKELHGRFYRAFTGPDVDQQASISWLSFGNLFAETEGFVCAIMDEVVMTNNYRRHIIKDGTVDICRACRCPGESIRHIVSGCSRLANGEYLHRHNQVAKIIHQQLALKYGLIDSEIPYYQYQPAPVLDNGLITLYWDRSIITDRTIVANRPDLVLIDRSVRKAMIVDITIPHDDNLIKAETEKLSKYLDLAHEITSMWGVDSTIIVPIVVSVNGLIAKSFNRYLEKLSLSCWVKHLAQKAVLLETARIVRRFLSADP

SEQ ID NO: 27832 - protein, 1209 aa, Clostera curtula
MMLPTRRNPLRQCRQHVAIGTSSARPTQGTSSSSLSSSSEEAYFTPNSEGSSDVVTSPPEPSPLRRSTRRRLPPLPASLGSSDTSVPSMTPATGGVVRRMRWTLQLNESVMRAYYGATQGGTVLTAYRSRMLSLFQELNPTTTITAQRLSDQVRAIQRLNLLEQPVLDRLRLESLSALPAVNQRSVMSQAVTASVGSITQEPAESTHIDEVSVTNQFSEKLRSALEDAILEFRDIPISARPRLPRLPTHTQNIVLVGVLNNILKSYIHTCSTLSETHSLLYCGAIAACRMGGARFLNFHSSNRRTNTIPLWQCRIQKKIDSARTTIAKLYAFRMGNSRPRIMRYVVQAFAGTGISRHDYQAWITERIDFFKQKMYAWAKRIRRYKERSDRFNQNRLFQSDQKRIYRSWECPEQQFSGSSRPSRDLVSSFWQNIWSVPATHSEGLWFNSVQRSCESISEMDPVIICDEDVSSAIHGAPNWKAPGPDGLQNFWLKKFNCLHSVLATQFQNILDLGSLPAFMTTGVTYLLFKSGSTSEPNNYRPITCLPTLYKLLTSILKFKIMRHVSNNNILASVQNGCKPRSRGTKELLLIDMTICQQVRRVRKNISMAWVDYKKAYDSVPHSWLLRVCTLYKLHPNLCSFLHSCMSSWATRLCHMDGMDFSDSPDLIQIKRGIFQGDSLSPLWFCLALNPLSTLLRDSMLGYRLRRNGEIVSHLLYMDDVKLYAPNESDLVTLLKITHNFSNDIRMEFGIDKCAVIRVQRGQIVNSSGVDISESVFLHSLSESENYKYLGMSQGLCIADKDMKQLLTARFLGRVKKVFKSLLSGGNKARAFNSWAIPALSYSFGILKWTQTELDKLDRKVRRLMTSFRMHHPRSSVMRLYIPRKCGGRGYLNAKSLHNREVCNLRDYFVRIDDNLHRDVVSVDNGFTPLSMAKQNWRRLKVLTTPDRIAVWQSKELHGRFYRAFAGPDVDQQASISWLSFGNLFAETEGFVCAIMDEVVMTNNYRRHIIKDGTVDICRACRCPGESIRHIVSGCSRLANGEYLHRHNQVAKIIHQQLALKYGLIDSEIPYYQYQPAPVLDNGLITLYWDRSIITDRTIVANRPDLVLIDRSVRKAMIVDITIPHDDNLIKAETEKLSKYLDLAHEITSMWGVDSTIIVPIVVSVNGLIAKSFNRYLEKLSLSCWVKHLAQKAVLLETARIVRRFLSADP

SEQ ID NO: 27833 - protein, 1122 aa, Clostera curtula
MASATGGSVRRMRWSQELNENVMRAYYGATEGGTNLTAYRSRMFALFQDLNPGTTVTVQRLSDQVRAIQRLQLLAQPVLDRLRLETLSSRPVVRPQPDPAVSAIAIQPDPPLLAPAELVQNEEVNVNNQYDEQLRRALDDAILVYRDVPASDRPRLPRLPMNKHILALASVLNTFLQSHFDKSENLTETHSILYCGAVAVCRVGGVRFPNQNRLTTQMETIPAWQHRIELRINTARTIIAKLYAYKNGNSRPRVMRFVHQAFNGTGVRPQDYNAWITERIDFYKQKVQAWAKRIRRFKERSNRYKQNRLFQSDAKKVYRNWEQNSRQISLGVTPDPVRMYTFWQDIWAQPINHTEGDWMTIVRRSCEHITAMEQVIISQADIARAVRLAPNWKIPGPDGLHNFWLKRFHSSHERLATQFQNAISSKTLPTFLTNGVTYLLYKSGSTSEPKNYRPITCLPTTYKLLTSILKFKIMDHILANNTMATAQNGCKPRSRGTKELLLIDMTICQQVRRVKKNISMAWIDYKKAYDSVPHSWQSRVLDLYRLHPNLCSFLSVCMSQWTTRLCLPDMAGFSDSTGLLRIKRGIFQGDSLSPLWFCLAMNPLSTLLMDSKIGYRLRRDGEVISHLLYMDDLKLYAPKKSDLVSLLKITENFSNDIKMEFGVDKCAAIHVQRGRVVTSEELQLSENMSFRCLSESETYRYLGMAEGLGIADKEIKQALTTCFFSRPTKVLKSLLSGGNKVRAVNGWVMPALAYSFGILRWTQTELDALDRRVRRQFTLYRMHHPRSSVMRLYIPRKCGGRGFLNVKTLHNREVCNLREYFLQSTEDVHRDMANVDNSFTPLSLAKQNWPKPQVLSISDRTTIWKSKELHGRFYKALTGPGVDQLASVAWLRFSNLFGETEGFACAIMDEVIMTNNYRRHILKDGTADICRACHRPGESIRHIVSGCSRLANGEYLHRHNQVAKIVHQQLALKYSLVDTEVPYYQYQPAPVLDNGHVTLYWDRSIITDRTILANKPDIVIIDRLASRAMLVDVTIPHDENLVKAEKEKLTKYLDLAHEVTAMWHVDSTIIVPIVVSVNGLIAKSFDQHLKKLSLGCWIKGLIQKAVILDSARIVRRFLSLEP

SEQ ID NO: 27834 - protein, 962 aa, Clostera curtula
MNKHILALTSVLNTFLQFHFDKSENLTETHSILYCGAVAVCRVGGVRFPNQNRLTTQMETIPAWQLRIELRINTARTIIAKLYAYKNGNSRPRVMRFVHQAFNGTGVRPQDYSAWITERIDFYKQKVQAWAKRIRRFKERSDRYKQNRLFQSDAKKVYRNWEQNSRQISLGVTPDPVRMYTFWQDIWAQPINHTEGEWMTIVRRSCENITAMEQVIISQADIARAVRLAPNWKSPGPDGLHNFWLKRFHSSHERLATQFQNAISSKTLPTFLTNGVTYLLYKSGSTSEPKNYRPITCLPTTYKLLTSILKFKIMDHILANNIMATAQNGCKPRSRGTKELLLIDMTICQQVRRVKKNISMAWIDYKKAYDSVPHSWLSRVLDLYRLHPNLCSFLSVCMSQWTTRLCLPDMAGFSDSTDLLRIKRGIFQGDSLSPLWFCLAMNPLSTLLMDSKIGYRLRRDGEVISHLLYMDDLKLYGPKKSDLVSLLKITENFSNYIKMEFGVDKCAAIHVQRGRVVTSEELQLSENMSFRCLSESETYRYLGMAEGLGIADKEIKQSLTACFFSRLTKVLKSLLSGGNKVRAVNGWVMPALAYSFGILRWTQTELDALDRRVRRQLTLYRMHHPRSSVMRLYIPRKCGGRGFLNVKNLHNREVCNLREYFLQSTEDVHRDMANVDNSFTPLSLAKQNWRKPQVLSISDRTTIWKSKELHGRFYKALTGPDVDQLASVAWLRFSNLFGETEGFACAIMDEVIMTNNYRRHILKDGTADICRACHRPGESIRHIVSGCSRLANGEYLHRHNQVAKIVHQQLALKYSLVDTEVPYYQYQPAPVLDNGHVTLYWDRSIITDRTILANKPDIVIIDRLASRAMRIDVTIPHDENLVKAEKEKITKYLDLAHEVTAMWHVDSTIIVPIVVSVNGLIAKSFDQHLKKLSLGCWIKGLIQKAVILDSARIVRRFLSLEP

SEQ ID NO: 27835 - protein, 1207 aa, Clostera curtula
MSEFALRRNPSRRCRLRAAYGTNSARPTSSSSSSSTSANEYHTPPVTAASSDDAGSPVPPAAQSSARRGRPLPASLRSTEHTATSMASATGGSVRRMRWSQELNENVMRAYYGATGGGTNLTAYRSRMFALFQDLNPGTTVTVQRLSDQVRAIQRLQLLAQPVLDRLCLETLSTRPVVRPQPDPAVSAIAVQPDPPLPAPAELVQNEEVNVNNQYDEQLRRALDDAILVYRDVPVSDRPRLPRLPMNKHILALTSVLNTFLQFHFDKSENLTETHSILYCGAVAVCRVGGVRFPNQNRLTTQMETIPAWQHRIELRINTARTIIAKLYTYKNGNSRPRVMRFVHQAFNGTGVRPQDYSAWITERIDFYKQKVQAWAKRIRRFKERSDRYKQNRLFQSDARKVYRNWEQNSRQISLGVTPDPVRMYTFWQDIWAQPINHTEGEWMTIVRRSCENITAMEQVIISQADIARAVRLAPNWKSPGPDGLHNFWLKRFHSSHERLATQFQNAISSKTLPTFLTNGVTYLLYKSGSTSEPKNYRPITCLPTTYKLLTSILKFKIMDHILANNIMATAQNGCKPRSRGTKELLLIDMTICQQVRRVKKNISMAWIDYKKAYDSVPHSWLSRVLDLYRLHPNLCSFLSVCMSQWTTRLCLPDMAGFSDSTDLLRIKRGIFQGDSLSPLWFCLAMNPLSTLLMDSKIGYRLRRDGEVISHLLYMDDLKLYAPKKSDLVSLLKITENFSNDVKMEFGVDKCAAIHVQRGRVVTSEELQLSENMSFRCLSESETYRYLGMAEGLGIADKEIKQSLTACFFSRLTKVLKSLLSGGNKVRAVNGWVMPALAYSFGILRWTQTELDALDRRVRRQLTLYRMHHPRSSVMRLYIPRKCGGRGFLNVKNLHNREVCNLREYFLQSTEDVHRDMANVDNSFTPLSLAKQNWRKPQVLSISDRTTIWKSKELHGRFYKALTGPDVDQLASVAWLRFSNLFGETEGFACAIMDEVIMTNNYRRHILKDGTADICRACHRPGESIRHIISGCSRLANGEYLHRHNQVAKIVHQQLALKYSLVDTEVPYYQYQPAPVLDNGHVTLYWDRSIITDRTILANKPDIVIIDRSASRAMLVDVTIPHDENLVKAEKEKLTKYLDLAHEVTAMWHVDSTIIVPIVVSVNGLIAKSFDQHLKKLSLGCWIKGLIQKAVILDSARIVRRFLSLEP

SEQ ID NO: 27836 - protein, 1205 aa, Clostera curtula
MSAPRRNPSRRCRSRAAYGTYSARPTPSSSSSPTSGNEYHTPPVTAASSDDAGSPVPPAAQSSARRGRPLPASLRSTEHNATSMASATGGSVRRMRWSQQLNENVMRAYYGATEGGTNLTAYHSRMFALFQDLNPGTTVTVQRLSDQVRAIQRLQLLAQPVLDRLRLETLSSHPVVRPQPDPAVPAIAEQPDPMPLALAESLQNEEVNVNNQYNEQLRRALDDAILEYRDVPPSDRPRLPRLPMTKHNLALTSILDKILPSYFSTTENLTETHSILYCGAVAVCRVGGVRFPNHNRPTPQTTTTPAWQYRIEKRINAARTIIAKLLTFRSGNNRPRVMRFVHQAFEGTGIRPQEYTASVTERMDFYKQKVQAWAKRIRRFKKRSDRYNQNRLFQSDAKKVYRNWEQNSRQMSPGVTPDPVGMYSFWQDIWSQPVIHSEGEWMSVVRRACEPITAMGPINVDEADIARAVSSAPNWKSPGPDSLHNFWLKRFHSSHVRLATQFQNAIATGSLPTFLTTGVTYLLYKSGSTSEPKNYRPITCLPTTYKLLTSILKFKIMEHILANNIMAPVQNGCKPRSRGTKELLLIDMTICQQVRRVKKNISMAWIDYKKAYDSVPHSWLSRVLDLYRLHPNLCSFLSVCMSQWTTRLCLSDMAGFSDSTGLLRIKRGIFQGDSLSPLWFCLAMNPLSTLLMNSKIGYRLRRDGEVISHLLYMDDLKLYAPKKSDLVSLLKITENFSKDIKMEFGIDKCAAIHVQRGRVVTSEELQLSENMSLRCLSESETYRYLGMAEGLGIADKEIKQALTTCFFSRLTKVLKSLLSGGNKVRAVNGWVMPALAYSFGILRWTQTELDALDRRVRRQLTLYRMHHPRSSVMRLYIPRKCGGRGFLNIKNLHNREVCNLREYFLQSTEDVHRDMANVDNSFTPLSLAKQNWRKLQVLSISDRTTIWKSKELHGRFYKALTGPDVDQLASVTWLRFSNLFGETEGFACAIMDEVIMTNNYRRHILKDGTADICRACHRPGESIRHIVSGCSRLANGEYLHRHNQVAKIVHQQLALKYSLVDTEVPYYQYQPAPVLDNGHVTLYWDRSIITDRTIPANKPDIVIIDRLASRAMLVDVTIPHDENLVKAEKEKLTKYLDLAHEVTAMWHVDSTIIVPIVVSVNGLIAKSFDQHLKKLSLSCWIKGLIQKAVILDSARIVRRFLSLEP

SEQ ID NO: 27837 - protein, 1205 aa, Clostera curtula
MSAPRRNPSRRCRSRAAYGTYSARPTPSSSSSPTSGNEYHTPPVTAASSDDAGSPVPPAAQSSARRGRPLPASLRSTEHNATSMASATGGSVRRMRWSQQLNENVMRAYYGATEGGTNLTAYRSRMFALFQDLNPGTTVTVQRLSDQVRAIQRLQLLAQPVLDRLRLETLSSHPVVRPQPDPAVPAIAEQPDPLPLALAESLQNEEVNVNNQYNEQLRRALDDAILEYRDVPPSDRPRLPRLPMTKHNLALTSILDKILPSYFSTTENLTETHSILYCGAVAVCRVGGVRFPNHNRPTPQTTTTPAWQYRIEKRINAARTIIAKLLTFRSGNNRPRVMRFVHQAFEETGIRPQEYTASVTERMDFYKQKVQAWAKRIRRFKKRSDRYNQNRLFQSDAKKVYRNWEQNSRQMSPGVTPDPVGMYSFWQDIWSQPVIHSEGEWMSVVRRACEPITAMGPINVDEADIARAVSSAPNWKSPGPDSLHNFWLKRFHSSHVRLATQFQNAIATGSLPTFLTTGVTYLLYKSGSTSEPKNYRPITCLPTTYKLLTSILKFKIMEHILANNIMAPVQNGCKPRSRGTKELLLIDMTICQQVRRVKKNISMAWIDYKKAYDSVPHSWLSRVLDLYRLHPNLCSFLSVCMSQWTTRLCLPDMAGFSDSTGLLRIKRGIFQGDSLSPLWFCLAMNPLSTLLIDSKIGYRLRRDGEVISHLLYMDDLKLYAPKKSDLVSLLKITENFSKDIKMEFGIDKCAAIHVQRGRVVTSEELQLSENMSLRCLSESETYRYLGMAEGLGIADKEIKQALTTCFFSRLTKVLKSLLSGGNKVRAVNGWVMPALAYSFGILRWTQTELDALDRRVRRQLTLYRMHHPRSSVMRLYIPRKCGGRGFLNVKNLHNREVCNLREYFLQSTEDVHRDMANVDNSFTPLSLAKQNWRKPQVLSISDRTTLRKSKELHGRFYKALTGPDVDQLASVAWLRFSNLFGETEGFACAIMDEVIMTNNYRRHILKDGTADICRACHRPGESIRHIVSGCSRLANGEYLHRHNQVAKIVHQQLALKYSLVDTEVPYYQYQPAPVLDNGHVTLYWDRSIITDRTILANKPDIAIIDRLASRAMLVDVTIPHDENLVKAEKEKLTKYLDLAHEVTAMWHVDSTIIVPIVVSVNGLIAKSFDQHLKKLSLGCWIKGLIQKAVILDSARIVRRFLSLEP

SEQ ID NO: 27838 - protein, 1207 aa, Clostera curtula
MSEFALRRNPSRRCRLRAAYGTNSARPTSSSSSSSTSANEYHTPPVTAASSDDAGSPVPPAAQSSARRGRPLPASLRSTEHTATSMASATGGSVRRMRWSQELNENVMRAYYGATGGGTNLTAYRSRMFALFQDLNPGTTVTVQRLSDQVRAIQRLQLLAQPVLDRLRLETLSTRPVVRPQPDPAVSAIAVQPDPPLPAPAELVQNEEVNVNNQYDEQLRRALDDAILVYRDVPVSDRPRLPRLPMNKHILALTSVLNTFLQFHFDKSENLTETHSILYCGAVAVCRVGGVRFPNQNRLTTQMETIPAWQHRIELRINTARTIIAKLYTYKNGNSRPRVMRFVHQAFNGTGVRPQDYSAWITERIDFYKQKVQAWAKRIRRFKERSDRYKQNRLFQSDARKVYRNWEQNSRQISLGVTPDPVRMYTFWQDIWAQPINHTEGEWMTIVRRSCENITAMEQVIISQADIARAVRLAPNWKSPGPDGLHNFWLKRFHSSHERLATQFQNAISSKTLPTFLTNGVTYLLYKSGSTSEPKNYRPITCLPTTYKLLTSILKFKIMDHILANNIMATAQNGCKPRSRGTKELLLIDMTICQQVRRVKKNISMAWIDYKKAYDSVPHSWLSRVLDLYRLYPNLCSFLSVCMSQWTTRLCLPDMAGFSDSTDLLRIKRGIFQGDSLSPLWFCLAMNPLSTLLMDSKIGYRLRRDGEVISHLLYMDDLKLYAPKKSDLVSLLKITENFSNDVKMEFGVDKCAAIHVQRGRVVTSEELQLSENMSFRCLSESETYRYLGMAEGLGIADKEIKQSLTACFFSRLTKVLKSLLSGGNKVRAVNGWVMPALAYSFGILRWTQTELDALDRRVRRQLTLYRMHHPRSSVMRLYIPRKCGGRGFLNVKNLHNREVCNLREYFLQSTEDVHRDMANVDNSFTPLSLAKQNWRKPQVLSISDRTTIWKSKELHGRFYKALTGPDVDQLASVAWLRFSNLFGETEGFACAIMDEVIMTNNYRRHILKDGTADICRACHRPGESIRHIISGCSRLANGEYLHRHNQVAKIVHQQLALKYSLVDTEVPYYQYQPAPVLDNGHVTLYWDRSIITDRTILANKPDIVIIDRSASRAMLVDVTIPHDENLVKAEKEKLTKYLDLAHEVTAMWHVDSTIIVPIVVSVNGLIAKSFDQHLKKLSLGCWIKGLIQKAVILDSARIVRRFLSLEP

SEQ ID NO: 27839 - protein, 1080 aa, Clostera curtula
MFALFQDLNPGTTVTVQRLSDQVRAIQRLQLLAQPVLDRLRLETLSSRPVVRPQPDPAVSAIAVQPDPPLVAPAELVQNEEVNVNNQYDEQLRRALDDAILVYRDVPASDRPRLPRLPMNKHILALTSVLNTFLQSHFDKSENLTETHSILYCGAVAVCRVGGVRFPNQNRPTTQMETIPAWQHRIELRINTARTIIAKLYTYKNGNSRPRVMRFVHQAFNGTGVRPQDYSAWITERIDFYKQKVQAWAKRIRRFKERSDRYKQNRLFQSDAKKVYRNWEQNSRQISLGVTPDPVRMYTFWQDIWAQPINHTEGEWMTIVRRSCEHITAMEQVIISQADIARALRLAPNWKSPGPDGLHNFWLKRFHSSHERLATQFHNAISSKTLPTFLTNGVTYLLYKSGSTSEPKNYRPITCLPTTYKLLTSILKFKIMDHILANNIMATAQNGCKPRSRGTKELLLIDMTICQQVRRVKKNISMAWIDYKKAYDSVPHSWLSRVLDLYRLHPNLCSFLSVCMSQWTTRLCLPDMAGFSDSTGLLRIKRGIFQGDSLSPLWFCLAMNPLSTLLMDSKIGYLLRRDGEVISHLLYMDDLKLYAPKKSDLVSLLKITENFSNDIKMEFGVDKCAAIHVQRGRVVTSEELQLSENMSFRCLSESETYRYLGMAEGLGIADKEIKQALTTCFFSRLTKVLKSLLSGGNKVRAVNGWVMPALAYSFGILRWTQTELDALDRGVRRQLTLYRMHHPRSSVMRLYIPRKCGGRGFLNVKNLHNREVCNLREYFLQSTEDVHRDMANVDNSFTPLSLAKQNWRKPQVLSISDRTTIWKSKELHGRFYKALTGPDVDQLASVAWLRFSNLFGETEGFTCAIMDEVIMTNNYRRHILKDGTADICRACHRPGESIRHIVSGCSRLANGEYLHRHNQVAKIVHQQLALKYSLVDTEVPYYQYQPAPVLDNGHVTLYWDRSIITDRTILANKPDIVIIDRSASRAMLVDVTIPHDENLVKAEKEKLTKYLDLAHEVTAMWHVDSTIIVPIVVSVNGLIAKSFDQHLKKLSLGCWIKGLIQKAVILDSARIVRRFLSLEP

SEQ ID NO: 27840 - protein, 1201 aa, Clostera curtula
MATRRNPNRRCKQAAHLGARLPSPQVSSCSSNEEFFTPTSGTSSDETEVQTASAPRRPVRRGRPPLPARLGPSEQTGPSTAPATGGSVRRMRWSQQINENVMRAYYGATEGGTNLTAYRSRMFALFQDLNPGTTVTVQRLSDQVRAIQRLQLLAQPVLDRLRLETLSSRPVVHPQPDPAISAIAVQPDPLILAPAELVQSEEVNVNNQYNEQLRRALDDAILEYRDVLPTDRPRLPRLPMTKHNLALTSILDKILPTYFNIFENLTETHSILYCGAVAVCRVGGVRFPNLNRPTPQATITPAWLYRIEKRINAARTIIAKLLTFRSGNNRPRVMRFVHQAFEGTGIRPQDYTASVTERMDFYKQKVQAWAKRIRRFKMRSNRYNQNRLFQSDAKKVYRNWEQNSRQMSPGVTPDPVGMYSFWQDIWSQPVIHSEGEWMSVIRRACEPITAMGPINVDEADIARAVSSAPNWKSPGPDSLHNFWLKRFHSSHVRLATQFQNAIASGSLPTFLTTGVTYLLYKSGSTSEPKNYRPITCLPTTYKLLTSILKFKIMEHILANNIMASVQNGCKPRSRGTKELLLIDMTICQQVRRVKKNISMAWIDYKKAYDSVPHSWLSRVLDLYRLHPNLCSFLSVCMSQWTTRLCLPDMAGFSDSTGLLRIKRGIFQGDSLSPLWFCLAMNPLSTLLMHSKIGYRLRSGGEVISHLLYMDDLKLYAPKKSDLVSLLKITENFSNDIKMEFGVDKCAAIHVQRGRVVTSEELQFSQNMSLRCLSESETYRYLGMAEGLGIADKEIKQSLTACFFSRLTKVLKSLLSGGNKVRAVNGWVMPALAYSFGILRWTQTELDALDRKVRRQLTLYRMHHPRSSVMRLYIPRKCGGRGFLNVKNLHNREVCNLREYFLQPTEGVHRDMANVDNSFTPLSLAKQNWRKPQVLSISDRTTIWKSKELHGRFYKALTGPDVDQLASVAWLRFSNLFGETEGFACAIMDEVIMTNNYRRHILKDGTADICRACHRPGESIRHIVSGCSRLANGEYLHRHNQVAKIVHQQLALKYSLVDTEVPYYQYQPAPVLDNGHVTLYWDRSIITDRTIPANKPDIVIIDRSASRAMLVDVTIPHDENLVKAEKEKLTKYLDLAHEVTAMWHVDSTIIVPIVVSVNGLIAKSFDQHLKKLSLGCWIKGLIQKAVILDSARIVRRFLSLEP

SEQ ID NO: 27841 - protein, 962 aa, Clostera curtula
MTKHNLALTSILDKILPPYFSTTENLTETHSILYCGAVAVCRVGGVRFPNHNRPTPQTTTTPAWQYRIEKRINAARSIIAKLLTFRSGNNRPRVMRFVHQAFEGTGIRPQEYTASVTERMDFYKQKVQAWAKRIRRFKKRSDRYNQNRLFQSDAKKVYRNWEQNSRQMSPGVTPDPVGMYSFWQDIWSQPVIHSEGEWMSVVRRACEPITAMGPINVDEADIARAVSSAPNWKSPGPDSLHNFWLKRFHSSHVRLATQFQNAIATGSLPTFLTTGVTYLLYKSGSTSEPKNYRPITCLPTTYKLLTSILKFKIMEHILANNIMAPVQNGCKPRSRGTKELLLIDMTICQQVRRVKKNISMAWIDYKKAYDSVPHSWLSRVLDLYRLHPNLCSFLSVCMSQWTTRLCLPDMAGFSDSTGLLRIKRGIFQGDSLSPLWFCLAMNPLSTLLMDSKIGYRLRRDGEVISHLLYMDDLKLYAPKKSDLVSLLKITENFSKDIKMEFGVDKCAAIHVQRGRVVTSEELQLSENMSLRCLSESETYRYLGMAEGLGIADKEIKQSLTASFLSRLTKVLKSLLSGGNKARAVNGWVMPALAYSFGILRWTQSELDALDRKVRRQLTLYRMHHPRSSVMRLYIPRKCGGRGYLNVKNLHNREVCNLREYFLQSTEDVHRDVANVDNSFTPLSLAKQNWRKPQVLSISDRTTIWKSKELHGRFYKALTGPDVDQLASVAWLRFSNLFGETEGFACAIMDEVIMTNNYRRHILKDGTADICRACHRPGESIRHIVSGCSRLANGEYLHRHNQVAKIVHQQLALKYSLVDTEVPYYQYQPAPVLDNGHVTLYWDRSIITDRTIPANKPDIVIIDRLASRAMLVDVTIPHDENLVKAEKDKLTKYLDLAHEVTAMWHVDSTIIVPIVVSVNGLIAKSFDQHLKKLSLSCWIKGLIQKAVILDSARIVRRFLSLEP

SEQ ID NO: 27842 - protein, 1121 aa, Clostera curtula
MTPATGGVVRRMRWTLQLNESVMRAYYGATQGGTVLTAYRSRMLSLFQELNPTTTITAQRLSDQVRAIQRLNLLEQPVLDRLRLESLSALPAVNQRSVMSRAVTASVGSITQEPAESTHIDEVSVTNQFSEKLRSALEEAILEFRDIPISARPRLPRLPTHTQNIVLVGVLNNILKSYIHTCSTLSETHSLLYCGAIAACRVGGARFLNFHSSNRRTNTIPLWQCRIQKKIDSARTTIAKLYAFRMGNSRPRIMRYVVQAFAGTGISRHDYQAWITERIDFFKQKMYAWAKRIRRYKERSDRFNQNRLFQSDQKRIYRSWECPEQQFSGSSRPSRELVSSFWQNIWSVPATHSEGLWFNSVERSCDSISEMDPVIICDEDVSSAIHGAPNWKAPGPDGLQNFWLKKFNCLHSVLATQFQNILDLGSLPAFMTTGVTYLLFKSGSTSEPNNYRPITCLPTLYKLLTSILKFKIMRHVSNNNILASVQNGCKPRSRGTKELLLIDMTICQQVRRVRKNISMAWVDYKKAYDSVPHSWLLRVCTLYKLHPILCSFLHSCMSSWATRLCHMDGMDFSDSPDLIQIKRGIFQGDSLSPLWFCLALNPLSTLLRDSMLGYRLRRNGEIVSHLLYMDDVKLYAPNESDLVTLLKITHNFSNDIRMEFGIDKCAVIRVQRGQIVNSSGVDISESVFLHSLSESENYKYLGMSQGLCIADKDMKQLLTARFLGRVKKVFKSLLSGGNKARAFNSWAIPALSYSFGILKWTQTELDKLDRKVRRLMTSFRMHHPRSSVMRLYIPRKCGGRGYLNAKSLHNREVCNLRDYFVRIDDNLHRDVVSVDNGITPLSMAKQNWRRLKVLTTPDRIAVWQSKELHGRFYRAFTGPDVDQQASISWLSFGNLFAETEGFVCAIMDEVVMTNNYRRHIIKDGTVDICRACRCPGESIRHIVSGCSRLANGEYLHRHNQVAKIIHQQLALKYGLIDSEIPYYQYQPAPVLDNGLITLYWDRSIITDRTIVANRPDLVLIDRSVRKAMIVDITIPHDDNLIKAETEKLSKYLDLAHEITSMWGVDSTIIVPIVVSVNGLIAKSFNRYLEKLSLSCWVKHLAQKAVLLETARIVRRFLSADP

SEQ ID NO: 27843 - protein, 868 aa, Clostera curtula
MRFVHQAFNGTGVRPQDYNAWITERIDFYKQKVQAWAKRIRRFKERSNRYKQNRLFQSDAKKVYRNWEQNSRQISLGVTPDPVRMYTFWQDIWAQPINHTEGDWMTIVRRSCEHITAMEQVIISQADIALAVRLAPNWKSPGPDGLHNFWLKRFHSSHERLATQFQNAISSKTLPTFLTNGVTYLLYKSGSTSEPKNYRPITCLPTTYKLLTSILKFKIMDHILANNIMATAQNGCKPRSRGTKELLLIDMTICQQVRRVKKNISMAWIDYKKAYDSVPHSWLSRVLDLYRLHPNLCSFLSVCMSQWTTRLCLPDMAGFSDSTGLLRIKRGIFQGDSLSPLWFCLAMNPLSTLLMDSKIGYRLRRDGEVISHLLYMDDLKLYAPKKSDLVSLLKITENFSNDIKMEFSVDKCAAIHVQRGRVVTSEELQLSENMSFRCLSESETYRYLGMAEGLGIADKEIKQALTTCFFSRLTKVLKSLLSGGNKVRAVNGWVMPALAYSFGILRWTQTELDALDRRVRRQFTLYRMHHPRSSVMRLYIPRKCGGRGFLNVKTLHNREVCNLREYFLQSTEDVHRDMANVDNSFTPLSLAKQNWRKPQVLSISDRTTIWKSKELHGRFYKALTGPDVDQLASVAWLRFSNLFGETEGFACAIMDEVIMTNNYRRHILKDGTADICRACHRPGESIRHIVSGCSHLANGEYLHRHNQVAKIVHQQLALKYSLVDTEVPYYQYQPAPVLDNGHVTLYWDRSIITDRTILANKPDIVIIDRLASRAMLVDVTIPHDENLVKAEKEKLTKYLDLAHEVTAMWHVDSTIIVPIVVSVNGLIAKSFDQHLKKLSLGCWIKGLIQKAVILDSARIVRRFLSLEP

SEQ ID NO: 27844 - protein, 1206 aa, Clostera curtula
MSQHTRRNPQRQCRLRAAYGTASARLTPQSSSSPSSEDEYHTPPVTAASSDDTGSPVPPAPRCSARRGRPLPASLMSTEQIATSMTSATGGSVRRMRWSQELNENVMRAYYRATEGGTNLTAYRSRMFALFQDLNPGTTLTVQRLSDQVRAIQRLQLLAQPVLDRLRLETLSSRPVVRTQPDPAISAIAVQPDPPLLAPAELVQSEEVNVNNQYNEQLRRALDDAILEYRDVRPSDRPRLPRLPMTKHNLALTSILDKILPSYFNTTENLTETHSILYCGAVAVCRVGGVRFPNLNRPTPQTTTTPAWQYRIEKRINAARTIIAKLLTFRSGNNRPRVMRFVHQAFEGTGIRPQDYTASVTERMDFYKQKVQAWAKRIRRFKKRSDRYIQNRLFQSDAKKVYRNWEENSGQMSPGVTPDPAGMYSFWQDIWSEPVIHSEGEWMSVVRRACEPITAMGPINIDEADIARAVSLAPNWKSPGPDSLHNFWLKRFHSSHVRLATQFQNAIATGSLPTFLTTGVTYLLYKSGSTSEPKNYRPITCLPTTYKLLTSILKFKIMEHILANNIMAPVQNGCKPRSRGTKELLLIDMTICQQVRRVKKNISMAWIDYKKAYDSVPHSWLSRVLDLYRLHPNLCSLLSVCMSQWTTRLCLPVMAGFSDSTGLLRIKRGIFQGDSLSPLWFCLAMNPLSTLLMDSKIGYRLRRDGEVISHLLYMDDLKLYAPKKSDLVSLLKITEIFSKDIKMEFGVDKCAAIHVQRGRVVTSEELQLSENMSLRCLSESETYRYLGMAEGLGIADKEIKQSLTACFLSRLTKVLKSLLSGGNKARAVNGWVMPALAYSFGILRWTQSELDALDRKVRRQLTLYRMHHPRSSVMRLYIPRKCGGRGFLNVKNLHNREVCNLREYFLQSTEDVHRDMANVDNSFTPLSLAKQNWRKPQVLSISDRTTIWKSKELHGRFYKALTGPDVDQLASVAWLRFSNIFGETEGFACAIMDEVIMTNNYRRHILKDGTADICRACHRPGESIRHIVSGCSRLANGEYLHRHNQVAKIVHQQLALKYSLVDTEVPYYQYQPAPVLDNGHVTLYWDRSIITDRTIPANKPDIVIIDRSASRAMLVDVTIPHDENLVKAEKEKLTKYLDLAHEVTAMWHVDSTIIVPIVVSVNGLIAKSFDQHLKKLSLSFWIKGLIQKAVILDSARIVRRFLSLEP

SEQ ID NO: 27845 - protein, 1206 aa, Clostera curtula
MSQHTRRNPQRQCRLRAAYGTASARLTPQSSSSPSSEDEYHTPPVTAASSDDTGSPVPPAPRCSARRGRPLPASLMSTEQIATSMTSATGGSVRRMRWSQQLNENVMRAYYGATEGGTNSTAYRSRMFALFQDLNPGTTVTVQRLSDQVRAIQRLQLLAQPVLDRLRLETLSSHPVVCPQPDPAVPAIAEQPDPLPLALAESLQNEEVNVNNQYNEQLRRALDDAILDYRDVPPSDRPRLPRLPMTKHNLALTSILDKILPSYFSTTENLTETHSILYCGAVAVCRVGGVRFPNHNRPTPQTTTTPAWQYRIEKRINAARTIIAKLLTFRSGNNRPRVMRFVHQAFEGTGIRPQEYTASVTERMDFYKQKIQAWAKRIRRFKKRSDRYNQNRLFQSDAKKVYRNWEQNSRQMSPGVTPDPVGMYSFWQDIWSQPVIHSEGEWMSVVRRACEPITAMGPINVDEADIAREISSAPNWKSPGPDSLHNFWLKRFHSSHVRLATQFQNAIATGSLPTFLTTGVTYLLYKSGSTSEPKNYRPITCLPTTYKLLTSILKFKIMEHILANNIMAPVQNGCKPRSRGTKELLLIDMTICQQVRRVKKNISMAWIDYKKAYDSVPHSWLSRVLDLYRLHPNLCSFLSVCMSQWTTRLCLPDMAGFSDSTGFLRIKRGIFQGDSLSPLWFCLAMNPLSTLLMDSKIGYRLRRDGEVISHLLYMDDLKLYAPKKSDLVSLLKITENFSKDIKMEFGVDKCAAIHVQRGRVVTSEELQLSENMSLRCLSESETYRYLGMAEGLGIADKEIKQSLTACFLSRLTKVLKSLLSGGNKARAVNGWVMPALAYSFGILRWTQSELDALDRKVRRQLTLYRMHHPRSSVMRLYIPRKCGGRGYLNVKNLHNREVCNLREYFLQSTEDVHRDVANVDNSFTPLSLAKQNWRKPQVLSISDRTTIWKCKELHGRFYKALTGPDVDQLASVAWLRFSNLFGETEGFACAIMDEVIMTNNYRRHILKDGTADICRACHRPGESIRHIVSGCSRLANGEYLHRHNQVAKIVHQQLALKYSLVDTEVPYYQYQPAPVLDNGHVTLYWDRSIITDRTIPANKPDIVIIDRLASRAMLVDVTIPHDENLVKAEKEKLTKYLDLAHEVTAMWHVDSTIIVPIVVSVNGLIAKSFDQHLKKLSLSCWIKGLIQKAVILDSARIVRRFLSLEP

SEQ ID NO: 27846 - protein, 962 aa, Clostera curtula
MNKHILALTSVLNTFLQSHFDKSENLTETHSILYCGAVAVCRVGGVRFPNQNRPTTQMETIPAWQHRIELRINTARTIIAKLYTYKNGNSRPRVMRFVHQAFNGTGVRPQDYSAWITERIDFYKQKVQAWAKRIRRFKERSDRYKQNRLFQSDAKKVYRNWEQNSRQISLGVTPDPVRMYTFWQDIWAQPINHTEGEWMTIVRRSCEHITAMEQVIISQADIARALRLAPNWKSPGPDGLHNFWLKRFHSSHERLATQFHNAISSKTLPTFLTNGVTYLLYKSGSTSEPKNYRPITCLPTTYKLLTSILKFKIMDHILANNIMATAQNGCKPRSRGTKELLLIDMTICQQVRRVKKNISMAWIDYKKAYDSVPHSWLSRVLDLYRLHPNLCSFLSVCMSQWTTRLCLPDMAGFSDSTGLLRIKRGIFQGDSLSPLWFCLAMNPLSTLLMDSKIGYLLRRDGEVISHLLYMDDLKLYAPKKSDLVSLLKITENFSNDIKMEFGVDKCAAIHVQRGRVVTSEEFQLSENMSFRCLSESETYRYLGMAEGLGIADKEIKQALTTCFFSRLTKVLKSLLSGGNKVRAVNGWVMPALAYSFGILRWTQTELDALDRRVRRQLTLYRMHHPRSSVMRLYIPRKCGGRGFLNVKNLHNREVCNLREYFLQSTEDVHRDMANVDNSFTPLSLAKQNWRKPQVLSISDRTTIWKSKELHGRFYKALTGPDVDQLASVAWLRFSNLFGETEGFTCAIMDEVIMTNNYRRHILKDGTADICRACHRPGESIRHIVSGCSRLANGEYLHRHNQVAKIVHQQLALKYSLVDTEVPYYQYQPAPVLDNGHVTLYWDRSIITDRTILANKPDIVIIDRSASRAMLVDVTIPHDENLVKAEKEKLTKYLDLAHEVTAMWHVDSTIIVPIVVSVNGLIAKSFDQHLKKLSLGCWIKGLIQKAVILDSARIVRRFLSLEP

SEQ ID NO: 27847 - protein, 962 aa, Clostera curtula
MTKHNLALTSILDKILPSYFNTTENLTETHSILYCGAVAVCRVGGVRFPNLNRPTPQTTTTPAWQYRIEKRINAARTIIAKLLTFRSGNNRPRVMRFVHQAFEGTGIRPQDYTASVTERMDFYKQKVQAWAKRIRRFKKRSDRYNQNRLFQSDAKKVYRNWEENSGQMSPGVTPDPAGMYSFWQDIWSEPVIHSEGEWMSVVRRACEPITAMGPVNIDEADIARAVSSAPNWKSPGPDSLHNFWLKRFHSSHVRLATQFQNAIATGSLPTFLTTGVTYLLYKSGSTSEPKNYRPITCLPTTYKLLTSILKFKIMEHILANNIMAPVQNGCKPRSRGTKELLLIDMTICQQVRRVKKNISMAWIDYKKAYDSVPHSWLSRVLDLYRLHPNLCSFLSVCMSQWTTRLCLPVMAGFSDSTGLLRIKRGIFQGDSLSPLWFCLAMNPLSTLLMDSKIGYRLRRDGEVISHLLYMDDLKLYAPKKSDLVSLLKITEIFSKDIKMEFGVDKCAAIHVQRGRVVTSEELQLSENMSLRCLSESETYRYLGMAEGLGIADKEIKQSLTACFLSRLTKVLKSLLSGGNKARAVNGWVMPALAYSFGILRWTQSELDALDRKVRRQLTLYRMHHPRSSVMRLYIPRKCGGRGFLNVKNLHNREVCNLREYFLQSTEDVHRDMANVDNSFTPLSLAKQNWRKPQVLSISDRTTIWKSKELHGRFYKALTGPDVDQLASVAWLRFSNIFGETEGFACAIMDEVIMTNNYRRHILKDGTADICRACHRPGESIRHIVSGCSRLANGEYLHRHNQVAKIVHQQLALNYSLVDTEVPYYQYQPAPVLDNGHVTLYWDRSIITDRTIPANKPDIVIIDRSASRAMLVDVTIPHDENLVKAEKEKLTKYLDLAHEVTAMWHVDSTIIVPIVVSVNGLIAKSFDQHLKKLSLSFWIKGLIQKAVILDSARIVRRFLSLEP

SEQ ID NO: 27848 - protein, 1206 aa, Clostera curtula
MSQHTRRNPQRQCRLRAAYGTASARLTPQSSSSPSSEDEYHTPPVTAASSDDTGSPVPPAPRCSARRGRPLPASLMSTEQIATSMTSATGGSVRRMRWSQQLNENVMRAYYGATEGGTNLTAYRSRMFALFQDLNPGTTVTVQRLSDQVRAIQRLQLLAQPVLDRLRLETLSSHPVVRPQPDPAVPAIAEQPDPLPLALAESLQNEEVNVNNQYNEQLRRALDDAILDYRDVPPSDRPRLPRLPMTKHNLALTSILDKILPSYFSTTENLTETHSILYCGAVAVCRVGGVRFPNHNRPTPQTTTTPAWQYRIEKRINAARTIIAKLLTFRSGNNRPRVMRFVHQAFEGTGIRPQEYTASVTERMDFYKQKIQAWAKRIRRFKKRSDRYNQNRLFQSDAKKVYRNWEQNSRQMSPGVTPDPVGMYSFWQDIWSQPVIHSEGEWMSVVRRACEPITAMGPINVDEADIARAISSAPNWKSPGPDSLHNFWLKRFHSSHVRLATQFQNAIATGSLPTFLTTGVTYLLYKSGSTSEPKNYRPITCLPTTYKLLTSILKFKIMEHILANNIMAPVQNGCKPRSRGTKELLLIDMTICQQVRRVKKNISMAWIDYKKAYDSVPHSWLSRVLDLYRLHPNLCSFLSVCMSQWTTRLCLPVMAGFSDSTGLLRIKRGIFQGDSLSPLWFCLAMNPLSTLLMDSKIGYRLRRDGEVISHLLYMDDLKLYAPKKSDLVSLLKITENFSKDIKMEFGVDKCAAIHVQRGRVVTSEELQLSENMSLRCLSESETYRYLGMAEGLGIADKEIKQSLTACFLSRLTKVLKSLLSGGNKARAVNGWVMPALAYSFGILRWTQSELDALDRKVRRQLTLYRMHHPRSSVMRLYIPRKCGGRGYLNVKNLHNREVCNLREYFLQSTEDVHRDVANVDNSFTPLSLAKQNWRKPQVLSISDRTTIWKSKELHGRFYKALTGPDVDQLASVAWLRFSNLFGETEGFACAIMDEVIMTNNYRRHILKDGTADICRACHRPGESIRHILSGCSRLANGEYLHRHNQVAKIVHQQLALKYSLVDTEVPYYQYQPAPVLDNGHVTLYWDRSIITDRTIPANKPDIVIIDRLASRAMLVDVTIPHDENLVKAEKEKLTKYLDLAHEVTAMWHVDSTIIVPIVVSVNGLIAKSFDQHLKKLSLSCWIKGLIQKAVILDSARIVRRFLSLEP

SEQ ID NO: 27849 - protein, 1207 aa, Clostera curtula
MSDSAPRRNPSRRCRLRSAYGTNCARPTSSSSSSPTSGNEYHTPPVTAASSDDAGSPVPPAAQSSARRGRPLPASLRSTEHTATSMASATGGSVRRMRWSQELNEKVMRAYYGATEGGTNLTAYRSRMFALFQDLNPGTTVTVQRLSDQVRAIQRLQLLAQPVLDRLRLETLSSRPVVRPQPNPAVSAIAVQPDPPLVAPAELVQNEEVNVNNQYDEQLRRALDDAILVYRDVPASDRPRLPRLPMNKHILALTSVLNTFLQSHFDKSENLTETHSILYCGAVAVCRVGGARFPNQNRPTTQMETIPAWQHRIELRINTARTIIAKLYTYKNGNSRPRVMRFVHQAFNGTGVRPQDYSAWITERIDFYKQKVQAWAKRIRRFKERSDRYKQNRLFQSDAKKVYRNWEQNSRQISLGVTPDPVRMYTFWQDIWAQPINHTEGEWMTIVRRSCEHITAMEQVIISQADIARALRLAPNWKSPGPDGLHNFWLKRFHSSHERLATQFHNAISSKTLPTFLTNGVTYLLYKSGSTSEPKNYRPITCLPTTYKLLTSILKFKIMDHILANNIMATAQNGCKPRSRGTKELLLIDMTICQQVRRVKKNISMAWVDYKKAYDSVPHSWLSRVLDLYRLHPNLCSFLSVCMSQWTTRLCLPDMAGFSDSTGLLRIKRGIFQGDSLSPLWFCLAMNPLSTLLMDSKIGYLLRRDGEVISHLLYMDDLKLYAPKKSDLVSLLKITENFSNDIKMEFGVDKCAAIHVQRGRVVTSEELQLSENMSFRCLSESETYRYLGMAEGLGIADKEIKQALTTCFFSRLTKVLKSLLSGGNKVRAVNGWVMPALAYSFGILRWTQTELDALDRRVRRQLTLYRMHHPRSSVMRLYIPRKCGGRGFLNVKNLHNREVCNLREYFLQSTEDVHRDMANVDNSFTPLSLAKQNWRKPQVLSISDRTTIWKSKELHGRFYKALTGPDVDQLASVAWLRFSNLFGETEGFACAIMDEVIMTNNYRRHILKDGTADICRACHRPGESIRHIVSGCSRLANGEYLHRHNQVAKIVHQQLALKYSLVDTEVPYYQYQPAPVLDNGHVTLYWDRSIITDRTILANKPDIVIIDRSASRAMLVDVTIPHDENLVKAEKEKLTKYLDLAHEVTAMWHVDSTIIVPIVVSVNGLIAKSFDQHLKKLSLGCWIKGLIQKAVILDSARIVRRFLSLEP

SEQ ID NO: 27850 - protein, 868 aa, Clostera curtula
MRFVHQAFEGTGIRPQDYTASVTERMDFYKQKVQAWAKRIRRFKMRSNRYNQNRLFQSDAKKVYRNWEQNSRQMSPGVTPDPVGMYSFWQDIWSQPVIHSEGEWMSVIRRACEPITAMGPINVDEADIARAVSSAPNWKSPGPDSLHNFWLKRFHSSHVRLATQFQNAIASGSLPTFLTTGVTYLLYKYGSTSEPKNYRPITCLPTTYKLLTSILKFKIMEHILANNIMASVQNGCKPRSRGTKELLLIDMTICQQVRRVKKNISMAWIDYKKAYDSVPHSWLSRVLDLYRLHPNLCSFLSVCMSQWTTRLCLPDMAGFSDSTGLLRIKRGIFQGDSLSPLWFCLAMNPLSTLLMHSKIGYRLRSGGEVISHLLYMDDLKLYAPKKSDLVSLLKITENFSNDIKMEFGVDKCAAIHVQRGRVVTSEELQLSQNMSLRCLSESETYRYLGMAEGLGIADKEIKQSLTACFFSRLTKVLKSLLSGGNKVRAVNGWVMPALAYSFGILRWTQTELDALDRKVRRQLTLYRMHHPRSSVMRLYIPRKCGGRGFLNVKNLHNREVCNLREYFLQPTEGVHRDMANVDNSFTPLSLAKQNWRKPQVLSISDRTTIWKSKELHGRFYKALTGPDVDQLASVAWLRFSNLFGETEGFACAIMDEVIMTNNYRRHILKDGTADICRACHRPGESIRHIVSGCSRLANGEYLHRHNQVAKIVHQQLALKYSLVDTEVPYYQYQPAPVLDNGRVTLYWDRSIITDRTIPANKPDIVIIDRSASRAMLVDVTIPHDENLVKAEKEKLTKYLDLAHEVTAMWHVDSTIIVPIVVSVNGLIAKSFDQHLKKLSLGCWIKGLIQKAVILDSARIVRRFLSLEP

SEQ ID NO: 27851 - protein, 905 aa, Clostera curtula
METIPAWQHRIELRINTARTIIAKLYAYKNGNSRPRVMRFVHQAFNGTGVRPQDYNAWITERIDFYKQKVQAWAKRIRRFKERSNRYKQNRLFQSDAKKVYRNWEQNSRQISLGVTPDPVRMYTFWQDIWAQPINHTEGDWMTIVRRSSEHITAMEQVIISQADIARAVRLAPNWKSPGPDGLHNFWLKRFHSSHERLATQFQNAISSKTLPTFLTNGVTYLLYKSGSTSEPKNYRPITCLPTTYKLLTSILKFKIMDHILANNIVATAQNGCKPRSRGTKELLLIDMTICQQVRRVKKNISMAWIDYKKAYDSVPHSWLSRVLDLYRLHPNLCSFLSVCMSQWTTRLCLPDMAGFSDSTGLLRIKRGIFQGDSLSPLWFCLAMNPLSTLLMHSKIGYRLRSDGEVISHLLYMDDLKLYAPKKSDLVSLLKITENFSNDIKMEFGVDKCAAIHVQRGRVVTSEELQLSENMSLRCLSESETYRYLGMAEGLGIADKEIKQSLTACFFSRLTKVLKSLLSGGNKVRAVNSWVMPALAYSFGILRWTQTELDALDRKVRRQLTLYRMHHPRSSVMRLYIPRKCGGRGFLNVKNLHNREVCNLREYFLQPTEGVHRDMANVDNSFTPLSLAKQNWRKPQVLSISDRTTIWKSKELHGRFYKALTGPDVDQLASVAWLRFSNLFGETEGFACAIMDEVIMTNNYRRHILKDGTADICRACHRPGESIRHIVSGCSRLANGEYLHRHNQVAKIVHQQLALKYSLVDTEVPYYQYQPAPVLDNGHVTLYWDRSIITDRTIPANKPDIVIIDRSASRAMLVDVTIPHDENLVKAEKEKLTKYLDLAHEVTAMWHVDSTIIVPIVVSVNGLIAKSFDQHLKKLSLGCWIKGLIQKAVILDSARIVRRFLSLEP

SEQ ID NO: 27852 - protein, 1206 aa, Clostera curtula
MSQHTRRNPQRQCRLRAAYGTASARLTPQSSSSPSSEDEYHTPPVTAASSDDTGSPVPPAPRCSARRGRPLPASLMSTEQIATSMTSATGGSVRRMRWSQELNENVMRAYYRATEGGTNLTAYRSRMFALFQDLNPGTTLTVQRLSDQVRAIQRLQLLAQPVLDRLRLETLSSRPVVRTQPDPAISAIAVQLDPPLLAPAELVQSEEVNVNNQYNEQLRRALDDAILEYRDVRPSDRPRLPRLPMTKHNLALTSILDKILASYFNTTENLTETHSILYCGAVAVCRVGGVRFPNLNRPTPQTTTTPAWQYRIEKRINAARTIIAKLLTFRSGNNRPRVMRFVHQAFEGTGIRPQDYTASVTERMDFYKQKVQAWAKRIRRFKKRSDRYNQNRLFQSDAKKVYRNWEENSGQMSPGVTPDPAGMYSFWQDIWSEPVIHSEGEWMSVVRRACEPITAMGPINIDEADIARAVSSAPNWKSPGPDSLHNFWLKRFHSSHVRLATQFQNAIATGSLPTFLTTGVTYLLYKSGSTSEPKNYRPITCLPTTYKLLTSILKFKIMEHILANNIMAPVQNGCKPRSRGTKELLLIDMTICQQVRRVKKNISMAWIDYKKAYDSVPHSWLSRVLDLYRLHPNLCSFLSVCMSQWTTRLCLPVMAGFSDSTGLLRIKRGIFQGDSLSPLWFCLAMNPLSALLMDSKIGYRLRRDGEVISHLLYMDDLKLYAPKKSDLVSLLKITEIFSKDIKMEFGVDKCAAIHVQRGRVVTSEELQLSENMSLRCLSESETYRYLGMAEGLGIADKEIKQSLTACFLGRLTKVLKSLLSGGNKARAVNGWVMPALAYSFGILRWTQSELDALDRKVRRQLTLYRMHHPRSSVMRLYIPRKCGGRGFLNVKNLHNREVCNLREYFLQSTEDVHRDMANVDNSFTPLSLAKQNWRKPQVLSISDRTTIWKSKELHGRFYKALTGPDVDQLASVAWLRFSNIFGETEGFACAIMDEVIMTNNYRRHILKDGTADICRACHRPGESIRHIVSGCSRLANGEYLHRHNQVAKIVHQQLALKYSLVDTEVPYYQYQPAPVLDNGHVTLYWDRSIITDRTIPANKPDIVIIDRSASRAMLVDVTIPHDENLVKAEKEKLTKYLDLAHEVTAMWHVDSTIIVPIVVSVNGLIAKSFDQHLKKLSLSFWIKGLIQKAVILDSARIVRRFLSLEP

SEQ ID NO: 27853 - protein, 1201 aa, Clostera curtula
MTTRRNPNRSCKQAAHLGARLPSPQVSSCSSNEEFFTPTSGTSSDETEVQTASAPRRPVRRGRPPLPARLGPSEQTGPSTAPATGGSVRRMRWSQQINENVMRAYYGATEGGTNLTAYRSRMFALFQDLNPGTTVTVQRLSDQVRAIQRLQLLAQPVLDRLRLETLSSRPVVLPQPDPAISAIAVQPDPLILAPAELVQSEEVNVNNQYNEQLRRAFDDAILEYRDVLPTDRPRLPRLPMTKHNLALTSILDKILPTYFNISENLTETHSILYCGAVAVCRVGGVRFPNLNRPTPQATITPAWQYRIEKRINAARTIIAKLLTFRSGNNRPRVMRFVHQAFEGTGIRPQDYTASVTERMDFYKQKVQAWAKRIRRFKMRSNRYNQNRLFQSDAKKVYRNWEQNSRQMSPGVTPDPVGMYSFWQDIWSQPVIHSEGEWMSVIRRACEPITAMGPINVDEADIARAVSSAPNWKSPGPDSLHNFWLKRFHSSHVRLATQFQNAIASGSLPTFLTTGVTYLLYKSGSTSEPKNYRPITCLPTTYKLLTSILKFKIMEHILANNIMASVQNGCKPRSRGTKELLLIDMTICQQVRRVKKNISMAWIDYKKAYDSVPHSWLSRVLDLYRLHPNLCSFLSVCMSQWTTRLCLPDMAGFSDSTGLLRIKRGIFQGDSLSPLWFCLAMNPLSTVLMHSKIGYRLRSGGEVISHLLYMDDLKLYAPKKSDLVSLLKITENFSNDIKMEFGVDKCAAIHVQRGRVVTSEESQFSQNMSLRCLSESETYRYLGMAEGLGIADKEIKQSLTACFFSRLTKVLKSLLSGGNKVRAVNGWVMPALAYSFGILRWTQTELDALDRKVRRQLTLYRMHHPRSSVMRLYIPRKCGGRGFLNVKNLHNREVCNLREYFLQPTEGVHRDMANVDNSFTPLSLAKQNWRKPQVLSISDRTTIWKSKELHGRFYKALTGPDVDQLASVAWLRFSNLFGETEGFACAIMDEVIMTNNYRRHILKDGTADICRACHRPGESIRHIVSGCSRLANGEYLHRHNQVAKIVHQQLALKYSLVDTEVPYYQYQPAPVLDNGHVTLYWDRSIITDRTIPANKPDIVIIDRSASRAMLVDVTIPHDENLVKAEKEKLTKYLDLAHEVTAMWHVDSTIIVPIVVSVNGLIAKSFDQHLKKLSLGCWIKGLIQKAVILDSARIVRRFLSLEP

SEQ ID NO: 27854 - protein, 1104 aa, Clostera curtula
MRMSCERIMGRQGGGTNLTAYRSRMFALFQDLNPGTTVTVQRLSDQVRAIQRLQLLAQPVLDRLRLETLSTRPVVRPQPDPAVSAIAVQPDPPLPAPAELVQNEEVNVNNQYDEQLRRALDDAILVYRDVPVSDRPRLPRLPMNKHILALTSVLNTFLQFHFDKSENLTETHSILYCGAVAVCRVGGVRFPNQNRLTRQMETIPAWQHRIELRINTARTIIAKLYAYKNGNSRPRVMRFVHQAFNGTGVRPQDYSAWITERIDFYKQKVQAWAKRIRRFKERSDRYKQNRLFQSDARKVYRNWEQNSRQISLGVTPDPVRMYTFWQDIWAQPINHTEGEWMTIVRRSCENITAMEQVIISQADIARAVRLAPNWKSPGPDGLHNFWLKRFHSSHERLATQFQNAISSKTLPTFLTNGVTYLLYKSGSTSEPKNYRPITCLPTTYKLLTSILKFKIMDHILANNIMATAQNGCKPRSRGTKELLLIDMTICQQVRRVKKNISMAWIDYKKAYDSVPHSWLSRVLDLYRLHPNLCSFLSVCMSQWTTRLCLPDMAGFSDTTDLLRIKRGIFQGDSLSPLWFCLAMNPLSTLLMDSKIGYRLRRDGEVISHLLYMDDLKLYAPKKSDLVSLLKITENFSNDIKMEFGVDKCAAIHVQRGRVVTSEELQLSENMSFRCLSESETYRYLGMAEGLGIADKEIKQSLTACFFSRLTKVLKSLLSGGNKVRAVNGWVMPALAYSFGILRWTQTELDALDRRVRRQLTLYRMHHPRSSVMRLYIPRKCGGRGFLNVKNLHNREVCNLREYFLQSTEDVHRDMANVDNSFTPLSLAKQNWRKPQVLSISDRTTIWKSKELHGRFYKALTGPDVDQLASVAWLRFSNLFGETEGFACAIMDEVIMTNNYRRHILKDGTADICRACHRPGESIRHIVSGCSRLANGEYLHRHNQVAKIVHQQLALKYSLVDTEVPYYQYQPAPVLDNGHVTLYWDRSIITDRTILANKPDIVIIDRSASRAMLVDVTIPHDENLVKAEKEKLTKYLDLAHEVTAMWHVDSTIIVPIVVSVNGLIAKSFDQHLKKLSLSCWIKGLIQKAVILDSARIVRRFLSLEP

SEQ ID NO: 27855 - protein, 1206 aa, Clostera curtula
MSQSTRRNPPRRCRLRAAYGTASARLTPQSSSSSSSEDEYHTPPVTAASSDDAGSPVPPTAQRSARRGRPLPASLRSTEHTATSMASATGGSVRRMRWSQELNENVMRAYYGATEGGTNLTAYRSRMFALFQDLNPGTTVTVQRLSDQVRAIQRLQLLAQPVLDRLRLETLSSRPVVHPQPDPAVSAIAIQPDPPLLAPAELVQNEEVNVNNQYDEQLRRALDDAILVYRDVPASDRPRLPRLPMNKHILALTSVLNTFLQSHFDKSENLTETHSILYCGAVAVCRVGGVRFPNQNRLTTQMETIPAWQHRIELRINTARTIIAKLYAYKNGNSRPRVMRFVHQAFNGTGVRPQDYNAWITERIDFYKQKVQAWAKRIRRFKERSNRYKQNRLFQSDAKKVYRNWEQNSRQISLGVTPDPVRMYTFWQDIWAQPINHTEGDWMTIFRRSCEHITAMEQVIISQADIARAVRLAPNWKSPRPDGLHNFWLKRFHSSHERLATQFQNAISSKTLPTFLTNGVTYLLYKSGSTSEPKNYRPITCLPTTYKLLTSILKFKIMDHILANNIMVTAQNGCKPRSRGTKELLLIDMTICQQVRRVKKNISMAWIDYKKAYDSVPHSWLSRVLDLYRLHPNLCSFLSVCMSQWTTRLCLPDMAGFSDSTGLLRIKRGIFQGDSLSPLWFCLAMNPLSTLLMDSKIGYRLRRDGEAISHLLYMDDLKLYAPKKSDLVSLLKITENFSNDIKMEFGVDKCAAIHVQRGRVVTSEELQLSENMSFRCLSESETYRYLGMAEGLGIADKEIKQALTTCFFSRLTKVLKSLLSGGNKVRAVNGWVMPALAYSFGILRWTQTELDALDRRVRRQFTLYRMHHPRSSVMRLYIPRKCGGRGFLNVKTLHNREVCNLREYFLQSTEDVHRDMANVDNSFTPLSLAKQNWRKPQVLSISDRTTIWKSKELHGRFYKALTGPDVDQLASVAWLRFSNLFGETEGFACAIMDEVIMTNNYRRHILKDGTADICRACHRPGESIRHIVSGCSRLANGEYLHRHNQVAKIVHQQLALKYSLVDTEVPYYQYQPAPVLDNGHVTLYWDRSIITDRTILANKPDIVIIDRLASRAMLVDVTIPHDENLVKAEKEKLTKYLDLAHEVTAMWHVDSTIIVPIVVSVNGLIAKSFDQHLKKLSLGCWIKGLIQKAVILDSARIVRRFLSLEP

SEQ ID NO: 27856 - protein, 1209 aa, Clostera curtula
MMLPTRRNPLRQCRQHVAIGTSSARPTQGTSSSSLSSSSEEAYFTPNSEGSSDVVTSPPEPSPLRRSTRRRPPPLPASLGSSDTSVPSMTPATGGVVRRMRWTLQLNESVMRAYYGATQGGTVLTAYRSRMLSLFQELNPTTTITAQRLSDQVRAIQRLNLLEQPVLDGLRLESLSALPAVNQRSVMSQAVTASVGSITQEPAESTHIDEVSVTNQFSEKLRSALEEAILEFRDIPISARPRLPRLPTHTQNIVLVGVLNNILKSYIHTCSTLSETHSLLYCGAIAACRVGGARFLNFHSSNRRTNTIPLWQCRIQKKIDSARTTIAKLYAFRMGNSRPRIMRYVVQAFAGTGISRHDYQVWITERIDFFKQKMYAWAKRIRRYKERSDRFTQNRLFQSDQKRIYRSWECPEQQFSGSSRPSRELVSAFWQNIWSVPATHSEGLWFNSVQRSCDSISEMDPVIICDEDVSSAIHGAPNWKAPGPDGLQNFWLKKFNCLHSVLATQFQNILDLGSLPAFMTTGVTYLLFKSGSTSEPNNYRPITCLPTLYKLLTSILKFKIMRHVSNNNILASVQNGCKPRSRGTKELLLIDMTICQQVRRVRKNISMAWVDYKKAYDSVPHSWLLRVCTLYKLHPNLCSFLHSCMSSWATRLCHMDGMDFSDSPDLIQIKRGIFQGDSLSPLWFCLALNPLSTLLRDSMLGYRLRRNGEIVSHLLYMDDVKLYAPNESDLVTLLKITHNFSNDIRMEFGIDKCAVIRVQRGQIVNSSGVDISESVFLHSLSESENYKYLGMSQGLCIADKDMKQLLTARFLGRVKKVFKSLLSGGNKARAFNSWAIPALSYSFGILKWTQTELDKLDRKVRRLMTSFRMHHPRSSVMRLYIPRKCGGRGYLNAKSLHNREVCNLRDYFVRIDDNLHRDVVSVDNGLTPLSMAKQNWRRLKVLTTPDRIAVWQSKELHGRFYRAFTGPDVDQQASISWLSFGNLFAETEGFVCAIMDEVVMTNNYRRHIIKDGTVDICRACRCPGESIRHIVSGCSRLANGEYLHRHNQVAKIIHQQLALKYGLIDSEIPYYQYQPAPVLDNGLITLYWDRSIITDRTIVANRPDLVLIDRSVRKAMIVDITIPHDDNLIKAETEKLSKYLDLAHEITSMWGVDSTIIVPIVVSVNGLIAKSFNRYLEKLSLSCWVKHLAQKAVLLETARIVRRFLSADP

SEQ ID NO: 27857 - protein, 1205 aa, Clostera curtula
MSAPRRNPSRRCRSRAAYGTYSARPTPSSSSSPTSGNEYHTPPVTAASSDDAGSPVPPAAQSSARRGRPLPASLRSTEHNATSMASATGGSVRRMRWSQQLNENVMRAYYGATEGGTNLTAYRSRMFTLFQDLNPGTTVTVQRLSDQVRAIQRLQLLAQPVLDRLRLETLSSHPVVRPQPDPAVPAIAEQPDPLPLALVESLQNEEVNVNNQYNEQLRRALDDAILEYRDVPPSDRPRLPRLPMTKHNLALTSILDKILPPYFSTTENLTETHSILYCGAVAVCRVGGVRFPNHNRPTPQTTTTPAWQYRIEKRINAARTIIAKLLTFRSGNNRPRVMRFVHQAFEGTGIRPQEYTASVTERMDFYKQKVQAWAKRIRRFKKRSDRYNQNRLFQSDAKKVYRNWEQNSRQMSPGVTPDPVGMYSFWQDIWSQPVIHSEGEWMSVVRRACEPITAMGPINVDEADIARAVSSAPNWKSPGPDSLHNFWLKRFHSSHVRLATQFQNAIATGSLPTFLTTGVTYLLYKSGSTSEPKNYRPITCLPTTYKLLTSILKFKIMEHILANNIMAPVQNGCKPRSRGTKELLLIDMTICQQVRRVKKNISMAWIDYKKAYDSVPHSWLSRVLDLYRLHPNLCSFLSVCMSQWTTRLCLPDMAGFSDSTGLLRIKRGIFQGDSLSPLWFCLAMNPLSTLLMDSKIGYRLRRDGEVISHLLYMDDLKLYAPKKSDLVSLLKITENFSKDIKMEFGVDKCAAIHVQRGRVVTSEELQLSENMSLRCLSESETYRYLGMAEGLGIADKEIKQSLTASFLSRLTKVLKSLLSGGNKARAVNGWVMPALAYSFGILRWTQSELDALDRKVRRQLTLYRMHHPRSSVMRLYIPRKCGGRGYLNVKNLHNREVCNLREYFLQSTEDVHRDVANVDNSFTPLSLAKQNWRKPQVLSISDRTTIWKSKELHGRFYKALTGPDVDQLASVAWLRFSNLFGETEGFACAIMDEVIMTNNYRRHILKDGTADICRACHRPGESIRHIVSGCSRLANGEYLHRHNQVAKIVHQQLALKYSLVDTKVPYYQYQPAPVLDNGHVTLYWDRSIITDRTIPANKPDIVIIDRLASRAMLVDVTIPHDENLVKAEKDKLTKYLDLAHEVTAMWHVDSTIIVPIVVSVNGLIAKSFDQHLKKLSLSCWIKGLIQKAVILDSARIVRRFLSLEP

SEQ ID NO: 27858 - protein, 1205 aa, Clostera curtula
MSAPRRNPSRRCRSRAAYGTYSARPTPSSSSSPTSGNEYHTPPVTAASSDDAGSPVPPAAQSSARRGRPLPASLRSTEHNATSMASATGGSVRRMRWSQQLNENVMRAYYGATEGGTNLTAYRSRMFTLFQDLNPGTTVTVQRLSDQVRAIQRLQLLAQPVLDRLRLETLSSHPVVRPQPDPAVPAIAEQPDPLPLALVESLQNEEVNVNNQYNEQLRRALDDAILEYRDVPPSDRPRLPRLPMTKHNLALTSILDKILPPYFSTTENLTETHSILYCGAVAVCRVGGVRFPNHNRPTPQTTTTPAWQYRIEKRINAARSIIAKLLTFRSGNNRPRVMRFVHQAFEGTGIRPQEYTASVTERMDFYKQKVQAWAKRIRRFKKRSDRYNQNRLFQSDAKKVYRNWEQNSRQMSPGVTPDPVGMYSFWQDIWSQPVIHSEGEWMSVVRRACEPITAMGPINVDEADIARAVSSAPNWKSPGPDSLHNFWLKRFHSSHVRLATQFQNAIATGSLPTFLTTGVTYLLYKSGSTSEPKNYRPITCLPTTYKLLTSILKFKIMEHILANNIMAPVQNGCKPRSRGTKELLLIDMTICQQVRRVKKNISMAWIDYKKAYDSVPHSWLSRVLDLYRLHPNLCSFLSVCMSQWTTRLCLPDMAGFSDSTGLLRIKRGIFQGDSLSPLWFCLAMNPLSTLLMDSKIGYRLRRDGEVISHLLYMDDLKLYAPKKSDLVSLLKITENFSKDIKMEFGVDKCAAIHVQRGRVVTSEELQLSENMSLRCLSESETYRYLGMAEGLGIADKEIKQSLTASFLSRLTKVLKSLLSGGNKARAVNGWVMPALAYSFGILRWTQSELDALDRKVRRQLTLYRMHHPRSSVMRLYIPRKCGGRGYLNVKNLHNREVCNLREYFLQSTEDVHRDVANVDNSFTPLSLAKQNWRKPQVLSISDRTTIWKSKELHGRFYKALTGPDVDQLASVAWLRFSNLFGETEGFACAIMDEVIMTNNYRRHILKDGTADICRACHRPGESIRHIVSGCSRLANGEYLHRHNQVAKIVHQQLALKYSLVDTEVPYYQYQPAPVLDNGHVTLYWDRSIITDRTIPANKPDIVIIDRLASRAMLVDVTIPHDENLVKAEKDKLTKYLDLAHEVTAMWHVDSTIIVPIVVSVNGLIAKSFDQHLKKLSLSCWIKGLIQKAVILDSARIVRRFLSLEP

SEQ ID NO: 27859 - protein, 1209 aa, Clostera curtula
MMLPTRRNPLRQCRQHVAIGTSSARPTQGTSSSSLSSSSEEAYFTPNSEGSSDVVTSPPEPSPLRRSTRRRPPPLPASLGSSDTSVPSMTPATGGVVRRMRWTLQLNESVMRAYYGATQGGTVLTAYRSRMLSLFQELNPTTTITAQRLSDQVRAIQRLNLLEQPVLDGLRLESLSALPAVNQRSVMSQAVTASVGSITQEPAESTHIDEVSVTNQFSEKLRSALEEAILEFRDIPISARPRLPRLPTHTQNIVLVGVLNNILKSYIHTCSTLSETHSLLYCGAIAACRVGGARFLNFHSSNRRTNTIPLWQCRIQKKIDSARTTIAKLYAFRMGNSRPRIMRYVVQAFAGTGISRHDYQAWITERIDFFKQKMYAWAKRIRRYKERSDRFTQNRLFQSDQKRIYRSWECPEQQFSGSSRPSRELVSSFWQNIWSVPATHSEGLWFNSVQRSCDSISEMDPVIICDEDVSSAIHGAPNWKAPGPDGLQNFWLKKFNCLHSVLATQFQNILDLGSLPAFMTTGVTYLLFKSGSTSEPNNYRPITCLPTLYKLLTSILKFKIMRHVSNNNILASVQNGCKPRSRGTKELLLIDMTICQQVRRIRKNISMAWVDYKKAYDSVPHSWLLRVCTLYKLHPNLCSFLHSCMSSWATRLCHMDGMDFSDSPDLIQIKRGIFQGDSLSPLWFCLALNPLSTLLRDSMLGYRLTRNGEIVSHLLYMDDVKLYAPNESDLVTLLKITHNFSNDIRMEFGIDKCAVIRVQRGQIVNSSGVDISESVFLHSLSESENYKYLGMSQGLCIADKDMKQLLTARFLGRVKKVFKSLLSGGNKARAFNSWAIPALSYSFGILKWTQTELDKLDRKIRRLMTSFRMHHPRSSVMRLYIPRKCGGRGYLNAKSLHNREVCNLRDYFVRIDDNLHRDVVSVDNGLTPLSMAKQNWRRLKVLTTPDRIAVWQSKELHGRFYRAFTGPDVDQQASISWLSFGNLFAETEGFVCAIMDEVVMTNNYRRHIIKDGTVDICRACRCPGESIRHIVSGCSRLANGEYLHRHNQVAKIIHQQLALKYGLIDSEIPYYQYQPAPVLDNGLITLYWDRSIITDRTIVANRPDLVLIDRSVRKAMIVDITIPHDDNLIKAETEKLSKYLDLAHEITSMWGVDSTIIVPIVVSVNGLIAKSFNRYLEKLSLSCWVKHLAQKAVLLETARIVRRFLSADP

SEQ ID NO: 27860 - protein, 1157 aa, Clostera curtula
MSDSAPRRNPSRRCRLRAAYGTNCARPTSSSSSSPTSGNEYHTPPVTAASSDDAGSPVPPAAQSSARRGRPLPASLRSTEHTATSMASATGGSVRRMRWSQELNEKVMRAYYGATEGGTNLTAYRSRMFALFQDLNPGTTVTVQRLSDQVRAIQRLQLLAQPVLDRLRLETLSSRPVVRPQPDPAVSAIAVQPDPPLVAPAELVQNEEVNVNNQYDEQLRRALDDAILVYRDVPASDRPRLPRLPMNKHILALTSVLNTFLQSHFDKSENLTETHSILYCGAVAVCRVGGVRFPNQIRPTTQMETIPAWQHRIELRINTARTIIAKLYTYKNGNSRPRVMRFVHQAFNGTGVRPQDYSAWITERIDFYKQKVQAWAKRIRRFKERSDRYKQNRLFQSDAKKVYRNWEQNSRQISLGVTPDPVRMYTFWQDIWAQPINHTEGEWMTIVRRSCEHITAMEQVIISQADIARALRLAPNWKSPGPDGLHNFWLKRFHSSHERLATQFHNAISSKTLPTFLTNGVTYLLYKSGSTSEPKNYRPITCLPTTYKLLTSILKFKIMDHILANNIMATAQNGCKPRSRGTKELLLIDMTICQQVRRVKKNISMAWIDYKKAYDSVPHSWLSRVLDLYRLHPNLCSFLSVCMSQWTTRLCLPDMAGFSDSTGLLRIKRGIFQGDSLSPLWFCLAMNPLSTLLMDSKIGYLLRRDGEVISHLLYMDDLKLYAPKKSDLVSLLKITENFSNDIKMEFGVDKCAAIHVQRGRVVTSEELQLSENMSFRCLSESETYRYLGMAEGLGIADKEIKQALTTCFFSRLTKVLKSLLSGGNKVRAVNGWVMPALAYSFGILRWTQTELDALDRRVRRQLTLYRMHHPRSSVMRLYIPRKCGGRGFLNVKNLHNREVCNLREYFLQSTEDVHRDMANVDNSFTPLSLAKQNWRKPQVLSISDRTTIWKSKELHGRFYKALTGPDVDQLASVAWLRFSNLFGETEGFTCAIMDEVIMTNNYRRHILKDGTADICRACHRPGESIRHIVSGCSRLANGEYLHRHNQVAKIIHQQLALKYSLVDTEVPYYQYQPAPVLDNGHVTLYWDRSIITERTILANKPDIVIIDRSASWQCLLTSLSRMTRTSLKLKKRNSQSISIWLTRLPQCGMLIQQSLCR

SEQ ID NO: 27861 - protein, 1206 aa, Clostera curtula
MSQHTRRNPQRQCRLRAAYGTASARLTPQSSSSPSSEDEYHTPPVTAASSDDTGSPVPPAPRCSARRGRPLPASLMSTEQIATSMTSATGGSVRRMRWSQQLNENVMRAYYGATEGGTNLTAYRSRMFALFQDLNPGTTVTVQRLSDQVRAIQRLQLLAQPVLDRLRLETLSSHPVVRPQPDPAVPAIAEQPDPLPLALAESLQNEEVNVNNQYNEQLRRALDDAILDYRDVPPSDRPRLPRLPMTKHNLALTSILDKILPSYFSTTENLTETHSILYCGAVAVCRVGGVRFPNHNRPTPQTTTTPAWQYRIEKRINAARTIIAKLLTFRSGNNRPRVMRFVHQAFEGTGIRPQEYTASVTERMDFYKQKIQAWAKRIRRFKKRSDRYNQNRLFQSDAKKVYRNWEQNSRQMSPGVTPDPVGMYSFWQDIWSQPVIHSEGEWMSVVRRACEPMTAMGPINVDEADIARAISSAPNWKSPGPDSLHNFWLKRFHSSHVRLATQFQNAIATGSLPTFLTTGVTYLLYKSGSTSEPKNYRPITCLPTTYKLLTSILKFKIMEHILANNIMAPVQNGCKPRSRGTKELLLIDMTICQQVRRVKKNISMAWIDYKKAYDSVPHSWLSRVLDLYRLHPNLCSFLSVCMSQWTTRLCLPDMAGFSDSTGLLRIKRGIFQGDSLSPLWFCLAMNPLSTLLMDSKIGYRLRRDGEVISHLLYMDDLKLYAPKKSDLVSLLKITENFSKDIKMEFGVDKCAAIHVQRGRVVTSEELQLSENMSLRCLSESETYRYLGMAEGLGIADKEIKQSLTACFLSRLTKVLKSLLSGGNKARAVNGWVMPALAYSFGILRWTQSELDALDRKVRRQLTLYRMHHPRSSVMRLYIPRKCGGRGYLNVKNLHNREVCNLREYFLQSTEDEHRDVANVDNSFTPLSFAKQNWRKPQVLSISDRTTIWKSKELHGRFYKALTGPDVDQLASVAWLRFSNLFGETEGFACAIMDEVIMTNNYRRHILKDGTADICRACHRPGESIRHIVSGCSRLANGEYLHRHNQVAKIVHQQLALKYSLVDTEVPYYQYQPAPVLDNGHVTLYWDRSIITDRTIPANKPDIVIIDRLASRAMLVDVTIPHDENLVKAEKEKLTKYLDLAHEVTAMWHVDSTIIVPIVVSVNGLIAKSFDQHLKKLSLCCWIKGLIQKAVILDSARIVRRFLSLEP

SEQ ID NO: 27862 - protein, 1207 aa, Clostera curtula
MSDSAPRRNPSRRCRLRAAYGTNCARPTSSSSSSPTSGNEYHTPPVTAASSDDAGSPVPPAAQSSARRGRPLPASLRSTEHTATSMASATGGSVRRMRWSQELNEKVMRAYYGATEGGTNLTAYRSRMFALFQDLNPGTTVTVQRLSDQVRAIQRLQLLAQPVLDRLRLETLSSRPVVRPQPDPAVSAIAVQPDPPLVAPAELVQNEEVNVNNQYDEQLRRALDDAILVYRDVPASDRPRLPRLPMNKHILALTSVLNTFLQSHFDKSENLTETHTILYCGAVAVCRVGGARFPNQNRPTTQMETIPAWQHRIELRINTARTIIAKLYTYKNGNSRPRVMRFVHQAFNGTGVRPQDYSAWITERIDFYKQKVQAWAKRIRRFKERSDRYKQNRLFQSDAKKVYRNWEQNSRQISLGVTPDPVRMYTFWQDIWAQPINHTEGEWMTIVRRSCEHITAMEQVIISQADIARALRLAPNWKSPGPDGLHNFWLKRFHSSHERLATQFHNAISSKTLPTFLTNGVTYLLYKSGSTSEPKNYRPITCLPTTYKLLTSILKFKIMDHILANNIMATAQNGCKPRSRGTKELLLIDMTICQQVRRVKKNISMAWIDYKKAYDSVPHSWLSRVLDLYRLHPNLCSFLSVCMSQWTTRLCLPDMAGFSDSTGLLRIKRGIFQGDSLSPLWFCLAMNPLSTLLMDSKIGYLLRRDGEVISHLLYMDDLKLYAPKKSDLVSLLKITENFSNDIKMEFGVDKCAAIHVQRGRVVTSEELQLSENMSFRCLSESETYRYLGMAEGLGIADKEIKQALTTCFFSRLTKVLKSLLSGGNKVCAVNGWVMPALAYSFGILRWTQTELDALDRRVRRQLTLYRMHHPRSSVMRLYIPRKCGGRGFLNVKNLHNREVCNLREYFLQSTEDVHRDMANVDNSFTPLSLAKQNWRKPQVLSISDRTTIWKSKELHGRFYKALTGPDVDQLASVAWLRFSNLFGETEGFACAIMDEVIMTNNYRRHILKDGTADICRACHRPGESIRHIVSGCSRLANGEYLHRHNQVAKIVHQQLALKYSLVDTEVPYYQYQPAPVLDNGHVTLYWDRSIITDRTILANKPDIVIIDRSASRAMLVDVTIPHDENLVKAEKEKLTKYLDLAHEVTAMWHVDSTIIVPIVVSVNGLIAKSFDQHLKKLSLGCWIKGLIQKAVILDSARIVRRFLSLEP

SEQ ID NO: 27863 - protein, 1205 aa, Clostera curtula
MSAPRRNPSRRCRSRAAYGTYSARPTPSSSSSPTSGNEYHTPPVTAASSDDAGSPVPPAAQSSARRGRPLPASLRSTEHNATSMASATGGSVRRMRWSQQLNENVMRAYYGATEGGTNLTAYRSRMFTLFQDLNPGTTVTVQRLSDQVRAIQRLQLLAQPVLDRLRLETLSSHPVVRPQPDPAVPAIAEQPDPLPLALVESLQNEEVNVNNQYNEQLRRALDDAILEYRDVPPSDRPRLPRLPMTKHNLALTSILDKILPPYFSTTENLTETHSILYCGAVAVCRVGAVRFPNHNRPTPQTTTTPAWQYRIEKRINAARTIIAKLLTFRSGNNRPRVMRFVHQAFEGTGIRPQEYTASVTERMDFYKQKVQAWAKRIRRFKKRSDRYNQNRLFQSDAKKVYRNWEQNSRQMSPGVTPDPVGMYSFWQDIWSQPVIHSEGEWMSVVRRACEPITAMGPINVDEADIARAVSSAPNWKSPGPDSLHNFWLKRFHSSHVRLATQFQNAIATGSLPTFLTTGVTYLLYKSGSTSEPKNYRPITCLPTTYKLLTSILKFKIMEHILANNIMAPVQNGCKPRSRGTKELLLIDMTICQQVRRVKKNISMAWIDYKKAYDSVPHSWLSRVLDLYRLHPNLCSFLSVCMSQWTTRLCLPDMAGFSDSTGLLRIKRGIFQGDSLSPLWFCLAMNPLSTLLMDSKIGYRLRRDGEVISHLLYMDDLKLYAPKKSDLVSLLKITENFSKDIKMEFGVDKCAAIHVQRGRVVTSEELQLSENMSLRCLSESETYRYLGMAEGLGIADKEIKQSLTACFLSRLTKVLKSLLSGGNKARAVNGWVMPALAYSFGILRWTQSELDALDRKVRRQLTLYRMHHPRSSVMRLYIPRKCGGRGYLNVKNLHNREVCNLREYFLQSTEDVHRDVANVDNSFTPLSLAKQNWRKPQVLSISDRTTIWKSKELHGRFYKALTGPDVDQLASVAWLRFSNLFGETEGFACAIMDEVIMTNNYRRHILKDGTADICRACHRPGESIRHIVSGCSRLANGEYLHRHNQVAKIVHQQLALKYSLVDTEVPYYQYQPAPVLDNGHVTLYWDRSIITDRTIPANKPDIVIIDRLASRAMLVDVTIPHDENLVKAEKDKLTKYLDLAHEVTAIWHVDSTIIVPIVVSVNGLIAKSFDQHLKKLSLNCWIKGLIQKAVILDSARIVRRFLSLEP

SEQ ID NO: 27864 - protein, 1209 aa, Clostera curtula
MMLPTRRNPLRQCRQHVAIGTSSARPTQGTSSSSLSSSSEEAYFTPNSEGSSDVVTSPPEPSPLRRSTRRRLPPLPASLGSSDTSVPSMTPATGGVVRRMRWTLQLNESVMRAYYGATQGGTVLTAYRSRMLSLFQELNPTTTITAQRLSDQVRAIQRLNLLEQPVLDRLRLESLSALPAVNQRSVMSRAVTASVGSITQEPAESTHIDEVSVTNQFSEKLRSALEEAILEFRDIPISARPRLPRLPTHTQNIVLVGVLNNILKSYIHTCSTLSETHSLLYCGAIAACRVGGARFLNFHSSNRRTNTIPLWQCRIQKKIDSARTTIAKLYAFRMGNSRPRIMRYVVQAFAGTGISRHDYQAWITERIDFFKQKMYAWAKRIRRYKERSDRFNQNRLFQSDQKRIYRSWECSEQQFSGSSRPSRELVSSFWQNIWSVPATHSEGLWFNSVERSCDSISEMDPVIICDEDVSSAIHGAPNWKAPGPDGLQNFWLKKFNCLHSVLATQFQNILDLGSLPAFMTTGVTYLLFKFGSTSEPNNYRPITCLPTLYKLLTSILKFKIMRHVSNNNILASVQNGCKPRSRGTKELLLIDMTICQQVRRVRKNISMAWVDYKKAYDSVPHSWLLRVCTLYKLHPNLCSFLHSCMSSWATRLCHMDGMDFSDSPDLIQIKRGIFQGDSLSPLWFCLALNPLSTLLRDSMLGYRLRRNGEIVSHLLYMDDVKLYAPNESDLVTLLKITHNFSNDIRMEFGIDKCAVIRVQRGQIVNSSGVDISESVFLHSFSESENYKYLGMSQGLCIADKDMKQLLTARFLGRVKKVFKSLLSGGNKARAFNSWAIPALSYSFGILKWTQTELDKLDRKVRRLMTSFRMHHPRSSVMRLYIPRKCGGRGYLNAKSLHNREVCNLRDYFVRIDDNLHRDVVSVDNGLTPLSMAKQNWRRLKVLTTPDRIAVWQSKELHGRFYRAFTGPDVDQQASISWLSFGNLFAETEGFVCAIMDEVVMTNNYRRHIIKDGTVDICRACRCPGESIRHIVSGCSRLANGEYLHRHNQVAKIIHQQLALKYGLIDSEIPYYQYQPAPVLDNGLITLYWDRSIITDRTIVANRPDLVLIDRSVGKAMIVDITIPHDDNLIKAETEKLSKYLDLAHEITSMWGVDSTIIVPIVVSVNGLIAKSFNRYLEKLSLSCWVKHLAQKAVLLETARIVRRFLSADP

SEQ ID NO: 27865 - protein, 1104 aa, Clostera curtula
MRMSCERTMGRQRGGTNLTAYRSRMFALFQDLNPGTTVTVQRLSDQVRAIQRLQLLAQPVLDRLRLETLSSRPVVLPQPDPAISAIAVQPDPLILAPAELVQSEEVNVNNQYNEQLRRALDDAILEYRDVLPTDRPRLPRLPMTKHNLALTSILDKILPTYFNISENLTETHSILYCGAVAVCRVGGVRFPNLNRPTPQATITPAWQYRIEKRINAARTIIAKLLTFRSGNNRPRVMRFVHQAFEGTGIRPQDYTASVTERMDFYKQKVQAWAKRIRRFKMRSNRYNQNRLFQSDAKKVYRNWEQNSRQMSPGVTPDPVGMYSFWQDIWSQPVIHSEGEWMSVIRRACEPITAMGPINVDEADIARAVSSAPNWKSPGPDSLHNFWLKRFHSSHVRLATQFQNAIASGSLPTFLTTGVTYLLYKSGSTSEPKNYRPITCLPTTYKLLTSILKFKIMEHILANNIMASVQNGCKPRSRGTKELLLIDMTICQQVRRVKKNISMAWIDYKKAYDSVPHSWLSRVLDLYRLHPNLCSFLSVCMSQWTTRLCLPDMAGFSDSTGLLRIKRGIFQGDSLSPLWFCLAMNPLSTLLMHSKIGYRLRSGGEVISHLLYMDDLKLYAPKKSDLVSLLKITENFSNDIKMEFGVDKCAAIHVQRGRVVTSEELQFSQNMSLRCLSESETYRYLGMAEGLGIADKEIKQSLTACFFSRLTKVLKSLLSGGNKVRAVNGWVMPALAYSFGILRWTQTELDALDRKVRRQLTLYRMHHPRSSVMRLYIPRKCGGRGFLNVKNLHNREVCNLREYFLQPTEGVHRDMANVDNSFTPLSLAKQNWRKPQVLSISDRTTIWKSKELHGRFYKALTGPDVDQLASVAWLRFSNLFGETEGFACAIMDEVIMTNNYRRHILKDGTADICRACHRPGESIRHIVSGCSRLANGEYLHRHNQVAKIVHQQLALKYSLVDTEVPYYQYQPAPVLDNGHVTLYWDRSIITDRTIPANKPDIVIIDRSASRAMLVDVTIPHDENLVKAEKEKLTKYLDLAHEVTAMWHVDSTIIVPIVVSVNGLIAKSFDQHLKKLSLGCWIKGLIQKAVILDSARIVRRFLSLEP

SEQ ID NO: 27866 - protein, 1207 aa, Clostera curtula
MSDSAPRRNPSGRCRLRAAYGTNCARPTSSSSSSPTSGNEYHTPPVTAASSDDAGSPVPPAAQSSARRGRPLPASLRSTEHTATSMASATGGSVRRMRWSQELNEKVMRAYYGATEGGTNLTAYRSRMFALFQDLNPGTTVTVQRLSDQVRAIQRLQLLAQPVLDRLRLETLSSRPVVRPQPNPAVSAIAVQPDPPLVAPAELVQNEEVNVNNQYDEQLRRSLDDAILVYRDVPASDRPRLPRLPMNKHILALTSVLNTFLQSHFDKSENLTETHSILYCGAVAVCRVGGARFPNQNRPTTQMETIPAWQHRIELRINTARTIIAKLYTYKNGNSRPRVMRFVHQAFNGTGVRPQDYSAWITERIDFYKQKVQAWAKRIRRFKERSDRYKQNRLFQSDAKKVYRNWEQNSRQISLGVTPDPVRMYTFWQDIWAQPINHTEGEWMTIVRRSCEHITAMEQVIISQADIARALRLAPNWKSPGPDGLHNFWLKRFHSSHERLATQFHNAISSKTLPTFLTNGVTYLLYKSGSTSEPKNYRPITCLPTTYKLLTSILKFKIMDHILANNIMATAQNGCKPRSRGTKELLLIDMTICQQVRRVKKNISVAWIDYKKAYDSVPHSWLSRVLDLYRLHPNLCSFLSVCMSQWTTRLCLPDMAGFSDSTGLLRIKRGIFQGDSLSPLWFCLAMNPLSTLLMDSKIGYLLRRDGEVISHLLYMDDLKLYAPKKSDLLSLLKITENFSNDIKMEFGVDKCAAIHVQRGRVVTSEELQLSENMSFRCLSESETYRYLGMAEGLGIADKEIKQALTTCFFSRLTKVLKSLLSGGNKVRAVNGWVMPALAYSFGILRWTQTELDALDRRVRRQLTLYRMHHPRSSVMRLYIPRKCGGRGFLNVKNLHNREVCNLREYFLQSTEDVHRDMANVDNSFTPLSLAKQNWRKPQVLSISDHTTIWKSKELHGRFYKALTGPDVDQLASVAWLRFSNLFGETEGFACAIMDEVIMTNNYRRHILKDGTADICRACHRPGESIRHIVSGCSRLANGEYLHRHNQVAKIVHQQLALKYSLVDTEVSYYQYQPAPVLDNGHVTLYWDRSIITDRTILANKPDIVIIDRSASRAMLVDVTIPHDENLVKAEKEKLTKYLDLAHEVTAMWHVDSTIIVPIVVSVNGLIAKSFDQHLKKLSLGCWIKGLIQKAVILDSARIVRRFLSLEP

SEQ ID NO: 27867 - protein, 1201 aa, Clostera curtula
MATRRNPNRRCKQAAHLGARLPSPQVSSCSSNEEFFTPTSGTSSDETEVQTASAPRRPVRRGRPPLPARLGPSEQTGPSTAPATGGSVRRMRWSQQINENVMRAYYGATEGGTNLTAYRSRMFALFQDLNPGTTVTVQRLSDQVRAIQRLQLLAQPVLDRLRLETLSSRPVVLPQPDPAISAIAVQPDPLILAPAELVQSEEVNVNNQYNEQLRRALDDAILEYRDVLPTDRPRLPRLPMTKHNLALTSILDKILPTYFNISENLTETHSILYCGAVAVCRVGGVRFPNLNRPTPQATITPAWQYRIEKRINAARTIIAKLLTFRSGNNRPRVMRFVHQAFEGTGIRPQDYTASVTERMDFYKQKVQAWAKRIRRFKMRSNRYNQNRLFQSDAKKVYRNWEQNSRQMSPGVTPDPVGMYSFWQDIWSQPVIHSEGEWMSVIRRACEPITAMGPINVDEADIARAVSSAPNWKSPGPDSLHNFWLKRFHSSHVRLATQFQNAIASGSLPTFLTTGVTYLLYKSGSTSEPKNYRPITCLPTTYKLLTSILKFKIMEHILANKIMASVQNGCKPRSRGTKELLLIDMTICQQVRRVKKNISMAWIDYKKAYDSVPHSWLSRVLDLYRLHPNLCSFLSVCMSQWTTRLCLPDMAGFSDSTGLLRIKRGIFQGDSLSPLWFCLAMNPLSTLLMHSKIGYRLRSGGEVISHLLYMDDLKLYAPKKSDLVSLLKITENFSNDIKMEFGVDKCAAIHVQRGRVVTSEELQFSQNMSLRCLSESETYRYLGMAEGLGIADKEIKQSLTACFFSRLTKVLKSLLSGGNKVRAVNGWVMPALAYSFGILRWTQTELDALDRKVRRQLTLYRMHHPRSSVMRLYIPRKCGGRGFLNVKNLHNREVCNLREYFLQPTEGVHRDMANVDNSFTPLSLAKQNWRKPQVLSISDRTTIWKSKELHGRFYKALTGPDVDQLASVAWLRFSNLFGETEGFACAIMDEVIMTNNYRRHILKDGTADICRACHRPGESIRHIVSGCSRLANGEYLHRHNQVAKIVHQQLALKYSLVDTEVPYYQYQPAPVLDNGHVTLYWDRSIITDRTIPANKPDIVIIDRSASRAMLVDVTIPHDENLVKAEKEKLTKYLDLAHEVTAMWHVDSTIIVPIVVSVNGLIAKSFDQHLKKLSLGCWIKGLIQKAVILDSARIVRRFLSLEP

SEQ ID NO: 27868 - protein, 1207 aa, Clostera curtula
MSEFALRRNPSRRCRLRAAYGTNSARPTSSSSSSSTSANEYHTPPVTAAASDDAGSPVPPAAQSSARRGRPLPASLRSTEHTATSMASATGGSVRRMRWSQELNENVMRAYYGATGGGTNLTAYRSRMFALFQDLNPGTTVTVQRLSDQVRAIQRLQLLAQPVLDRLRLETLSTRPVVRPQPDPAVSAIAVQPDPPLPAPAELVQNEEVNVNNQYDEQLGRALDDAILVYRDVPVSDRPRLPRLPMNKHILALTSVLNTFLQFHFDKSENLTETHSILYCGAVAVCRVGGVRFPNQNRLTTQMETIPAWQHRIELRINTARTIIAKLYTYKNGNSRPRVMRFVHQAFNGTGVRPQDYSAWITERIDFYKQKVQAWAKRIRRFKERSDRYKQNRLFQSDARKVYRNWEQNSRQISLGVTPDPVRMYTFWQDIWAQPINHTEGEWMTIVRRSCENITAMEQVIISQADIARAVRLAPNWKSPGPDGLHNFWLKRFHSSHERLATQFQNAISSKTLPTFLTNGVTYLLYKSGSTSEPKNYRPITCLPTTYKLLTSILKFKIMDHILANNIMATAQNGCKPRSRGTKELLLIDMTICQQVRRVKKNISMAWIDYKKAYDSVPHSWLSRVLDLYRLHPNLCSFLSVCMSQWTTRLCLPDMAGFSDSTDLLRIKRGIFQGDSLSPLWFCLAMNPLSTLLMDSKIGYRLRRDGEVISHLLYMDDLKLYAPKKSDLVSLLKITENFSNDVKMEFGVDKCAAIHVQRGRVVTSEELQLSENMSFRCLSESETYRYLGMAEGLGIADKEIKQSLTACFFSRLTKVLKSLLSGGNKVRAVNGWVMPALAYSFGILRWTQTELDALDRRVRRQLTLYRMHHPRSSVMRLYIPRKCGGRGFLNVKNLHNREVCNLREYFLQSTEDVHRDMANVDNSFTPLSLAKQNWRKPQVLSISDRTTIWKSKELHGRFYKALTGPDVDQLASVAWLRFSNLFGETEGFACAIMDEVIMTNNYRRHILKDGTADICRACHRPGESIRHIISGCSRLANGEYLHRHNQVAKIVHQQLALKYSLVDTEVPYYQYQPAPVLDNGHVTLYWDRSIITDRTILANKPDIVIIDRSASRAMLVDVTIPHDENLVKAEKEKLTKYLDLAHEVTAMWHVDSTIIVPIVVSVNGLIAKSFDQHLKKLSLGCWIKGLIQKAVILDSARIVRRFLSLEP

SEQ ID NO: 27869 - protein, 1207 aa, Clostera curtula
MSEFALRRNPSRRCRLRAAYGTNSARPTSSSSSSSTSANEYHTPPVTAASSDDAGSPVPPAAQSSARRSRPLPASLRSTEHTATSMASATGGLVRRMRWSQELNENVMRAYFGATEGGTNLTAHRSRMFALFQDLNPGTTVTVQRLSDQVRAIQRLQLLAQPVLDRLRLETLSTRPVVRPQPDPPVSAIAVQPDPPLPAPAELVQNEGVNVNNQYDEQVRRALDDAILVYRDVPVSDRPRLPRLPMNKHILALTSILNTFLQIHFDKSENLTETHSILYCGAVAVCRVGGVRFPNQNRLTTQMETIPAWQHRIELRINTARTIIAKLYAYKNGNSRPRVMRFVHQAFNGTGVRPQDYSAWITERIDFYKQKVQAWAKRIRRFKERSDRYKQNRVFQSDAKKVYRNWEQNSRQISLGVTPDPVRMYTFWQDIWAQPINHTEGEWMTIVRRSCENITAMEQVIISKADIARAVRLAPTWKSPGPDGLHNFWLKRFHSSHERLTTQFQNAISSKTLPTFLTNGVTYLLYKSGSTSEPKNYRPITCLPTTYKLLTSILKFKIMDHILANNIMATAQNGCKPRSRGTKELLLIDMTICQQVRRVKKNISMAWIDYKKAYDSVPHSWLSRVLDLYRLHPNLCSFLSVCMSQWTTRLCLPDMAGFSDSTDLLRIKRGIFQGDSLSPLWFCLAINPLSTLLMDSKIGYRLRRDGEVISHLLYMDDLKLYAPKKSDLVSLLKITEKFSNDIKMEFGVDKCAAIHVQRGRVVTSEELQLSENMSFRCLSESETYRYLGMAEGLGIADKEIKQSLTACFFSRLTKVLKSLLSGGNKVRAVNGWVMPALAYSFGILRWTQTELDALDRRVRRQLTLYRKHHPRSSVMRLYIPRKCGGRGFLNVKNLHNREVCNLREYFLQSTEGVHRDMANVDNSFTPLSLAKQNWRKPQVLSISDRTTIWKSKELHGRFYKALTGPDVDQLASVAWLRFSNLFGETEGFACAIMDEVIMTNNYRRHILKDGTADICRACHRPGESIRHIVSGCSRLANGEYLHRHNQVAKIVHQQLALKYSLVDTEVPYYQYQPAPVLDNGHVTLYWDRSIITDRTILANKPDIVIIDRLASRAMLVDVTIPHDENLVKAEKEKLTKYLDLAHEVTAMWHVDSTIIVPIVVSVNGLIAKSFDQHLKKLSLGCWIKGLIQKAVILDSARIVRRFLSLEP

SEQ ID NO: 27870 - protein, 1206 aa, Clostera curtula
MSQHTRRNPQRQCRLRAAYGTASARLTPQSSSSPSSEDEYHTPPVTAASSDDTGSPVPPAPRCSARRGRPLPASLMSTEQIATSMTSATGGSVRRMRWSQELNENVMRAYYGATVGGTNLTAYCSRMFALFQDLNPGTTVTVQRLSDQVRAIQRLQLLAQPVLDRLRLETLSSHPVVRPQPDPAVPAIAEQPDPLPLALAESLQNEEVNVNNQYNEQLRRALDDAILDYRDVPPSDRPRLPRLPMTKHNLALTSILDKILPSYFSTTENLTETHSILYCGAVAVCRVGGVRFPNHNRPTPQTTTTPAWQYRIEKRINAARTIIAKLLTFRSGNNRPRVMRFVHQAFEGTGIRPQEYTASVTERMDFYKQKIQAWAKRIRRFKKRSDRYNQNRLFQSDAKKVYRNWEQNSRQMSPGVTPDPVGMYSFWQDIWSQPVIHSEGEWMSVVRRACEPITAMGPINVDEADIARAISSAPNWKSPGPDSLHNFWLKRFHSSHVRLATQFQNAIATGSLPTFLTTGVTYLLYKSGSTSEPKNYRPITCLPTTYKLLTSILKFKIMEHILANNIMAPVQNGCKPRSRGTKELLLIDMTICQQVRRVKKNISMAWIDYKKAYDSVPHSWLSRVLDLYRLHPNLCSFLSVCMSQWTTRLCLPDMAGFSDSTGLLRIKRGIFQGDSLSPLWFCLAMNPLSTLLMDSKIGYRLRRDGEVISHLLYMDDLKLYAPKKSDLVSLLKITENFSKDIKMEFGVDKCAAIHVQRGRVVTSEELQLSENMSLRCLSESETYRYLGMAEGLGIADKEIKQSLTACFLSRLTKVLKSLLSGGNKARAVNGWVMPALAYSFGILRWTQSELDALDRKVRRQLTLYRMHHPRSSVMRLYIPRKCGGRGYLNVKNLHNREVCNLREYFLQSTEDVHRDVANVDNSFTPLSLAKQNWRKPQVLSISDRTTIWKSKELHGRFYKALTGPDVDQLASVAWLRFSNLFGETEGFACAIMDEVIMTNNYRRHILKDGTADICRACHRPGESIRHIVSGCSRLANGEYLHRHNQVAKIVHQQLALKYSLVDTEVPYYQYQPAPVLDNGHVTLYWDRSIITDRTILANKPDIVIIDRLASRAMLVDVTIPHDENLVKAEKEKLTKYLYLAHEVTAMWHVDSTIIVPIVVSVNGLIAKSFDQHLKKLSLSCWIKGLIQKAVILDSARIVRRFLSLEP

SEQ ID NO: 27871 - protein, 1206 aa, Clostera curtula
MSQHTRRNPQRQCRLRAAYGTASARLTPQSSSSPSSEDEYHTPPVTAASSDDTGSPVPPAPRCSARRGRPLPASLMSTEQIATSMTSATGGSVRRMRWSQELNENVMRAYYRATEGGTNLTAYRSRMFALFQDLNPGTTLTVQRLSDQVRAIQRLQLLAQPVLDRLRLETLSSRPVVRTQPDPAISAIAAQPDPPLLAPAELVQSEEVNVNNQYNEQLRRALDDAILEYRDVRPSDRPRLPRLPMTKHNLALTSILDKILPSYFNTTENLTETHSILYCGAVAVCRVGGVRFPNLNRPTPQTTTAPAWQYRIEKRINAARTIIAKLLTFRSGNNRPRVMRFVHQAFEGTGIRPQDYTASVTERMDFYKQKVQAWAKRIRRFKKRSDRYNQNRLFQSDAKKVYRNWEQNSGQMSPGVTPDPAGMYSFWQDIWSEPVRHSEGEWMSVVRRACEPITAMGPINIDEADIARAVSSAPNWKSPGPDSLHNFWLKRFHSSHVRLATQFQNAIATGSLPTFLTSGVTYLLYKSGSTSEPKNYRPITCLPTTYKLLTSILKFKIMEHILANNIMAPVQNGCKPRSRGTKELLLIDMAICQQVRRVKKNISMAWIDYKKAYDSVPHSWLSRVLDLYRLHPNLCSFLSVCMSQWTTRLCLPVMAGFSDSTGLLRIKRGIFQGDSLSPLWFCLAMNPLSTLLMDSKIGYRLRRDGEVISHLLYMDDLKLYAPKKSDLVSLLKITEIFSKDIKMEFGVDKCAAIHVQRGRVVTSEELQLSENMSLRCLSESETYRYLGMAEGLGIADKEIKQSLTACFLSRLTKVLKSLLSGGNKARAVNGWVMPALAYSFGILRWTQSELDALDRKVRRQLTLYRMHHPRSSVMRLYIPRKCGGRGFLNVKNLHNREVCNLREYFLQSTEDVHRDMANVDNSFTPLSLAKQNWRKPLVLSISDRTTIWKSKELHGRFYKALTGPYVDQLASVAWLRFSNLFGETEGFACAIMDEVIMTNNYRRHILKDGTADICRACHRPGESIRHIVSGCSRLANGEYLHRHNQVAKIVHQQLALKYSLVDTEVPYYQYQPAPVLDNGHVTLYWDRSIITDRTIPANKPDIVIIDRSASRAMLVDVTIPHDENLVKAEKEKLTKYLDLAHEVTAMWHVDSTIIVPIVVSVNGLIAKSFDQHIKKLSLSCWIKGLIQKAVILDSARIVRRFLSLEP

SEQ ID NO: 27872 - protein, 1206 aa, Clostera curtula
MSQSPRRNPPRRCRLRAAYGTASARLTPQSSSSSSSEDEYHTPPVTAASSDDAGSPVPPTAQRSARRGRPLPASLRSTEHTATSMASATGGSVRRMRWSQELNENVMRAYYGATEGGTNLTAYRSRMFALFQDLNPGTTVTVQRLSDQVRAIQRLQLLAQPVLDRLRLETLSSRPVVRPQPDPAVSAIAIQPDPPLLAPAELVQNEEVNVNNQYDEQLRRALDDAILVYRDVPASDRPRLPRLPMNKHILALTSVLNTFLQSHFDKSENLTETHSILYCGAVAVCRVGGVRFPNQNRLTTQMETIPAWQHRIELRINTARTIIAKLYAYKNGNSRPRVMRFVHQAFNGTGVRPQDYNAWITERIDFYKQKVQAWAKRIRRFKERSNRYKQNRLFQSDAKKVYRNWEQNSRQISLGVTPDPVRMYTFWQDIWAQPINHTEGDWMTIVRRSCEHITAMEQVIISQADIARAVRLAPNWKSPGPDGLHNFWLKRFHSSHERLATQFQNAISSKTLPTFLTNGVTYLLYKSGSTSEPKNYRPITCLPTTYKLLTSILKFKIMDHILANNIMATAQNGCKPRSRGTKELLLIDMTICQQVRRVKKNISMAWIDYKKAYDSVPHSWLSRVLDLYRLHPNLCSFLSVCMSQWTTRLCLPDMAGFSDSTGLLRIKRGIFQGDSLSPLWFCLAMNPLSTLLMHSKIGYRLRSDGEVISHLLYMDDLKLYAPKKSDLVSLLKITENFSNDIKMEFGVDKCAAIHVQRGRVVTSEELQLSENMSLRCLSESETYRYLGMAEGLGIADKEIKQSLTACFFSRLTKVLKSLLSGGNKVRAVNSWVMPALAYSFGILRWTQTELDALDRKVRRQLTLYRMHHPRSSVMRLYIPRKCGGRGFLNVKNLHNREVCNLREYFLQPTEGVHRDMANVDNSFTPLSLAKQNWRKPQVLSISDRTTIWKSKELHGRFYKALTGPDVDQLASVAWLRFSNLFGETEGFACAIMDEVIMTNNYRRHILKDGTADICRACHRPGESIRHIVSGCSRLANGEYLHRHNQVAKIVHQQLALKYSLVDTEVPYYQYQPAPVLDNGHVTLYWDRSIITDRTIPANKPDIVIIDRSASRAMLVDVTIPHDENLVKAEKEKLTKYLDLAHEVTAMWHVDSTIIVPIVVSVNGLIAKSFDQHLKKLSLGCWIKGLIQKAVILDSARIVRRFLSLEP

SEQ ID NO: 27873 - protein, 1206 aa, Clostera curtula
MSQSTRRNPPRRCRLRAAYGTASARLTPQSSSSSSSEDEYHTPPVTAASSDDAGSPVPPTAQRSARRGRPLPASLRSTEHTATSMASATGGSVRRMRWSQELNENVMRAYYGATEGGTNLTAYRSRMFALFQDLNPGTTVTVQRLSDQVRAIQRLQLLAQPVLDRLRLETLSSRPVVRPQPDPAVSAIAIQPDPPLLAPAELVQNEEVNVNNQYDEQLRRALDDAILVYRDVPASDRPRLPRLPMNKHILALTSVLNTFLQSHFDKSENLTETHSILYCGAVAVCRVGGVRFPNQNRLTTQMETIPAWQHRIELRINTARTIIAKLYAYKNGNSRPRVMRFVHQAFNGTGVRPQDYNAWITERIDFYKQKVQAWAKRIRRFKERSNRYKQNRLFQSDAKKVYRNWEQNSRQISLGLTPDPVRMYTFWQDIWAQPINHTEGDWMTIVRRSCEHITAMEQVIISQADIARAVRLAPNWKSPGPDGLHNFWLKRFHSSHERLATQFQNAISSKTLPTFLTNGVTYLLYKSGSTSEPKNYRPITCLPTTYKLLTSILKFKIMDHILANNIMATAQNGCKPRSRGTKELLLIDMTICQQVRRVKKNISMAWIDYKKAYDSVPHSWLSRVLDLYRLHPNLCSFLSVCMSQWTTRLCLPDMAGFSDSTGLLRIKRGIFQGDSLSPLWFCLSMNPLSTLLMDSKIGYRLRRDGEVISHLLYMDDLKLYAPKKSDLVSLLKITENFSNDIKMEFGVDKCAAIHVQRGRVVTSEELQLSENMSFRCLSESETYRYLGMAEGLGIADKEIKQSLTACFFSRLTKVLKSLLSGGNKVRAVNGWVMPALAYSFGILRWTQTELDALDRKVRRQLTLYRMHHPRSSVMRLYIPRKCGGRGFLNVKNLHNREVCNLREYFLQPTEGVHRDMANVDNSFTPLSLAKQNWRKPQVLSILDRTTIWKSKELHGRFYKALTGPDVDQLASVAWLRFSNLFGETEGFACAIMDEVIMTNNYRRHILKDGTADICRACHRPGESIRHIVSGCSRLANGEYLHRHNQVAKIVHQQLALKYSLVDTEVPYYQYQPAPVLDNGHVTLYWDRSIITDRTILANKPDIVIIDRLASRATLVDVTIPHDENLVKAEKEKLTKYLDLAHEVTAMWHVDSTIIVPIVVSVNGLIAKSFDQHLKKLSLGCWIKGLIQKAVILDSARIVRRFLSLEP

SEQ ID NO: 27874 - protein, 1206 aa, Clostera curtula
MSQHTRRNPQRQCRLRAAYGTASARLTPQSSSSPSSEDEYHTPPVTAASSDDTGSPVPPAPRCSARRGHPLPASLMSTEQIATSMTSATGGSVRRMRWSQQLNENVMRAYYGATEGGTNLTAYRSRMFALFQDLNPGTTVTVQRLSDQVRAIQRLQLLAQPVLDRLRLETLSSHPVVRPQPDPAVPAIAEQPDPLPLALAESLQNEEVNVNNQFIEQLRRALDDAILDYRDVPPSDRPRLPRLPMTKHNLALTSILDKILPSYFSTTENLTETHSILYCGAVAVCRVGRVRFPNHNRPTPQTTTTPAWQYRIEKRINAARTIIAKLLTFRSGNNRPRVMRFVHQAFEGTGIRPQEYTASVTERMDFYKQKIQAWAKRIRRFKKRSDRYNQNRLFQSDAKKVYRNWEQNSRQMSPGVTPDPVGMYSFWQDIWSQPVIHSEGEWMSVVRRACEPITAMGPINVDDADIARAISSAPNWKSPGPDSLHNFWLKRFHSSHVRLATQFQNAIATGSLPTFLTTGVTYLLYKSGSTSEPKNYRPITCLPTTYKLLTSILKFKIMEHILANNIMAPVQNGCKPRSRGTKELLLIDMTICQQVRRVKKNISMAWIDYKKAYDSVPHSWLSRVLDLYRLHPNLCSFLSVCMSQWTTRLCLPDMAGFSDSTGLLRIKRGIFQGDSLSPLWFCLAMNPLSTLLMDSKIGYRLRRDGEVISHLLYMDDLKLYAPKKSDLVSLLKITENFSKDIKMEFGVDKCAAIHVQRGRVVTSEELQLSENMSLRCLSESETYRYLGMAEGLGIADKEIKQSLTACFLSRLTKVLKSLLSGGNKARAVNGWVMPALAYSFGILRWTQSELDALDRKVRRQLTLYRMHHPRSSVMRLYIPRKCGGRGYLNVKNLHNREVCNLREYFLQSTEDVHRDVANVDNSFTPLSLAKQNWRKPQVLSISDRTTIWKSKELHGRFYKALTGPDVDQLASVAWLRFSNLFGETEGFACAIMDEVIMTNNYRRHILKDGTADICRACHRPGESIRHIVSGCSRLANGEYLHRHNQVAKIVHQQLALKYSLVDTEVPYYQYQPAPVLDNGHVTLYWDRSIITDRTIPANKPDIVIIDRLASRAMLVDVTIPHDENLVKAEKEKLTKYLDLAHEVTAMWHVDSTIIVPIVVSVNGLIAKSFDQHLKKLSLSCWIKGLIQKAVILDSARIVRRFLSLEP

SEQ ID NO: 27875 - protein, 1207 aa, Clostera curtula
MSEFALRRNPSRRCRLRAAYGTNSARPTSSSSSSSTSANEYHTPPVTAASSDDAGSPVPPAAQSSARRGRPLPASLRSTEHTATSMASATGGSVRRMRWSQELNENVMRAYYGATGGGTNLTAYRSRMFALFQDLNPGTTVTVQRLSDQVRAIQRLQLLAQPVLDRLRLETLSTRPVVRPQPDPAVSAIAVQPDPPLPAPSELVQNEEVNVNNQYDEQLRRALDDAILVYRDVPVSDRPRLPRLPMNKHILALTSVLNTFLQFHFDKSENLTETHSILYCGAVAVCRVGGVRFPNQNRPTTQMETIPAWQHRIELRINTARTIIAKLYTYKNGNSRPRVMRFVHQAFNGTGVRPQDYSAWITERIDFYKQKVQAWAKRIRRFKERSDRYKQNRLFQSDARKVYRNWEQNSRQISLGVTPDPVRMYTFWQDIWAQPINHTEGEWMTIVRRSCENITAMEQVIISQADIARAVRLAPNWKSPGPDGLHNFWLKRFHSSHERLATQFQNAISSKTLPTFLTNGVTYLLYKSGSTSEPKNYRPITCLPTTYKLLTSILKFKIMDHILANNIMATAQNGCKPRSRGTKELLLIDMTICQHVRRVKKNISMAWIDYKKAYDSVPHSWLSRVLDLYRLHPNLCSFLSVCMSQWTTRLCLPDMAGFSDSTDLLRIKRGIFQGDSLSPLWFCLAMNPLSTLLMDSKIGYRLRRDGEVISHLLYMDDLKLYAPKKSDLVSLLKITENFSNDIKMEFGVDKCAAIHVQRGRVVTSEELQLSENMSFRCLSESETYRYLGMAEGLGIADKEIKQSLTACFFSRLTKVLKSLLSGGNKVRAVNGWVMPALAYSFGILKWTQTELDALDRRVRRQLTLYRMHHPRSSVMRLYIPRKCGGRGFLNVKNLHNREVCNLREYFLQSIEDVHRDMANVDNSFTPLSLAKQNWRKPQVLSISDRTTIWKSKELHGRFYKALTGPDVDQLASVAWIRFSNLFGETEGFACAIMDEVIMTNNYRRHILKDGTADICRACHRPGESIRHIVSGCSRLANGEYLHRHNQVAKIVHQQLALKYSLVDTEVPYYQYQPAPVLDNGHVTLYWDRSIITDRTILANKPDIVIIDRSASRAMLVDVTIPHDENLVKAEKEKLTKYLDLAHEVTAMWHVDSTIIVPIVVSVNGLIAKSFDQHLKKLSLGCWIKGLIQKAVILDSARIVRRFLSLEP

SEQ ID NO: 27876 - protein, 1206 aa, Clostera curtula
MSQHTRRNPQRQCRLRAAYGTASARLTPQSSSSPSSEDEYHTPPVTAASSDDTGSPVPPAPRCSARRGRPLPASLMSTEQIATSMTSATGGSVRRMRWSQQLNENVMRAYYGATEGGTNLTAYRSRMFALFQDLNPGTTVTVQRLSDQVRAIQRLQLLAQPVLDRLRLETLSSHPVVRPQPDPAVPAIAEQPDPLPLALAESLQNEEVNVNNQYNEQLRRALDDAILDYRDVPPSDRPRLPRLPMTKHNLALTSILDKILPSYFSTTENLTETHSILYCGAVAVCRVGGVRFPNHNRPTPQTTTTPAWQYRIEKRINAARTIIAKLLTFRSGNNRPRVMRFVHQAFEGTGIRPQEYTASVTERMDFYKQKIQAWAKRIRRFKKRSDRYNQNRLFQSDAKKVYRNWEQNSRQMSPGVTPDPVGMYSFWQDIWSQPVIHSEGEWMSVVRRACEPITAMGPINVDEADIARAISSAPNWKSPGPDSLHNFWLKRFHSSHVRLATQFQNAIATGSLPTFLTTGVTYLLYKSGSTSEPKNYRPITCLPTTYKLLTSILKFKIMEHILANNIMAPVQNGCKPRSRGTKELLLIDMTICQQVRRVKKNISMAWIDYKKAYDSVPHSWLSRVLDLYRLHPNLCSFLSVCMSQWTTRLCLPDMAGFSDSTGLLRIKRGIFQGDSLSPLWFCLAMNPLSTLLMDSKIGYRLRRDGEVISHLLYMDDLKLYAPKKSDLVSLLKITENFSKDIKMEFGVDKCAAIHVQRGRVVTSEELQLSENMSLRCLSESETYRYLGMAEGLGIADKEIKQSLTACFLSRLTKVLKSLLSGGNKTRAVNGWVMPALAYSFGILRWTQSELDALDRKVRRQLTLYRMHHPRSSVMRLYIPRKCGGRGYLNVKNLHNREVCNLREYFLQSTEDVHRDVANVDNSFTPLSLAKQNWRKPQVLSISDRTTIWKSKELHGRFYKALTGPDVDQLASVAWLRFSNLFGETEGFACAIMDEIIMTNNYRRQILKDGTADICRACHRSGESIRHIVSGCSRLANGEYLHRHNQVAKIVHQQHALKYSLVDTEVPYYQYQPAPVLDNGHVTLYWDRSIITDRTILANKPDIVIIDRLASRAMLVDVTIPHDENLVKAEKEKLTKYLDLAHEVTAMWHVDSTIIVPIVVSVNGLIAKSFDQHLKKLSLSCWIKGLIQKAVILDSARIVRRFLSLEP

SEQ ID NO: 27877 - protein, 962 aa, Clostera curtula
MTKHNLALTSILDKILPTYFNISENLTETHSILYCGAVAVCRVGGVRFPNLNRPTPQATITPAWQYRIEKRINAARTIIAKLLTFRSGNNRPRVMRFVHQAFEGTGIRPQDYTASVTERMDFYKQKVQAWAKRIRRFKMRSNRYNQNRLFQSDAKKVYRNWEQNSRQMSPGVTPDPVGMYSFWQDIWSQPVIHSEGEWMSVIRRACEPITAMGPINVDEADIARAVSSAPKWKSPGPDSLHNFWLKRFHSSHVRLATQFQNAIASGSLPTFLTTGVTYLLYKSGSTSEPKNYRPITCLPTTYKLLTSILKFKIMEHILANNIMASVQNGCKPRSRGTKELLLIDMTICQQVRRVKKNISMAWIDYKKAYDSVPHSWLNRVLDLYRLHPNLCSFLSVCMSQWTTRLCLPDMAGFSDSTGLLRIKRGIFQGDSLSPLWFCLAMNPLSTLLMHSKIGYRLRSGGEVISHLLYMDDLKLYAPKKSDLVSLLKITENFSNDIKMEFGVDKCAAIHVQRGRVVTSEELQFSQNMSLRCLSESETYRYLGMAEGLGIADKEIKQSLTACFFSRLTKALKSLLSGGNKVRAVNGWVMPALAYSFGILRWTQTELDALDRKVRRQLTLYRMHHPRSSVMRLYIPRKCGGRGFLNVKNLHNREVCNLREYFLQPTEGVHRDMANVDNSFTPLSLAKQNWRKPQVLSISDRTTIWKSKELHGRFYKALTGPDVDQLASVAWLRFSNLFGETEGFACAIMDEVIMTNNYRRHILKDGTADICRACHRPGESIRHIVSGCSRLANGEYLHRHNQVAKIVHQQLALKYSLVDTEVPYYQYQPAPVLDNGHVTLYWDRSIITDRTIPANKPDIVIIDRSASRAMLVDVTIPHDENLVKAEKEKLTKYLDLAHEVTAMWHVDSTIIVPIVVSVNGLIAKSFDQHLKKLSLGCWIKGLIQKAVILDSARIVRRFLSLEP

SEQ ID NO: 27878 - protein, 1205 aa, Clostera curtula
MSAPRRNPSRRCRSRAAYGTYSARPTPSSSSSPTSGNEYHTPPVTAASSDDAGSPVPPAAQSSARRGRPLPASLRSTEHNATSMASATGGSVRRMRWSQQLNENVMRAYYGATEGGTNLTAYRSRMFTLFQDPNPGTTVTVQRLSDQVRAIQRLQLLAQPVLDRLRLETLSSHPVVRPQPDPAVPAIAEQPDPLPLALVESLQNEEVNVNNQYNEQLRRALDDAILEYRDVPPSDRPRLPRLPMTKHNLALTSILDKILPPYFSTTENLTETHSILYCGAVAVCRVGGVRFPNHNRPTPQTTTTPAWQYRIEKRINAARTIIAKLLTFRSGNNRPRVMRFVHQAFEGTGIRPQEYTASVTERMDFYKQKVQAWAKRIRRFKKRSDRYNQNRLFQSDAKKVYRNWEQNSRQMSPGVTPDPVGMYSFWQDIWSQPVIHSEGEWMSVVRRACEPITAMGPINVDEADIARAVSSAPNWKSPGPDSLHNFWLKRFHSSHVRLATQFQNAIATGSLPTFLTTGVTYLLYKSGSTSEPKNYRPITCLPTTYKLLTSILKFKIMEHILANNIMAPVQNGCKPRSRGTKELLLIDMTICQQVRRVKKNISMAWIDYKKAYDSVPHSWLSRVLDLYRLHPNLCSFLSVCMSQWTTRLCLPDMAGFSDSTGLLRIKRGIFQGDSLSPLWFCLAMNPLSTLLMDSKIGYRLRRDGEVISHLLYMDDLKLYAPKKSDLVSLLKITENFSKDIKMEFGVDKCAAIHVQRGRVVTSEELQLSENMSLRCLSESETYRYLGMAEGLGIADKEIKQSLTASFLSRLTKVLKSLLSGGNKARAVNGWVMPALAYSFGILRWTQSELDALDRKVRRQLTLYRMHHPRSSVMRLYIPRKCGGRGYLNVKNLHNREVCNLREYFLQSTEDVHRDVANVDNSFTPLSLAKQNWRKPQVLSISDRTTIWKSKELHGRFYKALTGPDVDQLASVAWLRFSNLFGETEGFACAIMDEVIMTNNYRRHILKDGTADICRACHRPGESIRHIVSGCSRLANGEYLHRHNQVAKIVHQQLALKYSLVDTEVPYYQYQPAPVLDNGHVTLYWDRSIITDRTIPANKPDIVIIDRLASRAMLVDVTIPHDENLVKAEKDKLTKYLDLAHEVTAMWHVDSTIIVPIVVSVNGLIAKSFDQHLKKLSLSCWIKGLIQKAVILDSARIVRRFLSLEP

SEQ ID NO: 27879 - protein, 1206 aa, Clostera curtula
MSQHTRRNPQRQCRLRAAYGTASARLTPQSSSSPSSEDEYHTPPVTAASSDDTGSPVPPAPRCSARRGRPLPASLMSTEQIATSMTSATGGSVRRMRWSQDLNENVMRAYYRATEGGTNLTAYRSRMFALFQDLNPGTTLTVQRLSDQVRAIQRLQLLAQPVLDRLRLETLSSRPVVRTQPDPAISAIAAQPDPPLLAPAELVQSEEVNVNNQYNEQLRRALDDAILEYRDVCPSDRPRLPRLPMTKHNLALTSILDKILPSYFNTTENLTETHSILYCGAVAVCRVGGVRFPNLNRPTPQTTTAPAWQYRIEKRINAARTIIAKLLTFRSGNNRPRVMRFVHQAFEGTGIRPQDYTASVTERMDFYKQKVQAWAKRIRRFKKRSDRYNQNRLFQSDAKKVYRNWEQNSGQMSPGVTPDPAGMYSFWQDIWSEPVRHSEGEWMSVVRRACEPITAMGPINIDEADIARAVSSAPNWKSPGPDSLHNFWLKRFHSSHVRLATQFQNAIATGSLPTFLTTGVTYLLYKSGSTSEPKNYRPITCLPTTYKLLTSILKFKIMEHILANNIMAPVQNGCKPRSRGTKELLLIDMTICQQVRRVKKNISMAWIDYKKAYDSVPHSWLSRVLDLYRLHPNLCSFLSACMSQWTTRLCLPVMAGFSDSTGLLRIKRGIFQGDSLSPLWFCLAMNPLSTLLMDSKIGYRLRRDGEVISHLLYMDDLKLYAPKKSDLVSLLKITEIFSKDIKMEFGVDKCAAIHVQRGRVVTSEELQLSENMSLRCLSESETYRYLGMAEGLGIADKEIKQSLTACFLSRLTKVLKSLLSGGNKARAVNGWVMPALAYSFGILRWTQSELDALDRKVRRQLTLYRMHHPRSSVMRLYIPRKCGGRGFLNVKNLHNREVCNLREYFLQSTEDVHRDMANVDNSFTPLSLAKQNWRKPLVLSISDRTTIWKSKELHGRFYKALTGPDVDQLASVAWLRFSNLFGETEGFACAIMDEVIMTNNYRRHILKDGTADICRACHRPGESIRHIVSGCSRLANGEYLHRHNQVAKIVHQQLALKYSLVDTEVPYYQYQPAPVLDNGHVTLYWDRSIITDRTIPANKPDIVIIDRSASRAMLVDVTIPHDENLVKAEKEKLTKYLDLAHEVTAMWHVDSTIIVPIVVSVNGLIAKSFDQHLKKLSLSCWIKGLIQKAVILDSARIVRRFLSLEP

SEQ ID NO: 27880 - protein, 1209 aa, Clostera curtula
MMLPTRRNPLRQCRQHVAIGTSSARPTQGTSSSSLSSSSEEAYFTPNSEGSSDVVTSPPEPSPLRRSTRRRPPPLPASLGSSDTSVPSMTPATGGVVRRMRWTLQLNESVMRAYYGATQGGTVLTAYRSRMLSLFQELNPTTTITAQRLSDQVRAIQRLNLLEQPVLDGLRLESLSALPAVNQRSVMSQAVTASVGSITQEPAESTHIDEVSVTNQFSEKLRSALEEAILEFRDIPISARPRLPRLPTHTQNIVLVGVLNNILKSYIHTCSTLSETHSLLYCGAIAACRVGGARFLNFHSSNRRTNTIPLWQCRIQKKIDSARTTIAKLYAFRMGNSRPRIMRYVVQAFAGTGISRHDYQAWITERIDFFKQKMYAWAKRIRRYKERSDRFTQNRLFQSDQKRIYRSWECPEQQFSGSSRPSRELVSSFWQNIWSVPATHSEGLWFNSVQRSCDSISEMDPVIICDEDVSSAIHGAPNWKAPGPDGLQNFWLKKFNCLHSVLATQFQNILDLGSLPAFMTTGVTYLLFKSGSTSEPNNYRPITCLPTLYKLLTSILKFKIMRHVSNNNILASVQNGCKPRSRGTKELLLIDMTICQQVRRVRKNISMAWVDYKKAYDSVPHSWLLRVCTLYKLHPNLCSFLHSCMSSWATRLCHMDGMDFSDSPDLIQIKRGIFQGDSLSPLWFCLALNPLSTLLRDSMLGYRLRRNGEIVSHLLYMDDVKLYAPNESDLVTLLKITHNFSNDIRMEFGIDKCAVIRVQRGQIVNSSGVDISESVFLHSLSESENYKYLGMSQGLCIADKDMKQLLTARFLGRVKKVFKSLLSGGNKARAFNSWAIPALSYSFGILKWTQTELDKLDRKVRRLMTSFRMHHPRSSVMRLYIPRKCGGRGYLNAKSLHNREVCNLRDYFVRIDDNLHRDVVSVDNGLTPLSMAKQNWRRLKVLTTPDRIAVWQSKELHGRFYRAFTGPDVDQQASISWLSFGNLFAETEGFVCAIMDEVVMTNNYRRHIIKDGTVDICRACRCPGESIRHIVSGCSRLANGEYLHRHNQVAKIIHQQLALKYGLIDSEIPYYQYQPAPVLDNGLITLYWDRSIITDRTIVANRPDLVLIDRSVRKAMIVDITIPHDYNLIKAETEKLSKYLDLAHEITSMWGVDSTIIVPIVVSVNGLIAKSFNRYLEKLSLSCWVKHLAQKAVLLETARIVRRFLSADP

SEQ ID NO: 27881 - protein, 1206 aa, Clostera curtula
MSQHTRRNPQRQCRLRAAYGTASARLTPQSSSSPSSEDEYHTPPVTAASSDDTGSPVPPAPRCSARRGRPLPASLMSTEQIATSMTSATGGSVRRMRWSQQLNENVMRAYYGATEGGTNLTAYRSRMFALFQDLNPGTTVTVQRLSDQVRAIQRLQLLAQPVLNRLRLETLSSHPVVRPQPDPAVPAIAEQPDPLPLALAESLQNEEVNVNNQYNEQLRRALDDAILDYRDVPPSDRPRLPRLPMTKHNLALTSILDKILPSYFSTTENLTETHSILYCGAVAVCRVGGVRFPNHNRPTPQTTTTPAWQYRIEKRINAARTIIAKLLTFRSGNNRPRVMRFVHQAFEGTGIRPQEYTASVTERMDFYKQKIQAWAKRIRRFKKRSDRYNQNRLFQSDAKKVYRNWEQNSRQMSPGVTPDPVGMYSFWQDIWSQPVIHSEGEWMSVVRRACEPITAMGPINVDEADIARAISSAPNWKSPGPDSLHNFWLKRFHSSHVRLATQFQNAIATGSLPTFLTTGVTYLLYKSGSTSEPKNYRPITCLPTTYKLLTSILKFKIMEHILANNIMAPVQNGCKPRSRGTKELLLIDMTICQQVRRVKKNISMAWIDYKKAYDSVPHSWLSRVLDLYRLHPNLCSFLSVCMSQWTTRLCLPDMAGFSDSTGLLRIKRGIFQGDSLSPLWFCLAMNPLSTLLMDSKIGYRLRRDGEVISHLLYMDDLKLYAPKKSDLVSLLKITENFSKDIKMEFGVDKCAAIHVQRGRVVTSEELQLSENMSLRCLSESETYRYLGMAEGLGIADKEIKQSLTACFLSRLTKVLKSLLSGGNKARAVNGWVMPALTYSFGILRWTQSELDALDRKVRRQLTLYRMHHPRSSVMRLYIPRKCGGRGYLNVKNLHNREVCNLREYFLQSTEDVHRDVANVDNSFTPLSLAKQNWRKPQVLSISDRTTIWKSKELHGRFYKALTGPDVDQLASVAWLRFSNLFGETEGFACAIMDEVIMTNNYRRHILKDGTADICRACHRPGESIRHIVSGCSRLANGEYLHRHNQVAKIVHQQLALKYSLVDTEVPYYQYQPAPVLDNGHVTLYWDRSIITDRTIPANKPDIVIIDRLASRAMLVDVTIPHDENLVKAEKEKLTKYLDLAHEVTAMWHVDSTIIVPIVVSVNGLIAKSFDQHLKKLSLSCWIKGLIQKAVILDSARIVRRFLSLEP

SEQ ID NO: 27882 - protein, 1206 aa, Clostera curtula
MSQHTRRNPQRQCRLRAAYGTASARLTPQSSSSPSSEDEYHTPPVTAASSDDTGSPVPPAPRCSARRGRPLPASLMSTEQIATSMTSATGGSVRRMRWSQKLNENVMRAYYRATEGGTNPTAYRSRMFALFQDLNPGTTLTVQRLSDQVRAIQRLQLLAQPVLDRLRLETLSSRPVVRTQPDPAISAIAVQPDPPLLAPVELVQSEEVNVNNQYNEQLRRALDDAILEYRDVRPSDRPRLPRLPMTKHNLALTSILDKILPSYFNTTENLTETHSILYCGAVAVCRVGGVRFPNLNRPTPQTTTTPAWQYRIEKRINAARTIIAKLLTFRSGNNRPRVMRFVHQAFEGTGIRPQDYTASVTERMDFYKQKVQAWAKRIRRFKKRSDRYNQNRLFQSDAKKVYRNWEENSGQMSPGVTPDPAGMYSFWQDIWSEPVIHSEGEWMSVVRRACEPITAMGPINIDEADIARAVSSAPNWKSPGPDSLHNFWLKRFHSSHVRLATQFQNAIATGSLPTFLTTGVTYLLYKSGSTSEPKNYRPITCLPTTYKLLTSILKFKIMEHILANNIMAPVQNGCKPRSRGTKELLLIDMTICQQVRRVKKNISMAWIDYKKAYDSVPHSWLSRVLDLYRLHPNLCSFLSVCMSQWTTRLCLPVMAGFSDSTGLLRIKRGIFQGDSLSPLWFCLAMNPLSTLLMDSKIGYRLRRDGEVISHLLYMDDLKLYAPKKSDLVSLLKITEIFSKDIKMEFGVDKCAAIHVQRGRVVTSEELQLSENMSLRCLSESETYRYLGMAEGLGIADKEIKQSLTACFLSRLTKVLKSLLSGGNKARAVNGWVMPALAYSFGILRWTQSELDALDRKVRRQLTLYRMHHPRSSVMRLYIPRKCGGRGFLNVKNLHNREVCNLREYFLQSTEDVHRDMANVDNSFTPLSLAKQNWRRPQVLSISDRTTIWKSKELHGRFYKALTGPDVDQLASVAWLRFSNLFGETEGFACAIMDEVIMTNNYRRHILKDGTADICRACHRPGESIRHIVSGCSRLANGEYLHRHNQVAKIVHQQLALKYSLVDTEVPYYQYQPAPVLDNGHVTLYWDRSIITDRTIPANKPDIVIIDRSASRAMLVDVTIPHDENLVKAEKEKLTKYLDLAHEVTAMWHVDSTIIVPIVVSVNGLIAKSFDQHLKKLSLSFWIKGLIQKAVILDSARIVRRFLSLEP

SEQ ID NO: 27883 - protein, 1207 aa, Clostera curtula
MSDSAPRRNPSRRCRLRAAYGTNCARPTSSSSSSPTSGNEYHTPPVTAASSDDAGSPVPPAAQSSARRGRPLPASLRSTEHTATSMASATGGSVRRMRWSQELNEKVMRAYYGATEGGTNLTAYRSRMFALFQDLNPGTTVTVQRLSDQVRAIQRLQLLAQPVLDRLRLETLSSRPVVRPQPDPAVSAIAVQPDPPLVAPAELVQNEEVNVNNQYDEQLRRALDDAILVYRDVPASDRPRLPRLPMNKHILALTSVLNTFLQSHFDKSENLTETHSILYCGAVAVCRVGGVRFPNQNRPTTQMETIPAWQHRIELRINTARTIIAKLYTYKNGNSRPRVMRFVHQAFNGTGVRPQDYSAWITERIDFYKQKVQAWAKRIRRFKERSDRYKQNRLFQSDAKKVYRNWEQNSRQISLGVTPDPVRMYTFWQDIWAQPINHTEGEWMTIVRRSCEHITAMEQVIISQADIARALRLAPNWKSPGPDGLHNFWLKRFHSSHERLATQFHNAISSKTLPKFLTNGVTYLLYKSGSTSEPKNYRPITCLPTTYKLLTSILKFKIMDHILANNIMATAQNGCKPRSRGTKELLLIDMTICQQVRRVKKNISMAWIDYKKAYDSVPHSWLSRVLDLYRLHPNLCSFLSVCMSQWTTRLCLPDMAGFSDSTGLLRIKRGIFQGDSLSPLWFCLAMNPLSTLLMDSKIGYLLRRDGEVISHLLYMDDLKLYAPKKSDLVSLLKITENFSNDIKMEFGVDKCAAIHVQRGRVVTSEELQLSENMSFRCLSESETYRYLGMAEGLGIADKEIKQALTTCFFSRLTKVLKSLLSGGNKVRAVNGWVMPALAYSFGILRWTQTELDALDRRVRRQLTLYRMHHPRSSVMRLYIPRKCGGRGFLNVKNLHNREVCNLREYFLQSTEDVHRDMANVDNSFTPLSLAKQNWRKPQVLSISDRTTIWKSKELHGRFYKALTGPDVDQLASVAWLRFSNLFGETEGFTCAIMDEVIMTNNYRRHILKDGTADICRACHRPGESIRHIVSGCSRLANGEYLHRHNQVAKIVHQQLALKYSLVDTEVPYYQYQPAPVLDNGHVTLYWDRSIITDRTILANKPDIVIIDRSASRAMLVDVTIPHDENLVKAEKEKLTKYLDLAHEVTAMWHVDSTIIVPIVVSVNGLIAKSFDQHLKKLSLGCWIKGLIQKAVILDSARIVRRFLSLEP

SEQ ID NO: 27884 - protein, 868 aa, Clostera curtula
MRFVHQAFEGTGIRPQEYTASVTERMDFYKQKIQAWAKRIRRFKKRSDRYNQNRLFQSDAKKVYRNWEQNSRQMSPGVTPDPVGMYSFWQDIWSQPVIHSEGEWMSVVRRACEPITAMGPINVDEADIARAISSAPNWKSPGPDSLHNFWLKRFHSSHVRLATQFQNAIATGSLPTFLTTGVTYLLYKSGSTSEPKNYRPITCLPTTYKLLTSILKFKIMEHILANNIMAPVQNGCKPRSRGTKELLLIDMTICQQVRRVKKNISMAWIDYKKAYDSVPHSWLSRVLDLYRLHPNLCSFLSVCMCQWTTRLCLPDMAGFSDSTGLLRIKRGIFQGDSLSPLWFCLAMNPLSTLLMDSKIGYRLRRDGEVISHLLYMDDLKLYAPKKSDLVSLLKITENFSKDIKMEFGVDKCAAIHVQRGRVVTSEELQLSENMSLRCLSESETYRYLGMAEGLGIADKEIKQSLTACFLSRLTKVLKSLLSGGNKARAVNGWVMPALAYSFGILRWTQSELDALDRRVRRQLTLYRMHHPRSSVMRLYIPRKCGGRGYLNVKNLHNREVCNLREYFLQSTEDVHRDVANVDNSFTPLSLAKQNWRKPQVLSISDRTTIWKSKELHGRFYKALTGPDVDQLASVAWLRFSNLFGETEGFACAIMDEVIMTNNYRRHILKDGTADICRACHRPGESIRHIVSGCSRLANGEYLHRHNQVAKIVHQQLALKYSLVDTEVPYYQYQPAPVLDNGHVTLYWDRSIITDRTILANKPDIVIIDRLASRAMLVDVTIPHDENLVKAEKEKLTKYLDLAHEVTAMWHVDSTIIVPIVVSVNGLIAKSFDQHLKKLSLSCWIKGLIQKAVILDSARIVRRFLSLEP

SEQ ID NO: 27885 - protein, 1206 aa, Clostera curtula
MSQHTRRNPQRQCRLRAAYGTASARLTPQSSSSPSSEDEYHTPPVTAASSDDTGSPVPPAPRCSARRGRPLPASLMSTEQIATSMTSATGGSVRRMRWSQELNENVKRAYYGATEGGTNLTAYRSRMFALFQDLNPGTTVTVQRLSDQVRAIQRLQLLAQPVLDRLRLETLSSRPVVRPQPDPAVSAIAIQPDPPLLAPAELVQNEEVNVNNQYDEQLRRALDDAILVYRDVPASDRPRLPRLPMNKHILALTSVLNTFLQSHFDKSENLTETHSILYCGAVAVCRVGGVRFPNQNRLTTQMETIPAWQHRIELRINTARTIIAKLYAYKNGNSRPRVMRFVHQAFNGTGVRPQDYNAWITERIDFYKQKVQAWAKRIRRFKERSNRYKQNRLFQSDAKKVYRNWEQNSRQISLGVTPDPVRMYTFWQDIWAQPINHTEGDWMTIVRRSCEHITAMEQVIISQADIARAVRLAPNWKSPGPDGLHNFWLKRFHSSHERLATQFQNAISSKTLPTFLTNGVTYLLYKSGSTSEPKNYRPITCLPTTYKLLTSILKFKIMDHILANNIMATAQNGCKPRSRGTKELLLIDMTICQQVRRVKKNISMAWIDYKKAYDSVPHSWLSRVLDLYRLHPNLCSFLSVCMSQWTTRLCLPDMAGFSDSTGLLRIKRGIFQGDSLSPLWFCLAMNPLSTLLMDSKIGYRLRRDGEVISHLLYMDDLKLYAPKKSDLVSLLKITENFSNDIKMEFGVDKCAAIHVQRGRVVTSEELQLSENMSFRCLSESETYRYLGMAEGLGIADKEIKQALTTCFFSRLTKVLKSLLSGGNKVRAVNGWVMPALAYSFGILRWTQTELDALDRRVRRQFTLYRMHHPRSSVMRLYIPRKCGGRGFLNVKTLHNREVCNLREYFLQSTEDVHRDMANVDNSFTPLSLAKQNWRKPQVLSISDRTTIWKSKELHGRFYKALTGPDVDQLASVAWLRFSNLFGETEGFACAIMDEVIMTNNYRRHILKDGTADICRACHRPGESIRHIVSGCSRLANGEYLHRHNQVAKIVHQQLALKYSLVDTEVPYYQYQPAPVLDNGHVTLYWDRSIITDRTILANKPDIVIIDRLASRAMLVDVTIPHDENLVKAEKEKLTKYLDLAHEVTALWHVDSTIIVPIVVSVNGLIAKSFDQHLKKLSLGCWIKGLIQKAVILDSARIVRRFLSLEP

SEQ ID NO: 27886 - protein, 1207 aa, Clostera curtula
MSDSAPRRNPSRRCRLRAAYGTNCARPTSSSSSSPTSGNEYHTPPVTAASSDDAGSPVPPAAQSSARRGRPLPASLRSTEHTATSMASATGGSVRRMRWSQELNEKVMRAYYGATEGGTNLTAYRSRMFALFQDLNPGTTVTVQRLSDQVRAIQRLQLLAQPVLDRLRLETLSSRPVVRPQPDPAVSAIAVQPDPPLVAPAELVQNEEVNVNNQYDEQLRRALDDAILVYRDVPASDRPRLPRLPMNKHILALTSVLNTFLQSHFDKSENLTETHSILYCGAVAVCRVGGVRFPNQNRPTTQMETIPAWQHRIELRINTARTIIAKLYTYKNGNSRPRVMRFVHQAFNGTGVRPQDYSAWITERIDFYKQKVQAWAKRIRRFKERSDRYKQNRLFQSDAKKVYRNWEQNSRQISLGVTPDPVRMYTFWQDIWAQPINHTEGEWMTIVRRSCEHITAMEQVIISQADIARALRLAPNWKSPGPDGLHNFWLKRFHSSHERLATQFHNAISSKTLPTFLTNGVTYLLYKSGSTSEPKNYRPITCLPTTYKLLTSILKFKIMDHILANNIMATAQNGCKPRSRGTKELLLIDMTICQQVRRVKKNISMAWIDYKKAYDSVPHSWLSRVLDLYRLHPNLCSFLSVCMSQWTTRLCLPDMAGFSDSTGLLRIKRGIFQGDSLSPLWFCLAMNPLSTLLMDSKIGYLLRRDGEVISHLLYMDDLKLYAPKKSDLVSLLKITENFSNDIKMEFGVDKCAAIHVQRGRVVTSEELQLSENMSFRCLSESETYRYLGMAEGLGIADKEIKQALTTCFVSRLTKVLKSLLSGGNKVRAVNGWVMPALAYSFGILRWTQTELDALDRGVRRQLTLYRMHHPRSSVMRLYIPRKCGGRGFLNVKNLHNREVCNLREYFLQSTEDVHRDMANVDNSFTPLSLAKQNWRKPQVLSISDRTTIWKSKELHGRFYKALTGPDVDQLASVAWLRFSNLFGETEGFTCAIMDEVIMTNNYRRHILKDGTADICRACHRPGESIRHIVSGCSRLANGEYLHRHNQVAKIVHQQLALKYSLVDTEVPYYQYQPAPVLDNGHVTLYWDRSIITDRTILANKPDIVIIDRSASRAMLVDVTIPHDENLVKAEKEKLTKYLDLAHEVTAMWHVDSTIIVPIVVSVNGLIAKSFDQHLKKLSLGCWIKGLIQKAVILDSARIVRRFLSLEP

SEQ ID NO: 27887 - protein, 876 aa, Clostera curtula
MGNSRPRIMRYVVQAFAGTGISRHDYQAWITERIDFFKQKMYAWAKRIRRYKERSDRFTQNRLFQSDQKRIYRSWECPEQQFSGSSRPSRELVSSFWQNIWSVPATHSEGLWFNSVQRSCDSISEMDPVIICDEDVSSAIHGAPNWKAPGPDGLQNFWLKKFNCLHSVLATQFQNILDLGSLPAFMTTGVTYLLFKSGSTSEPNNYRPITCLPTLYKLLTSILKFKIMRHVSNNNILASVQNGCKPRSRGTKELLLIDMTICQQVRRVRKNISMAWVDYKKAYDSVPHSWLLRVCTLYKLHPNLCSFLHSCMSSWATRLCHMDGMDFSDSPDLIQIKRGIFQGDSLSPLWFCLALNPLSTLLRDSMLGYRLRRNGEIVSHLLYMDDVKLYAPNESDLVTLLKITHNFSNDIRMEFGIDKCAVIRVQRGQIVNSSGVDISESVFLHSLSESENYKYLGMSQGLCIADKDMKQLLTARFLGRVKKVFKSLLSGGNKARAFNSWAIPALSYSFGILKWTQTELDKLDRKVRRLMTSFRMHHPRSSVMRLYIPRKCGGRGYLNAKSLHNREVCNLRDYFVRIDDNLHRDVVSVDNGLTPLSMAKQNWRRLKVLTTPDRIAVWQSKELHGRFYRAFTGPDVDQQASISWLSFGNLFAETEGFVCAIMDEVVMTNNYRRHIIKDGTVDICRACRCPGESIRHIVSGCSRLANGEYLHRHNQVAKIIHQQLALKYGLIDSEIPYYQYQPAPVLDNGLITLYWDRSIITDRTIVANRPDLVLIDRSVRKAMIVDITIPHDDNLIKAETEKLSKYLDLAHEITSMWGVDSTIIVPIVVSVNGLIAKSFNRYLEKLSLSCWVKHLAQKAVLLETARIVRRFLSADP

SEQ ID NO: 27888 - protein, 1209 aa, Clostera curtula
MMLPTRRNPLRQCRQHVAIGTSSARPTQGTSSSSLSSSSEEAYFTPNSEGSSDVVTSPPEPSPLRRSTRRRPPPLPASLGSSDTSVPSMTPATGGVVRRMRWTLQLNESVMRAYYGATQGGTVLTAYRSRMLSLFQELNPTTTITAQRLSDQVRAIQRLNLLEQPVLDGLRLESLSALPAVNQRSVMSQAVTASVGSITQEPAESTHIDEVSVTNQFSEKLRSALEEAILEFRDIPISARPRLPRLPTHTQNIVLVGVLNNILKSYIHTCSTLSETHSLLYCGAIAACRVGGARFLNFHSSNRRTNTIPLWQCRIQKKIDSARTTIAKLYAFRMGNSRPRIMRYVVQAFAGTGISRHDYQAWITERIDFFKQKMYAWAKRIRRYKERSDRFTQNRLFQSDQKRIYRSWECPEQQFSGSSRPSRELVSSFWQNIWSVPATHSEGLWFNSVQRSCDSISEMDPVIICDEDVSSAIHGAPNWKAPGPDGLQNFWLKKFNCLHSVLATQFQNILDLGSLPAFMTTGVTYLLFKSGSTSEPNNYRPITCLPTLYKLLTSILKFKIMRHVSNNNILASVQNGCKPRSRGTKELLLIDMTICQQVRRVRKNISMAWVDYKKAYDSVPHSWLLRVCTLYKLHPNLCSFLHSCMSSWATRLCHMDGMDFSDSPDLIQIKRGIFQGDSLSPLWFCLALNPLSTLLRDSMLGYRLRRNGEIVSHLLYMDDVKLYAPNESDLVTLLKITHNFSNDIRMEFGIDKCAVIRVQRGQIVNSSGVDISESVFLHSLSESENYKYLGMSQGLCIADKDMKQLLTARFLGRVKKVFKSLLSGGNKARAFNSWAIPALSYSFGILKWTQTELDKLDRKVRRLMTSFRMHHPRSSVMRLYIPRKCGGRGYLNAKSLHNREVCNLRDYFVRIDNNLHRDVVSVDNGFTPLSMAKQNWRRLKVLTTPDRIAVWQSKELHGRFNRAFTGPDVDQQASISWLSFGNLFAETEGFVCAIMDEVVMTNNYRRHIIKDGTVDICRACRCPGESIRHIISGCSRLANGEYLHRHNQVAKIIHQQLALKYGLIDSEIPYYQYQPAPVLDNGLITLYWDRSIITDRTIVANRPDLVLIDRSVRKAMIVDITIPHDDNLIKAETEKLSKYLDLAHEITSMWGVDSTIIVPIVVSVNGLIAKSFNRYLEKLSLSCWVKHLAQKAVLLETARIVRRFLSADP

SEQ ID NO: 27889 - protein, 1207 aa, Clostera curtula
MSEFALRRNPSRRCRLRAAYGTNSARPTSSSSSSSTSANEYHTPPVTAASSDDAGSPVPPAAQSSARRGRPLPASLRSTEHTATSMASATGGSVRRMRWSQELNENVMRAYYGATGGGTNLTAYRSRMFALFQDLNPGTTVTVQRLSDQVRAIQRLQLLAQPVLDRLRLETLSTRPVVRPQPDPAVSAIAVQPDPPLPAPAELVQNEEVNVNNQYDEQLRKALDDAILVYRDVAVSDRPRLPRLPMNKHILALTSVLNTFLQFHFDKSENLTETHSILYCGAVAVCRVGGVRFPNQNRLTRQMETIPAWQHRIELRINTARTIIAKLYAYKNGNSRPRVMRFVHQAFNGTGVRPQDYSAWITERIDFYKQKVQAWAKRIRRFKERSDRYKQNRLFQSDARKVYRNWEQNSRQISLGVTPDPVRMYTFWQDIWAQPINHTEGEWMTIVRRSCENITAMEQVIINQADIARAVRLAPNWKSPGPDGLHNFWLKRFHSSHERLATQFQNAISSKTLPTFLTNGVTYLLYKSGSTSEPKNYRPITCLPTTYKLLTSILKFKIMDHILANNIMATAQNGCKPRSRGTKELLLIDMTICQQVRRVKKNISMAWIDYKKAYDSVPHSWLSRVLDLYRLHPNLCSFLSVCMSQWTTRLCLPDMAGFSDSTDLLRIKRGIFQGDSLSPLWFCLAMNPLSTLLMDSKIGYRLRRDGEVISHLLYMDDLKLYAPKKSDLVSLLKITENFSNDIKMEFGVDKCAAIHVQRGRVVTSEELQLSENMSFRCLSESETYRYLGMAEGLGIADKEIKQSLTACFFSRLTKVLKSLLSGGNKVRAVNGWVMPALAYSFGILRWTQTELDALDRRVRRQLTLYRMHHPRSSVMRLYIPRKCGGRGFLNVKNLHNREVCNLREYFLQSTEDVHRDMANVDNSFTPLSLAKQNWRKPQVLSISDRTTIWKSKELHGRFYKALTGPDVDQLASVAWLRFSNLFGETEGFACAIMDEVIMTNNYRRHILKDGTADICRACHRPGESIRHIVSGCSRLANGEYLHRHNQVAKIVHQQLALKYSLVDTEVPYYQYQPAPVLDNGHVTLYWDRSIITDRTILANKPDIVIIDRSASRAMLVDVTIPHDENLVKAEKEKLTKYLDLAHEVTAMWHVDSTIIVPIVVSVNGLIAKSFDQHLKKLSLGCWIKGLIQKAVILDSARIVRRFLSLEP

SEQ ID NO: 27890 - protein, 867 aa, Clostera curtula
MRFVHQAFEGTGIRPQEYTASVTERMDFYKQKVQAWAKRIRRFKKRSDRYNQNRLFQSDAKKVYRNWEQNSRQMSPGVTPDPVGMYSFWQDIWSQPVIHSEGEWMSVVRRACEPITAMGPINVDEADIARAVSSAPNWKSPGPDSLHNFWLKRFHSSHVRLATQFQNAIATGSLPTFLTTGVTYLLYKSGSTSEPKNYRPITCLPTTYKLLTSILKFKIMEHILANNIMAPVQNGCKPRSRGTKELLLIDMTICQQVRRVKKNISMAWIDYKKAYDSVPHSWLSRVLDLYRLHPNLCSFLSVCMSQWTTRLCLPDMAGFSDSTGLLRIKRGIFQGDSLSPLWFCLAMNPLSTLLMDSKIGYRLRRDGEVISHLLYMDDLKLYAPKKSDLVSLLKITENFSKDIKMEFGVDKCAAIHLQRGRVVTSEELQLSENMSLRCLSESETYRYLGMAEGLGIADKEIKQSLTACFLSRLTKVLKSLLSGGNKARAVNGWVMPALAYSFGILRWTQSELDALDRKVRRQLTLYRMHHPRSSVMRLYIPRKCGGRGYLNVKNLHNREVCNLREYFLQSTEDVHRDVANVDNSFTPLSLAKQNWRKPQVLSISDRTTIWKSKELHGRFYKALTGPDVDQLASVAWLRFSNLFGETEGFACAIMDEVIMTNNYRRHILKDGTADICRACHRPGESIRHIVSGCSRLANGEYLHRHNQVAKIVHQQLALKYSLVDTEVPYYQYQPAPVLDNGHVTLYWDRSIITDRTIPANKPDIVIIDRLASRAMLDVTIPHDENLVKAEKDKLTKYLDLAHEVTAIWHVDSTIIVPIVVSVNGLIAKSFDQHLKKLSLNCWIKGLIQKAVILDSARIVRRFLSLEP

SEQ ID NO: 27891 - protein, 868 aa, Clostera curtula
MRFVHQAFEGTGIRPQEYTASVTERMDFYKQKIQAWAKRIRRFKKRSDRYNQNRLFQSDAKKVYRNWEQNSRQMSPGVTPDPVGMYSFWQDIWSQPVIHSEGEWMSVVRRACEPITAMGPINVDEADIARAISSAPNWKSPGPDSLHNFWLKRFHSSHVRLATQFQNAIATGSLPTFLTTGVTYLLYKSGSTSEPKNYRPITCLPTTYKLLTSILKFKIMEHILANNIMAPVQNGCKPRSRGTKELLLIDMTICQQVRRVKKNISMAWIDYKKAYDSVPHSWLSRVLDLYRLHPNLCSFLSVCMSQWTTRLCLPDMAGFSDSTGLLRIKRGIFQGDSLSPLWFCLAMNPLSTLLMDSKIGYRLRRDGEVISHLLYMDDLKLYAPKKSDLVSLLKITENFSKDIKMEFGVDKCAAIHVQRGRVVTSEELQLSENMSLRCLSESETYRYLGMAEGLGIADKEIKQSLTACFLSRLTKVLKSLLSGGNKARAVNGWVMPALAYSFGILRWTQSELDALDRKVRRQLTLYRMHHPRSSVMRLYIPRKCGGRGYLNVKNLHNREVCNLREYFLQSTEDVHRDVANVDNSFTPLSLAKQNWRKPQVLSISDRTTIWKSKELHGRFYKALTGPDVDQLASVAWLRFSNLFGETEGFACAIMDEVIMTNNYRRHILKDGTADICRACHRPGESIRHIVSGCSRLANGEYLHRHNQVAKIVHQQLALKYSLVDTEVPYYQYQPAPVLDNGHVTLYWDRSIITDRTILANKPDIVIIDRLASRAMLVDVTIPHDENLVKAEKEKLTKYLDLAHEVTAMWHVDSTIIVPIVVSVNGLIAKSFDQHLKKLSLSCWIKGLIQKAVILDSARIVRRFLSLEP

SEQ ID NO: 27892 - protein, 1207 aa, Clostera curtula
MSDSAPRRNPSRRCRLRAAYGTNCARPTSSSSSSPTSGNEYHTPPVTAASSDDAGSPVPPAAQSSARRGRPLPASLRSTEHTATLMASATGGSVRRMRWSQELNEKVMRAYYGATEGGTNLTAYRSRMFALFQDLNPGTTVTVQRLSDQVRAIQRLQLLAQPVLDRLRLETLSSRPVVRPQPDPAVSAIAVQPDPPLVAPAELVQNEEVNVNNQYDEQLRRALDDAILVYRDVPASDRPRLPRLPMNKHILALTSVLNTFLQSHFDKSENLTETHSILYCGAVAVCRVGGVRFPNQNRPTTQMETIPAWQHRIELRINTARTIIAKLYTYKNGNSRPRVMRFVHQAFNGTGVRPQDYSAWITERIDFYKQKVQAWAKRIRRFKERSDRYKQNRLFQSDAKKVYRNWEQNSRQISLGVTPDPVRMYTFWQDIWAQPINHTEGEWMTIVRRSCEHITAMEQVIISQADIARALRLAPNWKSPGPDGLHNFWLKRFHSSHERLATQFHNAISSKTLPTFLTNGVTYLLYKSGSTSEPKNYRPITCLPTTYKLLTSILKFKIMDHILANNIMATAQNGCKPRSRGTKELLLIDMTICQQVRRVKKNISMAWIDYKKAYDSVPHSWLSRVLDLYRLHPNLCSFLSVCMSQWTTRLCLPDMAGFSDSTGLLRIKRGIFQGDSLSPLWFCLAMNPLSTLLMDSKIGYLLRRDGEVISHLLYMDDLKLYAPKKSDLVSLLKITENFSNDIKMEFGVDKCAAIHVQRGRVVTSEELQLSENMSFRCLSESETYRYLGMAEGLGIADKEIKQALTTCFFSRLTKVLKSLLSGGNKVRAVNGWVMPALAYSFGILRWTQTELDALDRRVRRQLTLYRMHHPRSSVMRLYIPRKCGGRGFLNVKNLHNREVCNLREYFLQSTEDVHRDMANVDNSFTPLSLAKQNWRKPQVLSISDRTTIWKSKELHGRFYKALTGPDVDQLASVAWLRFSNLFGETEGFTCAIMDEVIMTNNYRRHILKDGTADICRACHRPGESIRHIVSGCSRLANGEYLHRHNQVAKIIHQQLALKYSLVDTEVPYYQYQPAPVLDNGHVTLYWDRSIITDRTILANKPDIVIIDRSASRAMLVDVTIPHDENLVKAEKEKLTKYLDLAHEVTAMWHVDSTIIVPIVVSVNGLIAKSFDQHLKKLSLGCWIKGLIQKAVILDSARIVRRFLSLEP

SEQ ID NO: 27893 - protein, 1205 aa, Clostera curtula
MSAPRRNPSRRCRSRAAYGTYSARPTPSSSSSPTSGNEYHTPPVTAASSDDAGSPVPPAAQSSARRGRPLPASLRSTEHNATSMASATGGSVRRMRWSQQLNENVMRAYYGATEGGTNLTAYRSRMFTLFQDLNPGTTVTVQRLSDQVRAIQRLQLLAQPVLDRLRLETLSSHPVVRPQPDTAVPAIAEQPDPLPLALVESLQNEEVNVNNQYNEQLRRALDDAILEYRDVPPSDRPRLPRLPMTKHNLALTSILDKILPPYFSTTENLTETHSILYCGAVAVCRVGGVRFPNHNRPTPQTTTTPAWQYRIEKRINAARTIIAKLLTFRSGNNRPRVMRFVHQAFEGTGIRPQEYTASVTERMDFYKQKVQAWAKRIRRFKKRSDRYNQNRLFQSDAKKVYRNWEQNSRQMSPGVTPDPVGMYSFWQDIWSQPVIHSEGEWMSFVRRACEPITAMGPINVDEADIARAVSSAPNWKSPGPDSLHNFWLKRFHSSHVRLATQFQNAIATGSLPTFLTTGVTYLLYKSGSTSEPKNYRPITCLPTTYKLLTSILKFKIMEHILANNIMAPVQNGCKPRSRGTKELLFIDMTICQQVRRVKKNISMAWIDYKKAYDSVPHSWLSRVLDLYRLHPNLCSFLSVCMSQWTTRLCLPDMAGFSDSTGLLRIKRGIFQGDSLSPLWFCLAMNPLSTLLMDSKIGYRLRRDGEVISHLLYMDDLKLYAPKKSDLVSLLKITENFSKDIKMEFGVDKCAAIHVQRGRVVTSEELQLSENMSLRCLSESETYRYLGMAEGLGIADKEIKQSLTASFLSRLTKVLKSLLSGGNKARAVNGWVMPALAYSFGILRWTQSELDALDRKVRRQLTLYRMHHPRSSVMRLYIPRKCGGRGYLNVKNLHNREVCNLREYFLQSTEDVHRDVANVDNSFTPLSLAKQNWRKPQVLSISDRTTIWKSKELHGRFYKALTGPDVDQLASVAWLRFSNLFGETEGFACAIMDEVIMTNNYRRHILKDGTADICRACHRPGESIRHIVSGCSRLANGEYLHIHNQVAKIVHQQLALKYSLVDTEVPYYQYQPAPVLDNGHVTLYWDRSIITDRTIPANKPDIVIIDRLASRAMLVDVTIPHDENLVKAEKDKLTKYLDLAHEVTAMWHVDSTIIVPIVVSVNGLIAKSFDQHLKKLSLSCWIKGLIQKAVILDSARIVRRFLSLEP

SEQ ID NO: 27894 - protein, 1205 aa, Clostera curtula
MSAPRRNPSRRCRSRAAYGTYSARPTPSSSSSPTSGNEYHTPPVTAASSDDAGSPVPPAAQSSARRGRPLPASLRSTEHNATSMASATGGSVRRMRWSQQLNENVMRAYYGATEGGTNLTAYRSRMFTLFQDLNPGTTVTVQRLSDQVRAIQRLQLLAQPVLDRLRLETLSSHPVVRPQPDPAVPAIAEQPDPLPLALVESLQNEEVNVNNQYNEQLRRALDDAILEYRDVPPSDRPRLPRLPMTKHNLALTSILDKILPPYFSTTENLTETHSILYCGAVAVCRVGGVRFPNHNRPTPQTTTTPAWQYRIEKRINAARTIIAKLLTFRSGNNRPRVMRFVHQAFEGTGIRPQEYTASVTERMDFYKQKVQAWAKRIRRFKKRSDRYNQNRLFQSDAKKVYRNWEQNSRQMSPGVTPDPVGMYSFWQDIWSQPVIHSEGEWMSVVRRACEPITAMGPINVDEADIARAVSSAPNWKSPGPDSLHNFWLKRFHSSHVRLATQFQNAIATGSLPTFLTTGVTYLLYKSGSTSEPKNYRPITCLPTTYKLLTSILKFKIMEHILANNIMAPVQNGCKPRSRGTKELLLIDMTICQQVRRVKKNISMAWIDYKKAYDSVPHSWLSRVLDLYRLHPNLCSFLSVCMSQWTTRLCLPDMAGFSDSTGLLRIKRGIFQGDSLSPLWFCLAMNPLSTLLMDSKIGYRLRRDGEVISHLLYMDDLKLYAPKKSDLVSLLKITENFSKDIKMEFGVDKCAAIHVQRGRVVTSEELQLSENMSLRCLSESETYRYLGMAEGLGIADKEIKQSLTACFLSRLTKVLKSLLSGGNKARAVNGWVMPALAYSFGILRWTQSELDALDRKVRRQLTLYRMHHPRSSVMRLYIPRKCGGRGYLNVKNLHNREVCNLREYFLQSTEDVHRDVANVDNSFTPLSLAKQNWRKPQVLSISDRTTIWKSKELHGRFYKALTGPDVDQLASVAWLRFSNLFGETEGFACAIMDEVIMTNNYRRHILKDGTADICRACHRPGESIRHIVSGCSRLANGEYLHRHNQVAKIVHQQLALKNSLVDTEVPYYQYQPAPVLDNGHVTLYWDRSIITDRTIPANKPDIVIIDRLASRAMLVDVTIPHDENLVKAEKDKLTKYLDLAHEVTAIWHVDSTIIVPIVVSVNGLIAKSFDQHLKKLSLNCWIKGLIQKAVILDSARIVRRFLSLEP

SEQ ID NO: 27895 - protein, 962 aa, Clostera curtula
MTKHNLALTSILDKILPSYFNTTENLTETHSILYCGAVAVCRVGGVRFPNLNRPTPQTTTTPAWQYRIEKRINAARTIIAKLLTFRSGNNRPRVMRFVHQAFEGTGIRPQDYTASVTERMDFYKQKVQAWAKRIRRFKKRSDRYNQNRLFQSDAKKVYRNWEENSGQMSPGVTPDPAGMYSFWQDIWSEPVIHSEGEWMSVVRRACEPITAMGPINIDEADIARAVSSAPNWKSLGPDSLHNFWLKRFHSSHVRLATQFQNAIATGSLPTFLTTGVTYLLYKSGSTSEPKNYRPITCLPTTYKLLTSILKFKIMEHILANNIMAPVQNGCKPRSRGTKELLLIDMTICQQVRRVKKNISMAWIDYKKAYDSVPHSWLSRVLDLYRLHPNLCSFLSVCMSQWTTRLCLPVMAGFSDSTGLLRIKRGIFQGDSLSPLWFCLAMNPLSTLLMDSKIGYRLRRDGEVISHLLYMDDLKLYAPKKSDLVSLLKITEIFSKDIKMEFGVDKCAAIHVQRGRVVTSEELQLSENMSLRCLSESETYRYLGMAEGLGIADKEIKQSLTACFLSRLTKVLKSLLSGGNKARAVNGWVMPALAYSFGILRWTQSELDALDRKVRRQLTLYRMHHPRSSVMRLYIPRKCGGRGFLNVKNLHNREVCNLREYFLQSTEDVHRDMANVDNSFTPLSLAKQNWRRPQVLSISDRTTIWKSKELHGRFYKALTGPDVDQLASVAWLRFSNLFGETEGFACAIMDEVIMTNNYRRHILKDGTADICRACHRPGESIRHIVSGCSRLANGEYLHRHNQVAKIVHQQLALKYSLVDTEVPYYQYQPAPVLDNGHVTLYWDRSIITDRTIPANKPDIVIIDRSASRAMLVDVTIPHDENLVKAEKEKLTKYLDLAHEVTTMWHVDSTIIVPIVVSVNGLIAKSFDQHLKKLSLSFWIKGLIQKAVILDSARIVRRFLSLEP

SEQ ID NO: 27896 - protein, 1206 aa, Clostera curtula
MSQHTRRNPQRQCRLRAAYGTASARLTPQSSSSPSSEDEYHTPPVTAASSDDTGSPVPPAPRCSARRGRPLPASLMSTEQIATSMTSATGGSVRRMRWSQELNENVMRAYYRATEGGTNLTAYRSRMFALFQDLNPGTTLTVQRLSDQVRAIQRLQLLAQPVLDRLRLETLSSRPVVRTQPDPAISAIAVQPDAPLLAPAELVQSEEVNVNNQYNEQLRRALDDAILEYRDVRPSDRPRLPRLPMTKHNLALTSILDKILPSYFNTTENLTETHSILYCGAVAVCRVGGVRFPNLNRPIPQTTTTPAWQYRIEKRINAARTIIAKLLTFRSGNNRPRVMRFVHQAFEGTGIRPQEYTASVTERMDFYKQKVQAWAKRIERFLKRSDRYNQNRLFQSDAKKVYRNWEQNSRQMSPGVTPDPVGMYSFWQDIWSQPVIHSEGEWMSVVRRACEPITAMGPINVDEADIARALSSAPNWKSSGPDSLHNFWLKRFHSSHVRLATQFQNAIATGSLPTFLTTGVTYLLYKSGSTSEPKNYRPITCLPTTYKLLTSILKFKIMEHILANNIMAPVQNGCKPRSRGTKELLLIDMTICQQVRRVKKNISMAWIDYKKAYDSVPHSWLSRVLDLYRLHPNLCSFLRVCMSQWTTRLCLPDMAGFSDSTGLLRIKRGIFQGDSLSPLWFCLAMNPLSTLLMDSTIGYRLRRDGEVISHLLYMDDLKLYAPKKSDLVSLLKITENFSKDIKMEFGVDKCAAIHVQRGRVVTSEELQLSENMSLRCLSESKTYRYLGMAEGLGIADKEIKQSLTACFLSRLTKVLKSLLSGGNKARAVNGWVMPALAYSFGILRWTQSELDTLDRKVRRQLTLYRMHHPRSSVMRLYIPRKCGGRGYLNVKNLHNREVCNLREYFLQSTEDVHRDVANVDNSFTPLSLAKQNWRKPQVLSISDRTTIWKSKELHGRFYKALTGPDVDQLASVAWLRFSNLFGETEGFACAIMDEVIMTNNYRRHILKDGTADICRACHRPGESIRHIVSGCSRLANGEYLHRHNQVAKIVHQQLALKYSLVDTEVPYYQYQPAPVLDNGHVTLYWDRSIITDRTIPANKPDIVIIDRLASRAMLVDVTIPHDENLVKAEKDKLTKYLDLAHEVTAMWHVDSTIIVPIVVSVNGLIAKSFDQHLKKLSLSCWIKGLIQKAVILDSARIVRRFLSLEP

SEQ ID NO: 27897 - protein, 1206 aa, Clostera curtula
MSQSTRRNPPRRCRLRAAYGTASARLTPQSSSSSSSEDEYHTPPVTAASSDDAGSPVPPTAQRSARRGRPLPASLRSTEHTATSMASATGGSVRRMRWSQELNENVMRAYYGATEGGTNLTAYRSRMFALFQDLNPGTTVTVQRLSDQVRAIQRLQLLAQPVLDRLRLETLSSRPVVRPQPDPAVSAIAIQPDPPLLAPAELVQNEEVNVNNHYDEQLRRALDDAILVYRDVPASDRPRLPRLPMNKHILALTSVLNTFLQSHFDKSENLTETHSILYCGAVAVCRVGGVRFPNQNRPTTQMETIPAWQHRIELRINTGRTIIAKLYAYKNGNSRPRVMRFVHQAFNGTGVRPQDYNAWITERIDFYKQKVQAWAKRIRRFKERSNRYKQNRLFQSDAKKVYRNWEQNSRQISLGVTPDPVRMYTFWQDIWAQPINHTEGDWMTIVRRSCEHITAMEQVIISQADIARAVRLAPNWKSPGPDGLHNFWLKRFHSSHERLATQFQNAISSKTLPTFLTNGVTYLLYKSGSTSEPKNYRPITCLPTTYKLLTSILKFKIMDHILANNIMATAQNGCKPRSRGTKELLLIDMTICQQVRRVKKNISMAWIDYKKAYDSVPHSWLSRVLDLYRLHPNLCSFLSVCMSQWTTRLCLPDMAGFSDSTGLLRIKRGIFQGDSLSPLWFCLAMNPLSTLLMDSKIGYRLRRDGEVISHLLYMDDLKLYAPKKSDLVSLLKITENFSNDIKMEFGVDKCAAIHVQRGRVVTSEELQLSENMSFRCLSESETYRYLGMAEGLGIADKEIKQALTTCFFSRLTKVLKSLLSGGNKVRAVNGWVMPALAYSFGILRWTQTELDALDRRVRRQFTLYRMHHPRSSVMRLYIPRKCGGRGFLNVKTLHNREVCNLREYFLQSTEDVHRDMANVDNSFTPLSLAKQNWRKPQVLSISDRTTIWKSKELHGRFYKALTGPDVDQLASVAWLRFSNLFGETEGFACAIMDEVIMTNNYRRHILKDGTADICRACHRPGESIRHIVSGCSRLANGEYLHRHNQVAKIVHQQLALKYSLVDTEVPYYQYQPAPVLDNGHVTLYWDRSIITDRTILANKPDIVIIDRLASRAMLVDVTIPHDENLVKAEKEKLTKYLDLAHEVTAMWHVDSTIIVPIVVSVNGLIAKSFDQHLKKLSLGCWIKGLIQKAVILDSARIVRRFLSLEP

SEQ ID NO: 27898 - protein, 1207 aa, Clostera curtula
MSEFALRRNPSRRCRLRAAYGTNSARPTSSSSSSSTSANEYHTPPVTAASSDDAGSPVPPAAQSSARRGRPLPASLRSTEHTATSMASATGGSVRRMRWAQELNENVMRAYYGATGGGTNLTAYRSRMFALFQDLNPGTTVTVQRLSDQVRAIQRLQLLAQPVLDRLRLETLSTRPVVRPQPDPAVSAIAVQPDPPLPAPAELVQNEEVNVNNQYDEQLRRALDDAILVYRDVPVSDRPRLPRLPMNKHILALTSVLNTFLQFHFDKSENLTETHSILYCGAVAVCRVGGVRFPNQNRLTRQMETIPAWQHRIELRINTARTIIAKLYAYKNGNSRPRVMRFVHQAFNGTGVRPQDYSAWITERIDFYKQKVQAWAKRIRRFKERSDRYKQNRLFQSDARKVYRNWEQNSRQISLGVTPDPVRMYTFWQDIWAQPINHTEGEWMTIVRRSCENITAMEQVIISQADIARAVRLAPNWKSPGPDGLHNFWLKRFHSSHERLATQFQNAISSKTLPTFLTNGVTYLLYKSGSTSEPKNYRPITCLPTTYKLLTSILKFKIMDHILANNIMATAQNGCKPRSRGTKELLLIDMTICQQVRRVKKNISMAWIDYKKAYDSVPHSWLSRVLDLYRLHPNLCSFLSVCMSQWTTRLCLPDMAGFSDSTDLLRIKRGIFQGDSLSPLWFCLAMNPLSTLLMDSKIGYRLRRDGEVISHLLYMDDLKLYAPKKSDLVSLLKITENFSNDIKMEFGVDKCAAIHVQRGRVVTSKELQLSENMSFRCLSESETYRYLGMAEGLGIADKEIKQSLTACFFSRLTKVLKSLLSGGNKVRAVNGWVMPALAYSFGILRWTQTELDALDRRVRRQLTLYRMHHPRSSVMRLYIPRKCGGRGFLNVKNLHNREVCNLREYFLQSSEDVHRDMANVDNSFTPLSLAKQNWRKPQVLSISDRTTIWKSKELHGRFYKALTGPDVDQLASVAWLRFSNLFGETEGFACAIMDEVIMTNNYRRHILKDGTADICRACHRPGESIRHIVSGCSRLANGEYLHRHNQVAKIVHQQLALKYSLVDTEVPYYQYQPAPVLDNGHVTLYWDRSIITDRTILANKPDIVIIDRSASRAMLVDVTIPHDENLVKAEKEKLTKYLDLAHEVTAMWHVDSTIIVPIVVSVNGLIAKSFDQHLKKLSLGCWIKGLIQKAVILDSARIVRRFLSLEP

SEQ ID NO: 27899 - protein, 1201 aa, Clostera curtula
MATRRNPNRRCKQAAHLGARLPSPQVSSCSSNEEFFTPTSGTSSDETEVQTASAPRRPVRRGRPPLPARLGPSEQTGPSTAPATGGSVRRMRWSQQINENVMRAYYGATEGGTNLTAYRSRMFALFQDLNPGTTVTVQRLSDQVRAIQRLQLLAQPVLDRLRLETLSSRPVVHPQPDPAISAIAVQPDPLILAPAELVQSEEVNVNNQYNEQLRRALDDAILEYRDVLPTDRPRLPRLPMTKHNLALTSILDKILPTYFNISENLTETHSILYCGAVAVCRIGGVRFPNLNRPTPQATITPAWQYRIEKRINAARTIIAKLLTFRSGNNRPRVMRFVHQAFEGTGIRPQDYTASVTERMDFYKQKVQAWAKRIRRFKMRSNRYNQNRLFQSDAKKVYRNWEQNSRQMSPGVTPDPVGMYSFWQDIWSQPVIHSEGEWMSVIRRACEPITAMGPINVDEADIARAVSSAPNWKSPGPDSLHNFWLKRFHSSHVRLATQFQNAIASGSLPTFLTTGVTYLLYKSGSTSEPKNYRPITCLPTTYKLLTSILKFKIMEHILANNIMASVQNGCKPRSRATKELLLIDMTICQQVRRVKKNISMAWIDYKKAYDSVPHSWLSRVLDLYRLHPNLCSFLSVCMSQWTTRLCLPDMAGFSDSTGLLRIKRGIFQGDSLSPLWFCLAMNPLSTLLMHSKIGYRLRSGGEVISHLLYMDDLKLYAPKKSDLVSLLKITENFSNDIKMEFGVDKCAAIHVQRGRVVTSEELQLSQNMSLRCLSESETYRYLGMAEGLGIADKEIKQSLTACFFSRLTKVLKSLLSGGNKVRAVNGWVMPALAYSFGILRWTQTELDALDRKVRRQLTLYRMHHPRSSVMRLYIPRKCGGRGFLNVKNLHNREVCNLREYFLQPTEGVHRDMANVDNSFTPLSLAKQNWRKPQVLSISDRTTIWKSKELHGRFYKALTGPDVDQLASVAWLRFSNLFGETEGFACAIMDEVIMTNNYRRHILKDGTADICRACHRPGESIRHIVSGCSRLANGEYLHRHNQVAKIVHQQLALKYSLVDTEVPYYQYQPAPVLDNGHVTLYWDRSIITDRTIPANKPDIVIVDRSASRAMLVDVTIPHDENLVKAEKEKLTKYLDLAHEVTAMWHVDSTIIVPIVVSVNGLIAKSFDQHLKKLSLGCWIKGLIQKAVILDSARIVRRFLSLEP

SEQ ID NO: 27900 - protein, 1195 aa, Papilio alexanor
MRRNPRRQCRVAESELARPTPSRPALVCATTGDWIPVAPPALMTSSGAAIVGPPLTATSSTTPMRSGRPPPARLESSGVNPPPTAPATGGVVRRMRWHLLNESVMRAYFGATEGGTNLTAYRPKMLSLFQTLHPSVSVSAQRLSDQVRVIQRRHLLDDSVLERLRHEARPLHNAAEVRSVAPVAPVAADVLTEPPSEEVCVSDQDIERLRRTLEDVILNYRSLSISDRPRLPRLPINKRNICIVNAVDRLLSPYVDSSLDLCDTHSILYCGALTACRVAGVGIINPNSGSRRGEARPVWQCRIERRINVARRLIAKLLCFRAGNNRPKVMRFVTQAFAGTGITSNEYMPRVMERIDFWKQKVFAWANRLRRYRERSERFIQNRIFQRDQRCIYRIWEQPQSQGLDLQRPDATVTTAFWSGIWSVPIDHTEGEWLNVVRRSCEAVTEMEPVVITGSDISAAVRSVPNWKSPGPDGLQNFWLKWFRSSHERLAAQFQLAIELGTLPDFMTSGITHLIYKSGCSTDPKNYRPITCLPTIYKLLTSILRIKIEAHICTNNVLSATQNGCKVGSRGTKDCLLIDMAICQQVRRSKKNISMAWIDYKKAYDSVPHGWLSKVLEVYKIHPTLRTFLNSCMGQWTTSFSNPGQGNLSTSSSRIGIRRGIFQGDSLSPLWFCLALNPLSTLLKSSELGYRLRRGGEIISHLLYMDDLKLYASKKSDLMTLLKITDDFSRAIGMTFGVDKCAVINVQKGKVVASENLHLTQDVSLVSLSEDESYKYLGMSEALGINDKGMKQLVKERFFCRLKKVLKSLLSGGNKCRAFNSWVMPVLAYSFGILRWSQTELDALDRKVRRLLTAYRMHHPRSSVMRLYIPRKHGGRGYLNAKTLHNHEVYNLREYFLKVNVGMYQDVVAMDKGVTPLSLATTNWRRLPVLSVSDRISVWKSKELHGRFHRALTGPDVDQLSSVAWLRFSNLFGETEGFVFAIMDEVIVTNNYRKHILKDGTIDICRACRRPGESIRHIVSGCSRLADGAYLHRHNQVAKIIHQQLALKYALVDTEVPYYQYQPSPVLENSYITLYWDRSIITDRTITANRPDIVIIDRSEGCVMLVDVTIPHDENLVKAEKEKLLKYLDLAHEITAMWRMKSTTIIPIVVSVNGLIAKSFDQHLKKLSLNSWIKGLIQKAVILETARIVRRFLSL

SEQ ID NO: 27901 - protein, 1206 aa, Clostera curtula
MSQHTRRNPQRQCRLRAAYGTASARLTPQSSSSPSSEDEYHTPPVTAASSDDTGSPVPPAPRCSARRGRPLPASLMSTEQIATSMTSATGGSVRRMRWSQELNENVMRAYYRATEGGTNLTAYRSRMFALFQDLNPGTTLTVQRLSDQVRAIQRLQLLAQPVLDRLRLETLSSRPVVRTQPDPAISAIAVQPDAPLLAPAELVQSEEVNVNNQYNEQLRRALDDAILEYRDVRPSDRPRLPRLPMTKHNLALTSILDKILPSYFNTTENLTETHSILYCGAVAVCRVGGVRFPNLNRPIPQTTTTPAWQYRIEKRINAARTIIAKLLTFRSGNNRPRVMRFVHQAFEGTGIRPQEYTASVTERMDFYKQKVQAWAKRIERFLKRSDRYNQNRLFQSDAKKVYRNWEQNSRQMSPGVTPDPVGMYSFWQDIWSQPVIHSEGEWMSVVRRACEPITAMGPINVDEADIARALSSAPNWKSSGPDSLHNFWLKRFHSSHVRLATQFQNAIATGSLPTFLTTGVTYLLYKSGSTSEPKNYRPITCLPTTYKLLTSILKFKIMEHILANNIMAPVQNGCKPRSRGTKELLLIDMTICQQVRRVKKNISMAWIDYKKAYDSVPHSWLSRVLDLYRLHPNLCSFLRVCMSQWTTRLCLPDMAGFSDSTGLLRIKRGIFQGDSLSPLWFCLAMNPLSTLLMDSTIGYRLRRDGEVISHLLYMDDLKLYAPKKSDLVSLLKITENFSKDIKMEFGVDKCAAIHVQRGRVVTSEELQLSENMSLRCLSESKTYRYLGMAEGLGIADKEIKQSLTACFLSRLTKVLKSLLSGGNKARAVNGWVMPALAYSFGILRWTQSELDTLDRKVRRQLTLYRMHHPRSSVMRLYIPRKCGGRGYLNVKNLHNREVCNLREYFLQSTEDVHRDVANVDNSFTPLSLAKQNWRKPQVLSISDRTTIWKSKELHGRFYKALTGPDVDQLASVAWLRFSNLFGETEGFACAIMDEVIMTNNYRRHIQKDGTADICRACHRPGESIRHIVSGCSRLANGEYLHRHNQVAKIVHQQLALKYSLVDTEVPYYQYQPAPVLDNGHVTLYWDRSIITDRTIPANKPDIVIIDRLASRAMLVDVTIPHDENLVKAEKDKLTKYLDLAHEVTAMWHVDSTIIVPIVVSVNGLIAKSFDQHLKKLSLSCWIKGLIQKAVILDSARIVRRFLSLEP

SEQ ID NO: 27902 - protein, 1205 aa, Clostera curtula
MSAPRRNPSRRCRSRAAYGTYSARPTPSSSSSPTSGNEYHTPPVTAASSDDAGSPVPPAAQSSARRGRPLPASLRSTEHNATSMASATGGSVRRMRWSQQLNENVMRAYYGATEGGTNLTAYRSRMFTLFQDLNPGTTVTVQRLSDQVRAIQRLQLLAQPVLDRLRLETLSSHPVVRPQPDPAVPAIAEQPDPLPLALVESLQNEEVNVNNQYNEQLRRALDDAILEYRDVPPSDRPRLPRLPMTKHNLALTSILDKILPPYFSTTENLTETHSILYCGAVAVCRVGGVRFPNHNRPTPQTTTTPAWQYRIEKRINAARTIIAKLLTFRSGNNRPRVMRFVHQAFEGTGIRPQEYTASVTERMDFYKQKVQAWAKRIRRFKKRSDRYNQNRLFQSDAKKVYRNWEQNSRQMSPGVTPDPVGMYSFWQDIWSQPVIHSEGEWMSVVRRACEPITAMGPINVDEADIARAVSSAPNWKSPGPDSLHNFWLKRFHSSHVRLATQFQNAIATGSLPTFLTTGVTYLLYKSGSTSEPKNYRPITCLPTTYKLLTSILKFKIMEHILANNIMAPVQNGCKPRSRGTKELLLIDMTICQQVRRVKKNISMAWIDYKKAYDSVPHSWLSRVLDLYRLHPNLCSFLSVCMSQWTTRLCLPDMAGFSDSTGLLRIKRGIFQGDSLSPLWFCLAMNPLSTLLMDSEIGYRLRRDGEVISHLLYMDDLKLYAPKKSDLVSLLKITENFSKDIKMEFGVDKCAAIHVQRGRVVTSEELQLSENMSLRCLSESETYRYLGMAEGLGIADKEIKQSLTACFLSRLTKVLNSLLSGGNKARAVNGWVMPALAYSFGILRWTQSELDALDRKVRRQLTLYRMHHPRSSVMRLYIPRKCGGRGYLNVKNLHNREVCNLREYFLQSTEDVHRDVANVDNSFTPLSLAKQNWRKPQVLSISDRTTIWKSKELHGRFYKALTGPDVDQLASVAWLRFSNLFGETEGFACAIMDEVIMTNNYRRHILKDGTADICRACHRPGESIRHIVSGCSRLANGEYLHRHNQVAKIVHQQLALKYSLVDTEVPYYQYQPAPVLDNGHVTLYWDRSIITDRTIPANKPDIVIIDRLASRAMLVDVTIPHDENLVKAEKDKLTKYLDLAHEVTAMWHVDSTIIVPIVVSVNGLIAKSFDQHLKKLSLSCWIKGLIQKAVILDSARIVRRFLSLEP

SEQ ID NO: 27903 - protein, 1121 aa, Clostera curtula
MTPATGGVVRRMRWTLQLNESVMRAYYGATQGGTVLTAYRSRMLSLFQELNPTTTITAQRLSDQVRAIQRLNLLEQPVLDGLRLESLSALPAVNQRSVMSQAVTASVGSITQEPAESTHIDEVSVTNQFSEKLRSALEEAILEFRDIPISARPRLPRLPTHTQNIVLVGVLNNILKSYIHTCSTLSETHSLLYCGAIAACRVGGARFLNFHSSNRRTNTIPLWQCRIQKKIDSARTTIAKLYAFRMGNSRPRIMRYVVQAFAGTGISRHDYQAWITERIDFFKQKMYAWAKRIRRYKERSDRFTQNRLFQSDQKRIYRSWECPEQQFSGSSRPSRELVSSFWQNIWSVPATHSEGLWFNSVQRSCDSISEMDPVIICDEDVSSAIHGAPNWKAPGPDGLQNFWLKKFNCLHSVLATQFQNILDLGSLPAFMTTGVTYLLFKSGSTSEPNNYRPITCLPTLYRLLTSILKFKIMRHVSNNNILASVQNGCKPRSRGTKELLLIDMTICQQVRRVRKNISMAWVDYKKAYDSVPHSWLLRVCTLYKLHPNLCSFLHSCMSSWATRLCHMDGMDFSDSPDLIQIKRGIFQGDSLSPLWFCLALNPLSTLLRDSMLGYRLRRNGEIVSHLLYMDDVKLYAPNESDLVTLLKITHNFSNDIRMEFGIDKCAVIRVQRGQIVNSSGVDISESVFLHSLSESENYKYLGMSQGLCIADKDMKQLLTARFLGRVKKVFKSLLSGGNKARAFNSWAIPALSYSFGILKWTQTELDKLDRKVRRLMTSFRMHHPRSSVMRLYIPRKCGGRGYLNAKSLHNREVCNLRDYFVRIDDNLHRDVVSVDNGLTPLSMAKQNWRRLKVLTTPDRIAVWQSKELHGRFYRAFTGPDVDQQASISWLSFGNLFAETEGFVCAIMDEVVMTNNYRRHIIKDGTVDICRACRCPGESIRHIVSGCSRLANGEYLHRHNQVAKIIHQQLALKYGLIDSEIPYYQYQPAPVLDNGLITLYWDRSIITDRTIVANRPDLVLIDRSVRKAMIVDITIPHDDNLIKAETEKLSKYLDLAHEITSMWGVDSTIIVPIVVSVNGLIAKSFNRYLEKLSLSCWVKHLAQKAVLLETARIVRRFLSADP

SEQ ID NO: 27904 - protein, 1201 aa, Clostera curtula
MATRRNPNRRCKQAAHLGARLPSPRVSSCSSNEEFFTPTSGTSSDETEVQTASAPRRPVRRGRPPLPARLGPSEQTGPSTAPATGGSVRRMRWSQQINENVMRAYYGATEGGTNLTAYRSRMFALFQDLNPGTTVTVQRLSDQVRAIQRLQLLAQPVLDRLRLETLSSRPVVHPQPDPAISAIAVQPDPLILAPAELVQSEEVNVNNQYNEQLRRALDDAILEYRDVLPTDRPRLPRLPMTKHNLALTSTLDKILPTYFNISENLTETHSILYCGAVAVCRVGGVRFPNLNRPTPQATITPAWQYRIEKRINAARTIIAKLLTFRSGNNRPRVMRFVHQAFEGTGIRPQDYTASVTERMDFYKQKVQAWAKRIRRFKMRSNRYNQNRLFQSDAKKVYRNWEQNSRQMSPGVTPDPVGMYSFWQDIWSQPVIHSEGEWMSVIRRACEPITAMGPINVDEADIARAVSSAPNWKSPGPDSLHSFWLKRFHSSHVRLATQFQNAIASGSLPTFLTTGVTYLLYKSGSTSEPKNYRPITCLPTTYKLLTSILKFKIMEHILANNIMASVQNGCKPRSRGTKELLLIDMTICQQVRRVKKNISMAWIDYKKAYDSVPHSWLSRVLDLYRLHPNLCSFLSVCMSQWTTRLCLPDMAGFSDSTGLLRIKRGIFQGDSLSPLWFCLAMNPLSTLLMHSKIGYRLRSDGEVISHLLYMDDLKLYAPKKSDLVSLLKITENFSNDIKMEFGVDKCAAIHVQRGRVVTSEELQLSQNMSLRCLSESETYRYLGMAEGLGIADKEIKQSLSACFFSRLTKVLKSLLSGGNKVRAVNGWVMPALAYSFGILRWTQTELDALDRKVRRQLTLYRMHHPRSSVMRLYIPRKCGGRGFLNVKNLHNREVCNLREYFLQPTEGVHRDMANVDNSFTPLSLAKQNWRKPQVLSISDRTTIWKSKELHGRFYKALTGPDVDQLASVAWLRFSNLFGETEGFACAIMDEVIMTNNYRRHILKDGTADICRACHRPGESIRHIVSGCSRLANGEYLHRHNQVAKIVHQQLALKYSLVDTEVPYYQYQPAPVLDNGHVTLYWDRSIITDRTIPANKPDIVIIDRSASRAMLVDVTIPHDENLVKAEKEKLTKYLDLAHEVTAMWHVDSTIIVPIVVSVNGLIAKSFDQHLKKLSLGCWIKGLIQKAVILDSARIVRRFLSLEP

SEQ ID NO: 27905 - protein, 1099 aa, Clostera curtula
MRAYYGATQGGTVLTAYRSRMLSLFQELNPTTTITAQRLSDQVRAIQRLNLLEQPVLDGLRLESLSALPAVNQRSVMSQAVTASVGSITQEPAESTHIDEVSVTNQFSEKLRSALEEAILEFRDIPISARPRLPRLPTHTQNIVLVGVLNNILKSYIHTCSTLSETHSLLYCGAIAACRVGGARFLNFHSSNRRTNTIPLWQCRIQKKIDSARTTIAKLYAFRMGNSRPRIMRYVVQAFAGTGISRHDYQAWITERIDFFKQKMYAWAKRIRRYKERSDRFTQNRLFQSDQKRIYRSWECPEQQFSGSSRPSRELVSSFWQNIWSVPATHSEGLWFNSVQRSCDSISEMDPVIICDEDVSSAIHGAPNWKAPGPDGLQNFWLKKFNCLHSVLATQFQNILDLGSLPAFMTTGVTYLLFKSGSTSEPNNYRPITCLPTLYKLLTSILKFKIMRHVSNNNILASVQNGCKPRSRGTKELLLIDMTICQQVRRVRKNISMAWVDYKKAYDSVPHSWLLRVCTLYKLHPNLCSFLHSCMSSWATRLCHMDGMDFSDSPDLIQIKRGIFQGDSLSPLWFCLALNPLSTLLRDSMLGYRLRRNGEIVSHLLYMDDVKLYAPNESDLVTLLKITHNFSNDIRMEFGIDKCAVIRVQRGQIVNSSGVDISESVFLHSLSKSENYKYLGMSQGLCIADKDMKQLLTARFLGRVKKVFKSLLSGGNKARAFNSWAIPALSYSFGILKWTQTELDKLDRKVRRLMTSFRMHHPRSSVMRLYIPRKCGGRGYLNAKSLHNREVCNLRDYFVRIDDNLHRDVVSVDNGLTPLSMAKQNWRRLKVLTTPDRIAVWQSKELHGRFYRAFTGPDVDQQASISWLSFGNLFAETEGFVCAIMDEVVMTNNYRRHIIKDGTVDICRACRCPGESIRHIVSGCSRLANGEYLHRHNQVAKIIHQQLALKYGLIDSEIPYYQYQPAPVLDNGLITLYWDRSIITDRTIVANRPDLVLIDRSVRKAMIVDITIPHDDNLIKAETEKLSKYLDLAHEITSMWGVDSTIIVPIVVSVNGLIAKSFNRYLEKLSLSCWVKHLAQKAVLLETARIVRRFLSADP

SEQ ID NO: 27906 - protein, 962 aa, Clostera curtula
MTKHNLALTSILDKILPSYFSTTENLTETHSILYCGAVAVCRVGGVRFPNHNRPTPQTTTTPAWQYRIEKRINAARTIIAKLLTFRSGNNRPRVMRFVHQAFEGTGIRPQEYTASVTERMDFYKQKIQAWAKRIRRFKKRSDRYNQNRLFQSDAKKVYRNWEQNSRQMSPGVTPDPVGMYSFWQDIWSQPVIHSEGEWMSVVRRACEPITAMGPINVDEADIARAISSAPNWKSPGPDSLHNFWLKRFHSSHVRLATQFQNAIATGSLPTFLTTGVTYLLYKSGSTSEPKNYRPITCLPTTYKLLTSILKFKIMEHILANNIMAPVQNGCKPRSRGTKELLLIDMTICQQVRRVKKNISMAWIDYKKAYDSVPHSWLSRVLDLYRLHPNLCSFLSVCMSQWTTRLCLPDMAGFSDSTGLLRIKRGIFQGDSLSPLWFCLAMNPLSTLLMDSKIGYRLRRDGEVISHLLYMDDLKLYAPKKSDLVSLLKITENFSKDIKMEFGVDKCAAIHVQRGRVVTSEELQLSENMSLRCLSESETYRYLGMAEGLGIADKEIKQSLTACFLSRLTKVLKSLLSGGNKARAVNGWVMPALAYSFGILRWTQSELDALDRKVRRQLTLYRMHHPRSSVMRLYIPRKCGGRGYLNVKNLHNREVCNLREYFLQSTEDVHRDVANVDNSFTPLSLAKQNWRKPQVLSISDRTTIWKSKELHGRFYKALTGPDVDQLASVAWLRFSNLFGETEGFACAIMDEVIMTNNYRRHILKDGTADICRACHRPGESIRHIVSGCSRLANGEYLHRHNQVAKIVHQQLALKYSLVDTEVPYYQYQPAPVLDNGHVTLYWDRSIITDRTIPANKPDIVIIDRLASRAMLVDVTIPHDENLVKAEKEKLTKYLDLAHEVTAMWHVDSTIIVPIVVSVNGLIAKSFDQHLKKLSLSCWIKGLIQKAVILDSARIVRRFLSLEP

SEQ ID NO: 27907 - protein, 1205 aa, Clostera curtula
MSAPRRNPSRRCRSRAAYGTYSARPTPSSSSSPTSGNEYHTPPVTAASSDDAGSPVPPAAQSSARRGRPLPASLRSTEHNATSMASATGGSVRRMRWSQQLNENVMRAYYGATEGGTNLTAYRSRMFTLFQDLNPGTTVTVQRLSDQVRAIQRLQLLAQPVLDRLRLETLSSHPVVRPQPDPAVPAIAEQPDPLPLALVESLQNEEVNVNNQYNEQLRRALDDAILEYRDVPPSDRPRLPRLPMTKHNLALTSILDKILQPYFSTTENLTETHSILYCGAVAVCRVGGVRFPNHNRPTPQTTTTPAWQYRIEKRINAARTIIAKLLTFRSGNNRPRVMRFVHQAFEGTGIRPQEYTASVTERMDFYKQKVQAWAKRIRRFKKRSDRYNQNRLFQSDAKKVYRNWEQNSRQMSPGVTPDPVGMYSFWQDIWSQPVIHSEGEWMSVVRRACEPITAMGPINVDEADIARAVSSAPNWKSPGPDSLHNFWLKRFHSSHVRLATQFQNAIATGSLPTFLTTGVTYLLYKSGSTSEPKNYRPITCLPTTYKLLTSILKFKIIEHILANNIMAPVQNGCKPRSRGTKELLLIDMTICQQVRRVKKNISMAWIDYKKAYDSVPHSWLSRVLDLYRLHPNLCSFLSVCMSQWTTRLCLPDMAGFSDSTGLLRIKRGIFQGDSLSPLWFCLAMNPLSTLLMDSKIGYRLRRDGEVISHLLYMDDLKLYAPKKSDLVSLLKITENFSKDIKMEFGVDKCAAIHVQRGRVVTSEELQLSENMSLRCLSESETYRYLGMAEGLGIADKEIKQSLTACFLSRLTKVLKSLLSGGNKARAVNGWVMPALAYSFGILRWTQSELDALDRKVRRQLTLYRMHHPRSSVMRLYIPRKCGGRGYLNVKNLHNREVCNLREYFLQSTEDVHRDVANVDNSFTPLSLAKQNWRKPQVLSISDRTTIWKSKELHGRFYKALTGPDVDQLASVAWLRFSNLFGETEGFACAIMDEVIMTNNYRRHILKDGTADICRACHRPGESIRHIVSGCSRLANGEYLHRHNQVAKIVHQQLALKYSLVDTEVPYYQYQPAPVLDNGHVTLYWDRSIITDRTIPANKPDIVIIDRLASRAMLVDVTIPHDENLVKAEKDKLTKYLDLAHEVTAIWHVDSTIIVPIVVSVNGLIAKSFDQHLKKLSLNCWIKGLIQKAVILDSARIVRRFLSLEP

SEQ ID NO: 27908 - protein, 962 aa, Clostera curtula
MNKHILALTSVLNTFLQSHFDKSENLTETHSILYCGAVAVCRVGGVRFPNQNRPTTQMETIPAWQHRIELRINTARTIIAKLYTYKNGNSRPRVMRFVHQAFNGTGVRPQDYSAWITERIDFYKQKVQAWAKRIRRFKERSDRYKQNRLFQSDAKKVYRNWEQNSRQISLGVTPDPVRMYTFWQDIWAQPINHTEGEWMTIVRRSCEHITAMEQVIISQADIARALRLAPNWKSPGPDGLHNFWLKRFHSSHERLATQFHNAISSKTLPKFLTNGVTYLLYKSGSTSEPKNYRPITCLPTTYKLLTSILKFKIMDHILANNIMATAQNGCKPRSRGTKELLLIDMTICQQVRRVKKNISMAWIDYKKAYDSVPHSWLSRVLDLYRLHPNLCSFLSVCMSQWTTRLCLPDMAGFSDSTGLLRIKRGIFQGDSLSPLWFCLAMNPLSTLLMDSKIGYLLRRDGEVISHLLYMDDLKLYAPKKSDLVSLLKITENFSNDIKMEFGVDKCAAIHVQRGRVVTSEELQLSENMSFRCLSESETYRYLGMAEGLGIADKEIKQALTTCFFSRLTKVLKSLLSGGNKVRAVNGWVMPALAYSFGILRWTQTELDALDRRVRRQLTLYRMHHPRSSVMRLYIPRKCGGRGFLNVKNLHNREVCNLREYFLQSTEDVHRDMANVDNSFTPLSLAKQNWRKPQVLSISDRTTIWKSKELHGRFYKALTGPDVDQLASVAWLRFSNLFGETEGFTCAIMDEVIMTNNYRRHILKDGTADICRACHRPGESIRHIVSGCSRLANGEYLHRHNQVAKIVHQQLALKYSLVDTEVPYYQYQPAPVLDNGHVTLYWDRSIITDRTILANKPDIVIIDRSASRAMLVDVTIPHDENLVKAEKEKLTKYLDLAHEVTAMWHVDSTIIVPIVVSVNGLIAKSFDQHLKKLSLGCWIKGLIQKAVILDSARIVRRFLSLEP

SEQ ID NO: 27909 - protein, 1201 aa, Clostera curtula
MATRRNPNRRCKQAAHLGARLPSPQVSSCSSNEEFFTPTSGTSSDETEVQTASAPRRPVRRGRPPLPARLGPSEQTGPSTAPATGGSVRRMRWSQQINENVMRAYYGATEGGTNLTAYRSRMFALFQDLNPGTTVTVQRLSDQVRAIQRLQLLAQPVLDRLRLETLSSRPVVHPQPDPAISAIAVQPDPLILAPAELVQSEEVNVNNQYNEQLRRALDDAILEYRDVLPTDRPRLPRLPMTKHNLALTSILDKILPTYFNISENLTETHSILYCGAVAVCRVGGVRFPNLNRPTPQATITPAWQYRIEKRINAARTIIAKLLTFRSGNNRPRVMRFVHQAFEGTGIRPQDYTASVTERMDFYKQKVQAWAKRIRRFKMRSNRYNQNRLFQSDAKKVYRNWEQNSRQMSPGVTPDPVGMYSFWQDIWSQPVIHSEGEWMSVIRRACEPITAMGPINVDEADIARAVSSAPNWKSPGPDSLHNFWLKRFHSSHVRPATQFQNAIASGSLPTFLTTGVTYLLYKSGSTSEPKNYRPITCLPTTYKLLTSILKFKIMEHILANNIMASVQNGCKPRSRGTKELLLIDMTICQQVRRVKKNISMAWIDYKKAYDSVPHSWLSRVLDLYRLHPNLCSFLSVCMSQWTTRLCLPDMAGFSDSTGLLRIKRGIFQGDSLSPLWFCLAMNPLSTLLMHSKIGYRLRSGGEVISHLLYMDDLKLYAPKKSDLVSLLKITENFSNDIKMEFGVDKCAAIHVQRGRVVTSEELQLSQNMSLRCLSESETYRYLGMAEGLGIADKEIKQSLTACFFSRLTKVLKSLLSGGNKVRAVNGWVMPALAYSFGILRWTQTELDALDRKVRRQLTLYRMHHPRSSVMRLYIPRKCGGRGFLNVKNLHNREVCNLREYFLQPTEGVHRDMANVDNSFTPLSLAKQNWRKPQVLSISDRTTIWKSKELHGRFYKALTGPDVDQLASVAWLRFSNLFGETEGFACAIMDEVIMTNNYRRHILKDGTADICRACHRPGESIRHIVSGCSRLANGEYLHRHNQVAKIVHQQLALKYSLVDTEVPYYQYQPAPVLDNGHVTLYWDRSIITDRTIPANKPDIVIIDRSASRAMLVDVTIPHDENLVKAEKEKLTKYLDLAHEVTAMWHVDSTIIVPIVVSVNGLIAKSFDQHLKKLSLGCWIKGLIQKAVILDSARIVRRFLSLEP

SEQ ID NO: 27910 - protein, 1207 aa, Clostera curtula
MSEFALRRNPSRRCRLRAAYGTNSARPTSSSSSSSTSANEYHTPPVTAASSDDAGSPVPPAAQSSARRGRPLPASLRSTEHTATSMASATGGSVRRMRWSQELNENVMRAYYGATGGGTNLTAYRSRMFALFQDLNPGTTVTVQRLSDQVRAIQRLQLLAQPVLDGLRLETLSTRPVVRPQPDPAVSAIAVQPDPPLPAPAELVQNEEVNVNNQYDEQLRRALDDAILVYRDVPVSDRPRLPRLPMNKHILALTSVLNTFLQFHFDKSENLTETHSILYCGAVAVCRVGGVRFPNQNRLTRQMETIPAWQHRIELRINTARTIIAKLYAYKNGNSRPRVMRFVHQAFNGTGVRPQDYSAWITERIDFYKQKVQAWAKRIRRFKERSNRYKQNRLFQSDAKKVYRNWEQNSRQISLGVTPDPVRMYTFWQGIWAQPINHTEGDWMTIVRRSCENITAMEQVIISQADIARAVRLAPNWKSPGPDGLHNFWLKRFHSSHERLATQFQNAISSKTLPTFLTNGVTYLLYKSGSTSEPKNYRPITCLPTTYKLLTSILKFKIMDHILANNIMATAQNGCKPRSRGTKELLLIDMTICQQVRRVKKNISMAWIDYKKAYDSVPHSWLSRVLDLYRLHPNLCSFLSVCMSQWTTRLCLPDMAGFSDSTDLLRIKRGIFQGDSLSPLWFCLAMNPLSTLLMDSKIGYRLRRDGEVISHLLYMDDLKLYAPKKSDLVSLLKITENFSNDIKMEFGVDKCAAIHVQRGRVVTSEELQLSENMSFRCLSESETYRYLGMAEGLGIADKEIKQSLTACFFSRLTKVLKSLLSGGNKVRAVNGWVMPALAYSFGILRWTQTELDALDRRVRRQLTLYRMHHPRSSVMRLYIPRKCGGRGFLNVKNLHNREVCNLREYFLQSTEDVHRDMANVDNSFTPLSLAKQNWRKPQVLSISDRTTIWKSKELHGRFYKALTGPDVDQLASVAWLRFSNLFGETEGFACAIMDEVIMTNNYRRHILKDGTADICRACHRPGESIRHIVSGCSRLANGEYLHRHNQVAKIVHQQLALKYSLVDTEVPYYQYQPAPVLDNGQVTLYWDRSIITDRTILANKPDIVIIDRSASRAMLVDVTIPHDENLVKAEKEKLTKYLDLAHEVTAMWHVDSTIIVPIVVSVNGLIAKSFDQHLKKLSLGCWIKGLIQKAVILDSARIVRRFLSLEP

SEQ ID NO: 27911 - protein, 1205 aa, Clostera curtula
MSAPRRNPSRRCRSRAAYGTYSARPTPSSSSSPTSGNEYHTPPVTAASSDDAGSPVPPAAQSSARRGRPLPASLRSTEHNATSMASATGGSVRRMRWSQQLNENVMRAYYGATEGGTNLTAYRSRMFALFQDLNPGTTVTVQRLSDQVRAIQRLQLLAQPVLDRLRLETLSSHPVVRPQPDPAVPAIAEQPDPMPLALAESLQNEEVNVNNQYNEQLRRALDDAILEYRDVPPSDRPRLPRLPMTKHNLALTSILDKILPSYFSTTENLTETHSILYCGAVAVCRVGGVRFPNHNRPTPQTTTTPAWQYRIEKRINAARTIIAKLLTFRSGNNPPRVMRFVHQAFEGTGIRPQEYTASVTERMDFYKQKVQAWAKRIRRFKKRSDRYNQNRLFQSDAKKVYRNWEQNSRQMSPGVTPDPVGMYSFWQDIWSQPVIHSEGEWMSVVRRACEPITAMGPINVDEADIARAVSSAPNWKSPGPDSLHNFWLKRFHSSHVRLATQFQNAIATGSLPTFLTTGVTYLLNKSGSTSEPKNYRPITCLPTTYKLLTSILKFKIMEHILANNIMASVQNGCKPRSRGTKELLLIDMTICQQVRRVKKNISMAWIDYKKAYDSVPHSWLSRVLDLYRLHPNLCSFLSVCMSQWTTRLCLPDMAGFSDSTGLLRIKRGIFQGDSLSPLWFCLTMNPLSTLLMNSKIGYRLRRDGEVISHLLYMDDLKLYAPKKSDLVSLLKITENFSKDIKMEFGIDKCAAIHVQRGRVVTSEELQLSENMSLRCLSESETYRYLGMAEGLGIADKEIKQALTTCFFSRLTKVLKSLLSGGNKVRAVNGWVMPALAYSFGILRWTQTELDALDRRVRRQLTLYRMHHPRSSVMRLYIPRKCGGRGFLNIKNLHNREVCNLREYFLQSTEDVHRDMANVDNSFTPLSLAKQNWRKLQVLSISDRTTIWKSKELHGRFYKALTGPDVDQLASVTWLRFSNLFGETEGFACAIMDEVIMTNNYRRHILKDGTADICRACHRPGESIRHIVSGCSRLANGEYLHRHNQVAKIVHQQLALKYSLVDTEVPYYQYQPAPVLDNGHVTLYWDRSIITDRTIPANKPDIVIIDRLASRAMLVDVTIPHDENRVKGAKEKLTKYLDLAHEVTAMWHVDSTIIVPIVVSVNGLIAKSFDQHLKKLSLSCWIKGLIQKAVILDSARIVRRFLSLEP

SEQ ID NO: 27912 - protein, 1209 aa, Clostera curtula
MMLPTRRNPLRQCRQHVAIGTSSARPTQGTSSSSLSSSSEEAYFTPNSEGSSDVVTSPPEPSPLRRSTRRRPPPLPASLGSSDTSVPSMTPATGGVVRRMRWTLQLNESVMRAYYGATQGGTVLTAYRSRMLSLFQELNPTTTITAQRLSDQVRAIQRLNLLEQPVLDGLRLESLSALPAVNQRSVMSQAVTASVGSITQEPAESTHIDEVSVTNQFSEKLRSALEEAILEFRDIPISARPRLPRLPTHTQNIVLVGVLNNILKSYIHTCSTLSETHSLLYCGAIAACRVGGARFLNFHSSNRRTNTIPLWQCRIQKKIDSARTTIAKLYAFRMGNSRPRIMRYVVQAFAGTGISRHDYQAWITERINFFKQKMYAWAKRIRRYKERSDRFTQNRLFQSDQKRIYRSWECPEQQFSGSSRPSRELVSSFWQNIWSVPATHSEGLWFNSVQRSCDSISEMDPVIICDEDVSSAIHGAPNWKAPGPDGLQNFWLKKFNCLHSVLATQFQNILDLGSLPAFMTTGVTYLLFKSGSTSEPNNYRPITCLPTLYKLLTSILKFKIMRHVSNNNILASVQNGCKPRSRGTKELLLIDMTICQQVRRVRKNISMAWVDYKKAYDSVPHSWLLRVCTLYKLHPNLCSFLHSCMSSWATRLCHMDGMDFSDSPDLIQIKRGIFQGDSLSPLWFCLALNPLSTLLRDSMLGYRLRRNGEIVSHLLYMDDVKLYAPNESDLVTLLKITHNFSNDIRMEFGIDKCAVIRVQRGQIVNSSGVDISESVFLHSLSESENYKYLGMSQGLCIADKDMKQLLTARFLGRVKKVFKSLLSGGNKARAFNSWAIPALSYSFGILKWTQTELDKLDRKVRRLMTSFRMHHPRSSVMRLYIPRKCGGRGYLNAKSLHNREVCNLRDYFVRIDDNLHRDVVSVDNGLTPLSMAKQNWRRLKVLTTPDRIAVWQSKELHGRFYRAFTGPDVDQQASISWLSFGNLFAETEGFVCAIMDEVVMTNNYRRHIIKDGTVDICRACRCPGESIRHIVSGCSRLANGEYLHRHNQVAKIIHQQLALKYGLIDREIPYYQYQPAPVLDNGLITLYWDRSIITDRTIVANRPDLVLIDRSVRKAMIVDITIPHDDNLIKAETEKLSKYLDLAHEITSMWGVDSTIIVPIVVSVNGLIAKSFNRYLEKLSLSCWVKHLAQKAVLLETARIVRRFLSADP

SEQ ID NO: 27913 - protein, 1201 aa, Clostera curtula
MATRRNPNRRCKQAAHLGARLPSPQVSSCSSNEEFFTPTSGTSSDETEVQTASAPRRPVRRGRPPLPARLGPSEQTGPSTAPATGGSVRRMRWSQQINENVMRAYYGATEGGTNLTAYRSRMFALFQDLNPGTTVTVQRLSDQVRAIQRLQLLAQPVLDRLRLETLSSRPVVHPQPDPAISAIAVQPDPLILAPAELVQSEEVNVNNQYNEQLRRALDDAILEYRDVLPTDRPRLPRLPMTKHNLALTSILDKILPTYFNISENLTETHSILYCGAVAVCRVGGVRFPNLNRPTPQATITPAWQYRIEKRINAARTIIAKLLTFRSGNNRPRVMRFVHQAFEGTGIRPQDYTASVTERMDFYKQKVQAWAKRIRRFKMRSNRYNQNRLFQSDAKKVYRNWEQNSRQMSPGVTPDPVGMYSFWQDIWSQPVIHSEGEWMSVIRRACEPITAMGPINVDEADIARAVSSAPNWKSPGPDSLHNFWLKRFHSSHVRLATQFQNAIASGSLPTFLTTGVTYLLYKSGSTSEPKNYRPITCLPTTYKLLTSILKFKIMEHILANNIMASVQNGCKPRSRGTKELLLIDMTICQQVRRVKKNISMAWIDYKKAYDSVPHSWLSRVLDLYRLHPNLCSFLSVCMSQWTTRLCLPDMAGFSDSTGLLRIKRGIFQGDSLSPLWFCLAMNPLSTLLMHSKIGYRLRSGGEVISHLLYMDDLKLYAPKKSDLVSLLKITENFSNDIKMEFGVDKCAAIHVQRGRVVTSEELQLSQNMSLRCLSESETYRYLGMAEGLGIADKEIKQSLTACFFSRLTKVLKSLLSGGNKVRAVNGWVMPALAYSFGILRWTQTELDALDRKVRRQLTLYRMHHPRSSVMRLYIPRKCGGRGFLNVKNLHNREVCNLREYFLQPTEGVHRDMANVDNSFTPLSLAKQNWRKPQVLSISDRTTIWKSKELHGRFYKALTGPDVDQLASVAWLRFSNLFGETEGFACAIMDEVIMTNNYRRHILKDGTADICRACHRPGESIRHIVSGCSRLANGEYLHRHNQVAKIVHQQLALKYSLVDTEVPYYQYQPAPVLDNGHVTLYWDRSIITDRTIPANKPDIVIVDRSASRAMLVDVTIPHDENLVKAEKEKLTKYLDLAHEVTAMWHVDSTIIVPIVVSVNGLIAKSFDQHLKKLSLGCWIKGLIQKAVILDSARIVRRFLSLEP

SEQ ID NO: 27914 - protein, 1205 aa, Clostera curtula
MSAPRRNPSRRCRSRAAYGTYSARPTPSSSSSPTSGNEYHTPPVTAASSDDAGSPVPPAAQSSARRGRPLPASFRSTEHNATSMASATGGSVRRMRWSQQLNENVMRAYYGATEGGTNLTAYRSRMFTLFQDLNPGTTVTVQRLSDQVRAIQRLQLLAQPVLDRLRLETLSSHPVVRPQPDPAVPAIAEQPDPLPLALVESLQNEEVNVNNQYNEQLRRALDDAILEYRDVPPSDRPRLPRLPMTKHNLALTSILDKILPPYFSTTENLTETHSILYCGAVAVCRVGAVRFPNHNRPTPQTTTTPAWQYRIEKRINAARTIIAKLLTFRSGNNRPRVMRFVHQAFEGTGIRPQEYTASVTERMDFYKQKVQAWAKRIRRFKKRSDRYNQNRLFQSDAKKVYRNWEQNSRQMSPGVTPDPVGMYSFWQDIWSQPVIHSEGEWMSVVRRACEPITAMGPINVDEADIARAVSSAPNWKSPGPDSLHNFWLKRFHSSHVRLATQFQNAIATGSLPTFLTTGVTYLLYKSGSTSEPKNYRPITCLPTTYKLLTSILKFKIMEHILANNIMAPVQNGCKPRSRGTKELLLIDMTICQQVRRVKKNISMAWIDYKKAYDSVPHSWLSRVLDLYRLHPNLCSFLSVCMSQWTTRLCLPDMAGFSDSTGLLRIKRGIFQGDSLSPLWFCLAMNPLSTLLMDSKIGYRLRRDGEVISHLLYMDDLKLYAPKKSDLVSLLKITENFSKDIKMEFGVDKCAAIHVQRGRVVTSEELQLSENMSLRCLSESETYRYLGMAEGLGIADKEIKQSLTACFLSRLTKVLKSLLSGGNKARAVNGWVMPALAYSFGILRWTQSELDALDRKVRRQLTLYRMHHPRSSVMRLYIPRKCGGRGYLNVKNLHNREVCNLREYFLQSTEDVHRDVANVDNSFTPLSLAKQNWRKPQVLSISDRTTIWKSKELHGRFYKALTGPDVDQLASVAWLRFSNLFGETEGFACAIMDEVIMTNNYRRHILKDGTADICRACHRPGESIRHIVSGCSRLANGEYLHRHNQVAKIVHQQLALKYSLVDTEVPYYQYQPAPVLDNGHVTLYWDRSIITDRTIPANKPDIVIIDRLASRAMLVDVTIPHDENLVKAEKDKLTKYLDLAHEVTAIWHVDSTIIVPIVVSVNGLIAKSFDQHLKKLSLNCWIKGLIQKAVILDSARIVRRFLSLEP

SEQ ID NO: 27915 - protein, 1206 aa, Clostera curtula
MSQHTRRNPQRQCRLRAAYGTASARLTPQSSSSPSSEDEYHTPPVTAASSDDTGSPVPPAPRCSARRGRPLPASLMSTEQIATSMTSATGGSVRRMRWSQQLNENVMRAYYGATEGGTNLTAYRSRMFALFQDLNPGTTVTVQRLSDQVRAIQRLQLLAQPVLDRLRLETLSSHPVIRPQPDPAAPAIAEQPDPLPLALAESLQNEEVNVNNQYNEQLRRALDDAILDYRDVSPSDRPRLPRLPMTKHNLALTSILDKILPSYFSTTENLTETHSILYCGAVAVCRVGGVRFPNHNRPTPQTTTTPAWQYRIEKRINAARTIIAKLLTFRSGNNRPRVMRFVHQAFEGTGIRPQEYTASVTERMDFYKQKIQAWAKRIRRFKKRSDRYNQNRLFQSDAKKVYRNWEQNSRQMSPGVTPDPVGMYSFWQDIWSQPVIHSEGEWMSVVRRACEPITAMGPINVDEADIARAISSAPNWKSPGPDSLHNFWLKRFHSSHVRLATQFQNAIATGSLPTFLTTGVTYLLYKSGSTSEPKNYRPITCLPTTYKLLTSILKFKIMEHILANNIMAPVQNGCKPRSRGTKELLLIDMTICQQVRRVKKNISMAWIDYKKAYDSVPHSWLSRVLDLYRLHPNLCSFLSVCMSQWTTRLCLPDMAGFSDSTGLLRIKRGIFQGDSLSPLWFCLAMNPLSTLLMDSKIGYRLRRDGEVISHLLYMDDLKLYAPKKSDLVSLLKITENFSKDIKMEFGVDKCAAIHVQRGRVVTSEELQLSENMSLRCLSESETYRYLGMAEGLGIADKEIKQSLTACFLSRLTKVLKSLLSGGNKARAVNGWVMPALAYSFGILRWTQSELDALDREVRRQLTLYRMHHPRSSVMRLYIPRKCGGRGYLNVKNLHNREVCNLREYFLQSTEDVHRDVANVDNSFTPLSLAKQNWRKPQVLSISDRTTIWKSKELHGRFYKALTGPDVDQLASVAWLRFSNLFGETEGFACAIMDEVIMTNNYRRHILKDGTADICRACHRPGESIRHIVSGCSRLANGEYLHRHNQVAKIVHQQLALKYSLVDTEVPYYQYQPAPVLDNGHVTLYWDRSIITDRTIPANKPDIVIIDRLASRAMLVDVTIPHDENLVKAEKEKLTKYLDLAHEVTAMWHVDSTIIVPIVVSVNGLIAKSFDQHLKKLSLSCWIKGLIQKAVILDSARIVRRFLSLEP

SEQ ID NO: 27916 - protein, 1206 aa, Clostera curtula
MSQHTRRNPQRQCRLRAAYGTASARLTPQSSSSPSSEDEYHTPPVTAASSDDTGSPVPPAPRCSARRGRPLPASLMSTEQIATSMTSATGGSVRRMRWSQELNENVMRAYYRATEGGTNLTAYRSRMFALFQDLNPGTTLTVQRLSDQVRAIQRLQLLAQPVLDRLRLETLSSRPVVRTQPDPAISAIAAQPDPPLLAPAELVQSEEVNVNNQYNEQLRRALDDAILEYRDVRPSDRPRLPRLPMTKHNLALTSILDKILPSYFNTTENLTETHSILYCGAVAVCRVGGVKFPNLNRPTPQTTTAPAWQYRIEKRINAARTIIAKLLTFRSGNNRPRVMRFVHQAFEGTGIRPQDYTASVTERMDFYKQKVQAWAKRIRRFKKSSDRYNQNRLFQSDAKKVYRNWEQNSGQMSPGVTPDPAGMYSFWQDIWSEPVRHSEGEWMSVVRRACEPITAMGPINIDEADIARAVSSAPNWKSPGPDSLHNFWLKRFHSSHVRLATQFQNAIATGSLPTFLTTGVTYLLYKSGSTSEPKNYRPITCLPTTYKLLTSILKFKIMEHILANNIMAPVQNGCKPRSRGTKELLLIDMTICQQVRRVKKNISMAWIDYKKAYDSVPHSWLSRVLDLYRLHPNLCSFLSVCMSQWTTRLCLPVMAGFSDSTGLLRIKRGIFQGDSLSPLWFCLAMNPLSTLLMDSKIGYRLRRDGEVISHLLYMDDFKLYAPKKSDLVSLLKITEIFSKDIKMEFGVDKCAAIHVQRGRVVTSEELQLSENMSLRCLSESETYRYLGMAEGLGIADKEIKQSLTACFLSRLTKVLKSLLSGGNKARAVNGWVMPALAYSFGILRWTQSELDALDRKVRRQLTLYRMHHPRSSVMRLYIPRKCGGRGFLNVKNLHNREVCNLREYFLQSTEDVHRDMANVDNSFTPLSLAKQNWRKPLVLSISDRTTIWKSKELHGRFYKALTGPDVDQLASVAWLRFSNLFGETEGFACAIMDEVIMTNNYRRHILKHGTADICRACHRPGESIRHIVSGCSRLANGEYLHRHNQVAKIVHQQLALKYSLVDTEVPYYQYQPAPVLDNGHVTLYWDRSIITDRTIPANKPDIVIIDRSASRAMLVDVTIPHDENLVKAEKEKLTKYLDLAHEVTAMWHVDSTIIVPIVVSVNGLIAKSFDQHLKKLSLSCWIKGLIQKAVILDSARIVRRFLSLEP

SEQ ID NO: 27917 - protein, 1205 aa, Clostera curtula
MSAPRRNPSRRCRSRAAYGTYSARPTPSSSSSPTSGNEYHTPPVTAASSDDAGSPVPPAAQSSARRGRPLPASLRSTEHNATSMASATGGSVRRMRWSQQLNENVMRAYYGATEGGTNLTAYRSRMFALFQDLNPGTTVTVQRLSDQVRAIQRLQLLAQPVLDRLRLETLSSHPVVRPQPDPAVPAIAEQPDPLPLALAESLQNEEVNVNNQYNEQLRRALDDAILEYRDVPPSDRPRLPRLPMTKHNLALTSILDKILPSYFSTTENLTETHSILYCGAVAVCRVGGVRFPNHNRPTPQTTTTPAWQYRIEKRINAARTIIAKLLTFRSGNNRPRVMRFVHQAFEGTGIRPQEYTASVTERMDFYKQKVQAWAKRIRRFKKRSDRYNQNRLFQSDAKKVYRNWEQNSRQMSPGVTPDPVGMYSFWQDIWSQPVIHSEGEWMSVVRRACEPITAMGPINVDEADIARAVSSAPNWKSPGPDSLHNFWLKRFHSSHVRLATQFQNAIATGSLPTFLTTGVTYLLYKSGSTSEPKNYRPITCLPTTYKLITSILKFKIMEHILANNIMAPVQNGCKPRSRGTKELLLIDMTICQQVRRVKKNISMAWIDYKKAYDSVPHSWLSRVLDLYRLHPNLCSFLSVCMSQWTTRLCLPDMAGFSDSTGLLRIKRGIFQGDSLSPLWFCLAMNPLSTLLMDSKIGYRLRRDGEVISHLLYMDDLKLYAPKKSDLVSLLKITENFSKDIKMEFGIDKCAAIHVQRGRVVTSEELQLSENMSLRCLSESETYRYLGMAEGLGIADKEIKQALTTCFFSRLTKVLKSLLSGGNKVRAVNGWVMPALAYSFGILRWTQTELDALDRRLRRQLTLYRMHHPRSSVMRLYIPRKCGGRGFLNVKNLHNREVCNLREYFLQSTEDVHRDMANVDNSFTPLSLAKQNWRKPQVLSISDRTTIWKSKELHGRFYKALTGPDVDQLASVAWLRFSNLFGETEGFACAIMDEVIMTNNYRRHILKDGTADICRACHRPGESIRHIVSGCSRLANGEYLHRHNQVAKIVHQQLALKYSLVDTEVPYYQYQPAPVLDNGHVTLYWDRSIITDRTIPANKPDIVIIDRLASRAMLVDVTIPHDENLVKAEKEKLTKYLDLAHEVTAMWHVDSTIIVPIVVSVNGLIAKSFDQHLKKLSLSCWIKGLIQKAVILDSARIVRRFLSLEP

SEQ ID NO: 27918 - protein, 1122 aa, Clostera curtula
MASATGGSVRRMRWSQQLNENVMRAYYGATEGGTNLTAYRSRMFTLFQDLNPGTTVTVQRLSDQVRAIQRLQLLAQPVLDRLRLETLSSHPVVRPQPDPAVPAIAEQPDPLPLALVESLQNEEVNVNNQYNEQLRRALDDAILEYRDVPPSDRPRLPRLPMTKHNLALTSILDKILPPYFSTTENLTETHSILYCGAVAVCRVGGVRFPNHNRPTPQTTTTPAWQYRIEKRINAARTIIAKLLTFRSGNNRPRVMRFVHQAFEGTGIRPQEYTASVTERMDFYKQKVQAWAKRIRRFKKRSDRYNQNRLFQSDAKKVYRNWEQNSRQMSPGVTPDPVGMYSFWQDIWSQPVIHSEGEWMSVVRRACEPITAMGPINVDEADIARAVSSAPNWKSPGPDSLHNFWLKRFHSSHVRLATQFQNAIATGSLPTFLTTGVTYLLYKSGSTSEPKNYRPITCLPTTYKLLTSILKFKIMEHILANNIMAPVQNGCKPRSRGTKELLLIDMTICQQVRRVKKNISMAWIDYKKAYDSVPHSWLSRVLDLYRLHPNLCSFLSVCMSQWTTRLCLPDMAGFSDSTGLLRIKRGIFQGDSLSPLWFCLAMNPLSTLLMDSKIGYRLRRDGEVISHLLYMDDLKLYAPKKSDLVSLLKITENFSKDIKMEFGVDKCAAIHVQRGRVVTSEELQLSENMSLRCLSESETYRYLGMAEGLGIADKEIKQSLTASFLSRLTKVLKSLLSGGNKARAVNGWVMPALAYSFGILRWTQSELDALDRKVRRQLTLYRMHHPRSSVMRLYIPRKCGGRGYLNVKNLHNREVCNLREYFLQSTEDVHRDVANVDNSFTPLSLAKQNWRKPQVLSISDRTTIWKSKELHGRFYKALTGPDVDQLASVAWLRFSNLFGETEGFACAIMDEVIMTNNYRRHILKDGTADICRACHRPGESIRHIVSGCSRLANGEYLHRHNQVAKIVHQQLALKYSLVDTKVPYYQYQPAPVLDNGHVTLYWDRSIITDRTIPANKPDIVIIDRLASRAMLVDVTIPHDENLVKAEKDKLTKYLDLAHEVTAMWHVDSTIIVPIVVSVNGLIAKSFDQHLKKLSLSCWIKGLIQKAVILDSARIVRRFLSLEP

SEQ ID NO: 27919 - protein, 962 aa, Clostera curtula
MTKHNLALTSILDKILPSYFSTTENLTETHSILYCGAVAVCRVGGVRFPNHNRPTPQTTTTPAWQYRIEKRINAARTIIAKLLTFRSGNNRPRVMRFVHQAFEGTGIRPQEYTASVTERMDFYKQKVQAWAKRIRRFKKRSDRYNQNRLFQSDAKKVYRNWEQNSRQMSPGVTPDPVGMYSFWQDIWSQPVIHSEGEWMSVVRRACEPITAMGPINVDEADIARAVSSAPNWKSPGPDSLHNFWLKRFHSSHVRLATQFQNAIATGSLPTFLTTGVTYLLYKSGSTSEPKNYRPITCLPTTYKLLTSILKFKIMEHILANNIMAPVQNGCKPRSRGTKELLLIDMTICQQVRRVKKNISMAWIDYKKAYDSVPHSWLSRVLDLYRLHPNLCSFLSVCMSQWTTRLCLPDMAGFSDSTGLLRIKRGIFQGDSLSPLWFCLAMNPLSTLLMDSKIGYRLRRDGEVISHLLYMDDLKLYAPKKSDLVSLLKITENFSKDIKMEFGIDKCAAIHVQRGRVVTSEELQLSENMSLRCLSESETYRYLGMAEGLGIADKEIKQALTTCFFSRLTKVLKSLLSGGNKVRAVNGWVMPALAYSFGILRWTQTELDALDRRVRRQLTLYRMHHPRSSVMRLYIPRKCGGRGFLNVKNLHNREVCNLREYFLQSTEDVHRDMANVDNSFTPLSLAKQNWRKPQVLSISDRTTIWKSKELHGRFYKALTGPDVDQLASVAWLRFSNLFGETEGFACAIMDEVIMTNNYRRHILKDGTADICRACHRPGESIRHIVSGCSRLANGEYLHRHNQVAKIVHQQLALKYSLVDTEVPYYQYQPAPVLDNGHVTLYWDRSIITDRTIPANKPDIVIIDRLASRAMLVDVTIPHDENLVKAEKEKLTKYLDLAHEVTAMWHVDSTIIVPIVVSVNGLIAKSFDQHLKKLSLSCWIKGLIQKAVILDSARIVRRFLSLEP

SEQ ID NO: 27920 - protein, 1205 aa, Clostera curtula
MSDSAPRRNPSRRCRLRAAYGTNCARPTSSSSSSPTSGNEYHTPPVTAASSDDTGSPVPPAAQSSARRGRPLPASLRSTEHTATSMASATGGSVRRMRWSQELNEKVMRAYYGATEEGTNLTAYRSRMFALFQDLNPGTTVTVQRLSDKVRAIQRLQLLAQPLLDRLRLETLSSRPVVRPQPNPAVSAIAVQPDPPLVAPAELVQNEEVNVNNQYDEQLRRALDDAILVYRDVPASDRPRLPRLPMNKHILALTSVLNTFLQSHFDKSENLTETHSILYCGAVAVCRVGGARFPNQNRPTTQMETIPAWQHRIELRINTARTIIAKLYTYKNGNSRPRVMRFVHQAFNGTGVRPQDYSAWITERIDFYKQKVQAWAKRIRRFKERSDRYKQNRLFQSDAKKVYRNWEQNSRPISLGVTPDPVRMYTFWQDIWAQPINHTEGEWMTIVRRSCEHITAMEQVIISQADIARALRLAPNWKSPGPDGLHNFWLKRFHSSHERLATQFHNAISSKTLPTFLTNGVTYLLYKSGSTSEPKNYRPITCLPTTYKLLTSILKFKIMDHILANNIMATAQNGCKPRSRGTKELLLIDMTIFQQVRRVKKNISMAWIDYKKAYDSVPHSWLSRVLDLYRLHPNLCSFLSVCMSQWTTRLYLPDMAGFSDSTGLLRIKRGIFQGDSLSPLWFCLAMNPLSTLLMDSKIGYLLRRDGEVISHLLYMDDLKLYAPKKSDLLSLLKITENFSNDIKMEFGVDKCAAIHVQRGRVVTSEELQLSENMSFRCLSDSETYRYLGMAEGLGIADKEIKQALTTCFFSRLTKVLKSLLSGGNKVRAVNGWVMPALAYSFGILRWTQTELDALDRRVRRQLTLYRMHHPRSSVMRLYIPRKCGGRGFLNVKNLHNREVCNLREYFLQSTEDVHRDMANVDNSFTPLSLAKQNWRKPQVLSISDRTTIWKSKELHGRFYKALTGPDVDQLASVAWLRFSNLFGETEGFACAIMDEVIMTNNYRRHTLKDGTADICRACHRPGESIRHIVSGCSRLANGEYLHRHNQVAKIVHQQLALKYSLVDTEVPYYQYQPAPVLDNGHVTLYWDRSIITDRTILANKPDIVIIDRSASRAMLVDVTIPHDENLVKAEKEKLTKYLDLAHEVTAMWHVDSTIIVPIVVSVNGLIAKSFDQHLKKLSLGCWIKGLIQKAVILFLVPLSGALNRR

SEQ ID NO: 27921 - protein, 1023 aa, Clostera curtula
MSQAVTASVGSITQEPAESTHIDEVSVTNQFSEKLRSALEEAILEFRDIPISARPRLPRLPTHTQNIVLVGVLNNILKSYIHTCSTLSETHSLLYCGAIAACRVGGARFLNFHSSNRRTNTIPLWQCRIQKKIDSARTTIAKLYAFRMGNSRPRIMRYVVQAFAGTGISRHDYQVWITERIDFFKQKMYAWAKRIRRYKERSDRFTQNRLFQSDQKRIYRSWECPEQQFSGSSRPSRELVSAFWQNIWSVPATHSEGLWFNSVQRSCDSISEMDPVIICDEDVSSAIHGAPNWKAPGPDGLQNFWLKKFNCLHSVLATQFQNILDLGSLPAFMTTGVTYLLFKSGSTSEPNNYRPITCLPTLYKLLTSILKFKIMRHVSNNNILASVQNGCKPRSRGTKELLLIDMTICQQVRRVRKNISMAWVDYKKAYDSVPHSWLLRVCTLYKLHPNLCSFLHSCMSSWATRLCHMDGMDFSDSPDLIQIKRGIFQGDSLSPLWFCLALNPLSTLLRDSMLGYRLRRNGEIVSHLLYMDDVKLYAPNESDLVTLLKITHNFSNDIRMEFGIDKCAVIRVQRGQIVNSSGVDISESVFLHSLSESENYKYLGMSQGLCIADKDMKQLLTARFLGRVKKVFKSLLSGGNKARAFNSWAIPALSYSFGILKWTQTELDKLDRKVRRLMTSFRMHHPRSSVMRLYIPRKCGGRGYLNAKSLHNREVCNLRDYFVRIDDNLHRDVVSVDNGLTPLSMAKQNWRRLKVLTTPDRIAVWQSKELHGRFYRAFTGPDVDQQASISWLSFGNLFAETEGFVCAIMDEVVMTNNYRRHIIKDGTVDICRACRCPGESIRHIVSGCSRLANGEYLHRHNQVAKIIHQQLALKYGLIDSEIPYYQYQPAPVLDNGLITLYWDRSIITDRTIVANRPDLVLIDRSVRKAMIVDITIPHDDNLIKAETEKLSKYLDLAHEITSMWGVDSTIIVPIVVSVNGLIAKSFNRYLEKLSLSCWVKHLAQKAVLLETARIVRRFLSADP

SEQ ID NO: 27922 - protein, 962 aa, Clostera curtula
MTKHNLALTSILDKILPPYFSTTENLTETHSILYCGAVAVCRVGGVRFPNHNRPTPQTTTTPAWQYRIEKRINAARTIIAKLLTFRSGNNRPRVMRFVHQAFEGTGIRPQEYTASVTERMDFYKQKVQAWAKRIRRFKKRSDRYNQNRLFQSDAKKVYRNWEQNSRQMSPGVTPDPVGMYSFWQDIWSQPVIHSEGEWMSVVRRACEPITAMGPINVDEADIARAVSSAPNWKSPGPDSLHNFWLKRFHSSHVRLATQFQNAIATGSLPTFLTTGVTYLLYKSGSTSEPKNYRPITCLPTTYKLLTSILKFKIMEHILANNIMAPVQNGCKPRSRGTKELLLIDMTICQQVRRVKKNISMAWIDYKKAYDSVPHSWLSRVLDLYRLHPNLCSFLSVCMSQWTTRLCLPDMAGFSDSTGLLRIKRGIFQGDSLSPLWFCLAMNPLSTLLMDSKIGYRLRRDGEVISHLLYMDDLKLYAPKKSDLVSLLKITENFSKDIKMEFGVDKCAAIHVQRGRVVTSEELQLSENMSLRCLSESETYRYLGMAEGLGIADKEIKQSLTACFLSRLTKVLNSLLSGGNKARAVNGWVMPALAYSFGILRWTQSELDALDRKVRRQLTLYRMHHPRSSVMRLYIPRKCGGRGYLNVKNLHNREVCNLREYFLQSTEDVHRDVANVDNSFTPLSLAKQNWRKPQVLSISDRTTIWKSKELHGRFYKALTGPDVDQLASVAWLRFSNLFGETEGFACAIMDEVIMTNNYRRHILKDGTADICRACHRPGESIRHIVSGCSRLANGEYLHRHNQVAKIVHQQLALKYSLVDTEVPYYQYQPAPVLDNGHVTLYWDRSIITDRTIPANKPDIVIIDRLASRAMLVDVTIPHDENLVKAEKDKLTKYLDLAHEVTAMWHVDSTIIVPIVVSVNGLIAKSFDQHLKKLSLSCWIKGLIQKAVILDSARIVRRFLSLEP

SEQ ID NO: 27923 - protein, 1111 aa, Clostera curtula
MRWSQELNENVMRAYYGATEGGTNLTAYRSRMFALFQDLNPGTTVTVQRLSDQVRAIQRLQLLAQPVLDRLRLETLSSRPVVRPQPDPAVSAIAIQPDPPLLAPAELVQNEEVNVNNQYDEQLRRALEDAILVYRDVPASDRPRLPRLPMNKHILALTSVLNTFLQSHFDKSENLTETHSILYCGAVAVCRVGGVRFPNQNRLTTQMETIPAWQHRIELRINTARTIIAKLYAYKNGNSRPRVMRFVHQAFNGTGVRPQDYNAWITERIDFYKQKVQAWAKRIRRFKERSNRYKQNRLFQSDAKKVYRNWEQNSRQISLGVTPDPVRMYTFWQDIWAQPINHTEGDWMTIVRRSCEHITAMEQVIISQADIARAVRLAPNWKSPGPDGLHNFWLKRFHSSHERLATQFQNAISSKTLPTFLTNGVTYLLYKSGSTSEPKNYRPITCLPTTYKLLTSILKFKIMDHILANNIMATAQNGCKPRSRGTKELLLIDMTICQQVRRVKKNISMAWIDYKKAYDSVPHSWLSRVLDLYRLHPNLCSFLSVCMSQWTTRLCLPDMAGFSDSTGLLRIKRGIFQGDSLSPLWFCLAMNPLSTLLMHSKIGYRLRSDGEVISHLLYMDDLKLYAPKKSDLVSLLKITENFSNDIKMEFGVDKCAAIHVQRGRVVTSEELQLSENMSLRCLSESETYRYLGMAEGLGIADKEIKQSLTACFFSRLTKVLKSLLSGGNKVRAVNSWVMPALAYSFGILRWTQTELDALDRKVRRQLTLYRMHHPRSSVMRLYIPRKCGGRGFLNVKNLHNREVCNLREYFLQPTEGVHRDMANVDNSFTPLSLAKQNWRKPQVLSISDRTTIWKSKELHGRFYKALTGPDVDQLASVAWLRFSNLFGETEGFACAIMDEVIMTNNYRRHILKDGTADICRACHRPGESIRHIVSGCSCLANGEYLHRHNQVAKIVHQQLALKYSLVDTEVPYYQYQPAPVLDNGHVTLYWDRSIITDRTIPANKPDIVIIDRSASRAMLVDVTIPHDENLVKAEKEKLTKYLDLAHEVTAMWHVDSTIIVPIVVSVNGLIAKSFDQHLKKLSLGCWIKGLIQKAVILDSARIVRRFLSLEP

SEQ ID NO: 27924 - protein, 1206 aa, Clostera curtula
MSQHTRRNPQRQCRLRAAYGTASARLTPQSSSSPSSEDEYHTPPVTAASSDDTGSPVPPAPRCSARRGRPLPASLMSTEQIATSMTSATGGSVRRMRWSQQLNENVMRAYYGATEGGTNLTAYRSRMFALFQDLNPGTTVTVQRLSDQVRAIQRLQLLAQPVLDRLRLETLSSHPVVRPQPDPAVPAIAEQPDPLPLALAESLQNEEVNVNNQYNEQLRRALDDAILDYRDVPPSDRPRLPRLPMTKHNLALTSILDKILPSYFSTTENLTETHSILYCGAVAVCRVGGVRFPNHNRPTPQTTTTPAWQYRIEKRINAARTIIAKLLTFRSGNNRPRVMRFVHQAFEGTGIRPQEYTASVTERMDFYKQKIQAWAKRLRRFKKRSDRYNQNRLFQSDAKKVYRNWEQNSRQMSPGVTPDPVGMYSFWQDIWSQPVIHSEGEWMSVVRRACEPITAMGPINVDEADIARAISSAPNWKSPGPDSLHNFWLKRFHSSHVRLATQFQNAIATGSLPTFLTTGVTYLLYKSGSTSEPKNYRPITCLPTTYKLLTSILKFKIMEHILANNIMAPVQNGCKPRSRGTKELLLIDMTICQQVRRVKKNISMAWIDYKKAYDSVPHSWLSRVLYLYRLHPNLCSFLSVCMSQWTTRLCLPDMAGFSDSTGLLRIKRGIFQGDSLSPLWFCLAMNPLSTLLMDSKIGYRLRRDREVISHLLYMDDLKLYAPKKSDLVSLLKITENFSKDIKMEFGVDKCAAIHVQRGRVVTSEELQLSENMSLRCLSESETYRYLGMAEGLGIADKEIKQSLTACFLSRLTKVLKSLLSGGNKARAVNGWVMPALAYSFGILRWTQSELDALDRKVRRQLTLYRMHHPRSSVMRLYIPRKCGGRGYLNVKNLHNRDVCNLREYFLQSTEDVHRDVANVDNSFTPLSLAKQNWRKPQVLSISDRTTIWKSKELHGRFYKALTGPDVDQLASVAWLRFSNLFGETEGFACAIMDEVIMTNNYRRHILKDGTADICRACHRPGESIRHIVSGCSRLANGEYLHRHNQVAKIVHQQLALKYSLVDTEVPYYQYQPAPVLDNGHVTLYWDRSIITDRTILANKPDIVIIDRLASRAMLVDVTIPHDENLVKAEKEKLTKYLDLAHEVTAMWHVDSTIIVPIVVSVNGLIAKSFDQHLKKLSLSCWIKGLIQKAVILDSARIVRRFLSLEP

SEQ ID NO: 27925 - protein, 1209 aa, Clostera curtula
MSQHTRRNPQRQCRLRAAYGTASARLTPQSSSSPSSEDEYHTPPVTAASSDDTGSPVPPAPRCSARRGRPLPASLMSTEQIATSMTSATGGSVRRMRWSQQLNENVMRAYYGANLTTEGGTNLTAYRSRMFALFQDLNPGTTVTVQRLSDQVRAIQRLQLLAQPVLDRLRLETLSSHPVVRPQPDPAVPAIAEQPDPLPLALAESLQNEEVNVNNQYNEQLRRALDDAILDYRDVPPSDRPRLPRLPMTKHNLALTSILDKILPSYFSTTENLTETHSILYCGAVAVCRVGGVRFPNHNRPTPQTTTTPAWQYRIEKRINAARTIIAKLLTFRAGNNHPRVMRFVHQAFEGTGIRPQEYTASVTERMDFYKQKIQAWAKRIRRFKKRFDRYNQNRLFQSDAKKVYRNWEQNSRQMSPGVTPDPVGMYSFWQDIWSQPVIHSEGEWMSVVRRTCEPITAMGPINVDEADIARAISSAPNWKSPGPDSLHNFWLKRFHSSHVRLATQFQNAIATGSLPTFLTTGVTYLLYKSGSTSEPKNYRPITCLPTTYKLLTSILKFKIMEHILANNIMAPVQNGCKPRSRGTKELLLIDMTICQQVRRVKKNISMAWIDYKKAYDSVPHSWLSRVLDLYRLHPNLCSFLSVCMSQWTTRLCLPDMAGFSDSTGLLRIKRGIFQGDSLSPLWFCLAMNPLSTLLMDSKIGYRLRRDGEVISHLLYMDDLKLYAPKKSDLVSLLKITENFSKDIKMEFGVDKCAAIHVQRGRVVTSEELQLSENMSLRCLSESETYRYLGMAEGLGIADKEIKQSLTACFLSRLTKVLKSLLSGGNKARAVNGWVMPALAYSFGILRWTQSELDALDRKVRRQLTLYRMHHPRSSVMRLYIPRKCGGRGYLNVKNLHNREVCNLREYFLQSTEDVHRDVANVDNSFTPLSLAKQNWRKPQVLSISDRTTIWKSKELHGRFYKALTGPDVDQLASVAWLRFSNLFGETEGFACAIMDEVIMTNNYRRHILKDGTADICRACHRPGESIRHIVSGCSRLANGEYLHRHNQVAKIVHQQLALKYSLVDTEVPYYQYQPAPVLDNGHVTLYWDRSIITDRTIPANKPDIVIIDRLASRAMLVDVTIPHDENLVKAEKEKLTKYLDLAHEVTAMWHVDSTIIVPIVVSVNGLIAKSFDQHLKKLSLSCWIKGLIQKAVILDSARIVRRFLSLEP

SEQ ID NO: 27926 - protein, 1206 aa, Clostera curtula
MSQHTRRNPQRQCRLRAAYGTASARLTPQSSSSPSSEDEYHTPPVTAASSDDTGSPVPPAPRCSARRGRPLPASLMSTEQIATSMTSATGGSVRRMRWSQELNENVMRAYYGATVGGTNLTAYRSRMFALFQDLNPGTTVTVQRLSDQVRAIQRLQLLAQPVLDRLRLETLSSHPVVRPQPDPAVPAIAEQPDPLPLALAESLQNEEVNVNNQYNEQLRRALDDAILDYRDVPPSDRPRLPRLPMTKHNLALTSILDKILPSYFSTTENLTETHSILYCGAVAVCRVGGVRFPNHNRPTPQTTTTPAWQYRIEKRINAARTIIAKLLTFRSGNNRPRVMRFVHQAFEGTGIRPQEYTASVTERMDFYKQKIQAWAKRIRRFKKRSDRYNQNRLFQSDAKKVYRNWEQNSRQMSPGVTPDPVGMYSFWQDIWSQPVIHSEGEWMSVVRRACEPITAMGPINVDEADIARAISSAPNWKSPGPDSLHNFWLKRFHSSHVRLATQFQNAIATGSLPTFLTTGVTYLLYKSGSTSEPKNYRPITCLPTTYKLLTSILKFKIMEHILANNIMAPVQNGCKPRSRGTKELLLIDMTICQQVRRVKKNISMAWIDYKKAYDSVPHSWLSRVLDLYRLHPNLCSFLSVCMSQWTTRLCLPDMAGFSDSTGLLRIKRGIFQGDSLSPLWFCLAMNPLSTLLMDSKIGYRLRRDGEVISHLLYMDDLKLYAPKKSDLVSLLKITENFSKDIKMEFGVDKCAAIHVQRGRVVTSEELQLSENMSLRCLSESETYRYLGMAEGLGIADKEIKQSLTACFLSRLTKVLKSLLSGGNKARAVNGWVMPALAYSFGILRWTQSELDALDRKVRRQLTLYRMHHPRSSVMRLYIPRKCGGRGYLNVKNLHNREVCNLREYFLQSTEDVHRDVANVDNSFTPLSLAKQNWRKPQVLSISDRTTIWKSKELHGRFYKALTGPDVDQLASVAWLRFSNLFGETEGFACAIMDEVIMTNNYRRHILKDGTADICRACHRPGESIRHIVSGCSRLANGEYLHRHNQVAKIVHQQLALKYSLVDTEVPYYQYQPAPVLDNGHVTLYWDRSIITDRTILANKPDIVIIDRLASRAMLVDVTIPHDENLVKAEKEKLTKYLDLAHEVTAMWHVDSTIIVPIVVSVNGLIAKSFDQHLNKLSLSCWIKGLIQKAVILDSARIVRRFLSLEP

SEQ ID NO: 27927 - protein, 1201 aa, Clostera curtula
MATRRNPNRRCKQAAHLGARLPSPQVSSCSSNEEFFTPTSGTSSDETEVQTASAPRRPVRRGRPPLPARLGPSEQTGPSTAPATGGSVRRMRWSQQINENVMRAYYGATEGGTNLTAYRSRMFALFQDLNPGTTVTVQRLSDQVRAIQRLQLLAQPVLDRLRLETLSSRPVVHPQPDPAISAIAVQPDPLILAPAELVQSEEVNVNNQYNEQLRRALDDAILEYRDVLPTDRPRLPRLPMTKHNLALTSILDKILPTYFNISENLTETHSILYCGAVAVCRVGGVRFPNLNRPTPQATITPAWQYRIEKRINAARTIIAKLLTFRSGNNRPRVMRFVHQAFEGTGIRPQDYTASVTERMDFYKQKVQAWAKRIRRFKMRSNRYNQNRLFQSDAKKVYRNWEQNSRQMSPGVTPDPVGMYSFWQDIWSQPVIHSEGEWMSVIRRACEPITAMGPINVDEADIARAVSSAPNWKSPGPDSLHNFWLKRFHSSHVRLATQFQNAIASGSLPTFLTTGVTYLLYKSGSTSEPKNYRPITCLPTTYKLLTSILKFKIMEHILANNIMASVQNGCKPRSRGTKELLLIDMTICQQVRRVKKNISMAWIDYKKAYDSVPHSWLSRVLDLYRLHPNLCSFLSVCMSQWTTRLCLPDMAGFSDSTGLLRIKRGIFQGDSLSPLWFCLAMNPLSTLLMHSKIGYRLRSGGEVISHLLYMDDLKLYAPKKSDLVSLLKITENFSNDIKMEFGVDKCAAIHVQRGRVVTSEELQLSQNMSLRCLSESETYRYLGMAEGLGIADKEIKQSLTACFFSRLTKVLKSLLSGGNKVRAVNGWVMPALAYSFGILRWTQTELDALDRKVRRQLTLYRMHHPRSSVMRLYIPRKCGGRGFLNVKNLHNREVCNLREYFLQPTEGVHRDMANVDNSFTPLSLAKQNWRKPQVLSISDRTTIWKSKELHGRFYKALTGPDVDQLASVAWLRFSNLFGETEGFACAIMDEVIMTNNYRRHILKDGTADICRACHRPGESIRHIVSGCSRLANGEYLHRHNQVAKIVHQQLALKYSLVDTEVPYYQYQPAPVLDNGHVTLYWDRSIITDRTIPANKPDIVIIDRSASRAMLVDVTIPHDENLVKAEKEKLTKYLDLAHEVTAMWHVDSTIIVPIVVSVNGLIAKSFDQHLKKLSLGCWIKGLIQKAVILDSARIVRRFLSLEP

SEQ ID NO: 27928 - protein, 1219 aa, Clostera curtula
MSQSPRRNPPRRCRLRAAYGTASARLTPQSSSSSSSEDEYHTPPVTAASSDDAGSPVPPTAQRSARRGRPLPASLRSTEHTATSMASATGGSVRRMRWSQELNENVMRAYYGATEGGTNLTAYRSRMFALFQDLNPGTTVTVQRLSDQVRAIQRLQLLAQPVLDRLRLETLSSRPVVRPQPDPAVSAIAIQPDPPLLAPAELVQNEEVNVNNQYDEQLRRALDDAILVYCDVPASDRPRLPRLPMNKHILALTSVLNTFLQSHFDKSENLTETHSILYCGAVAVCRVGGVRFPNQNRLTTQMETIPAWQHRIELRINTARTIIAKLYAYKNGNSRPRVMRFVHQAFNGTGVRPQDYNAWITERIDFYKQKVQAWAKRIRRFKERSNRYKQNRLFQSDAKKVYRNWEQNSRQISLGVTPDPVRMYTFWQDIWAQPINHTEGDWMTIVRRSCEHITAMEQVIISQADIARAVRLAPNWKSPGPDGLHNFWLKRFHSSHERLATQFQNAISSKTLPTFLTNGVTYLLYKSGSTSEPKNYRPITCLPTTYKLLTSILKFKIMDHILANNIVATAQNGCKPRSRGTKELLLIDMTICQQVRRVKKNISMAWIDYKKAYDSVPHSWLSRVLDLYRLHPNLCSFLSVCMSQWTTRLCLPDMAGFSDSTGLLRIKRGIFQGDSLSPLWFCLAMNPLSTLLMHSKIGYRLRSDGEVISHLLYMDDLKLYAPKKSDLVSLLKITENFSNDIKMEFGVDKCAAIHVQRGRVVTSEELQLSENMSLRCLSESETYRYLGMAEGLGIADKEIKQSLTACFFSRLTKVLKSLLSGGNKVRAVNSWVMPALAYSFGILRWTQTELDALDRKVRRQLTLYRMHHPRSSVMRLYIPRKCGGRGFLNVKNLHNREVCNLREYFLQPTEGVHRDMANVDNSFTPLSLAKQNWRKPQVLSISDRTTIWKSKELHGRFYKALTGPDVDQLASVAWLRFSNLFGETEGFACAIMDEVIMTNNYRRHILKDGTADICRACHRPGESIRHIVSGCSRLANGEYLHRHNQVAKIVHQQLALKYSLVDTEVPYYQYQPAPVLDNGHVTLYWDRSIITDRTIPANKPDIVIIDRSASRAMLVDVTIPHDENLVKAEKEKLTKYLDLAHEVTAMWHVDSTIIVPIVVSVNGLIAKSFDQHLKKLSLGCWIKGLIQKKSKKIKNQNVFYSNKFLRMLSNSQRLKRKKK

SEQ ID NO: 27929 - protein, 1206 aa, Clostera curtula
MSQSTRRNPPRRCRLRAAYGTASARLTPQSSSSSSSEDEYHTPPVTAASSDDAGSPVPPTAQRSARRGRPLPASLRSTEHTATSMASATGGSVRRMRWSQELNENVMRAYYGATEGGTNLTAYRSRMFALFQDLNPGTTVTVQRLSDQVRAIQRLQLLAQPVLDRLRLETLSSRPVVRPQPDPAVSAIAIQPDPPLLAPAELVQNEEVNVNNQYDEQLRRALDDAILVYRDVPASDRPRLPRLPMNKHILALTSVLNTFLQSHFDKSENLTETHSILYCGAVAVCRVGGVRFPNQNRLTTQMETIPAWQHRIELRINTARTIIAKLYAYKNGNSRPRVMRFVHQAFNGTGVRPQDYNAWITERIDFYKQKVQAWAKRIRRFKERSNRYKQNRLFQSDAKKVYRNWEQNSRQISLGVTPDPVRMYTFWQDIWAQPINHTEGDWMTIVRRSCEHITAMEQVIISQADIARAVRLAPNWKSPGPDGLHNFWLKRFHSSHERLATQFQNAISSKTLPTFLTNGVTYLLYKSGSTSEPKNYRPITCLPTTYKLLTSILKFKIMDHILANNIMVTAQNGCKPRSRGTKELLLIDMTICQQVRRVKKNISMAWIDYKKAYDSVPHSWLSRVLDLYRLHPNLCSFLSVCMSQWTTRLCLPDMAGFSDSTGLLRIKRGIFQGDSLSPLWFCLAMNPLSTLLMDSKIGYRLRRDGEAISHLLYMDDLKLYAPKKSDLVSLLKITENFSNDIKMEFGVDKCAAIHVQRGRVVTSEELQLSENMSFRCLSESETYRYLGMAEGLGIADKEIKQALTTCFFSRLTKVLKSLLSGGNKVRAVNGWVMPALAYSFGILRWTQTELDALDRRVRRQFTLYRMHHPRSSVMRLYIPRKCGGRGFLNVKTLHNREVCNLREYFLQSTEDVHRDMANVDNSFTPLSLAKQNWRKPQVLSISDRTTIWKSKELHGRFYKALTGPDVDQLASVAWLRFSNLFGETEGFACAIMDEVIMTNNYRRHILKDGTADICRACHRPGESIRHIVSGCSRLANGEYLHRHNQVAKIVHQQLALKYSLVDTEVPYYQYQPAPVLDNGHVTLYWDRSIITDRTILANKPDIVIIDRLASRAMLVDVTIPHDENLVKAEKEKLTKYLDLAHEVTAMWHVDSTIIVPIVVSVNGLIAKSFDQHLKKLSLGCWIKGLIQKAVILDSARIVRRFLSLEP

SEQ ID NO: 27930 - protein, 1206 aa, Clostera curtula
MSQHTRRNPQRQCRLRAAYGTASARLTPQSSSSPSSEDEYHTPPVTAASSDDTGSPVPPAPRCSARRGRPLPASLMSTEQIATSMTSATGGSVRRMRWSQQLNENVMRAYYGATEGGTNLTAYRSRMFALFQDLNPGTTVTVQRLSDQVRAIQRLQLLAQPVLDRLRLETLSSHPVVRPQPDPAVPAIAEQPDPLPLALAESLQNEEVNVNNQYNEQLRRALDDAILDYRDVPPSDRPRLPRLPMTKHNLALTSILDKILPSYFSTTENLTETHSILYCGAVAVCRVGGVRFPNHNRPTPQTTTTPAWQYRIEKRINAARTIIAKLLTFRSGNNRPRVMRFVHQAFEGTGIRPQEYTASVTERMDFYKQKIQAWAKRIRRFKKRSDRYNQNRLFQSDAKKVYRNWEQNSRQMSPGVTPDPVGMYSFWQDIWSQPVIHSEGEWMSVVRRACEPITAMGPINVDEADIARAISSAPNWKSPGPDSLHNFWLKRFHSSHVRLATQFQNAIATGSLPTFLTTGVTYLLYKSGSTSEPKNYRPITCLPTTYKLLTSILKFKIMEHILANNIMAPVQNGCKPRSRGTKELLLIDMTICQQVRRVKKNISMAWIDYKKAYDSVPHSWLSRVLDLYRLHPNLCSFLSVCMCQWTTRLCLPDMAGFSDSTGLLRIKRGIFQGDSLSPLWFCLAMNPLSTLLMDSKIGYRLRRDGEVISHLLYMDDLKLYAPKKSDLVSLLKITENFSKDIKMEFGVDKCAAIHVQRGRVVTSEELQLSENMSLRCLSESETYRYLGMAEGLGIADKEIKQSLTACFLSRLTKVLKSLLSGGNKARAVNGWVMPALAYSFGILRWTQSELDALDRKVRRQLTLYRMHHPRSSVMRLYIPRKCGGRGYLNVKNLHNREVCNLREYFLQSTEDVHRDVANVDNSFTPLSLAKQNWRKPQVLSISDRTTIWKSKELHGRFYKALTGPDVDQLASVAWLRFSNLFGETEGFACAIMDEVIMTNNYRRHILKDGTADICRACHRPGESIRHIVSGCSRLANGEYLHRHNQVAKIVHQQLALKYSLVDTEVPYYQYQPAPVLDNGHVTLYWDRSIITDRTILANKPDIVIIDRLASRAMLVDVTIPHDENLVKAEKEKLTKYLDLAHEVTAMWHVDSTIIVPIVVSVNGLIAKSFDQHLKKLSLSCWIKGLIQKAVILDSARIVRRFLSLEP

SEQ ID NO: 27931 - protein, 1131 aa, Clostera curtula
MATRRNPNRRCKQAAHLGARLPSPQVSSCSSNEEFFTPTSGTSSDETEVQTASAPRRPVRRGRPPLPARLGPAEQTGPSTAPATGGSVRRMRWSQQINENVMRAYYGATEGGTNLTAYRSRMFALFQDLNPGTTVTVQRLSDQVRAIQRLQLLAQPVLDRLRLETLSSRPVVHPQPDPAISAIAVQPDPLILAPAELVQNEEVNVNNQYNEQLRRALDDAILEYRDVLPTDRPRLPRLPMTKHNLALTSILDKILPTYFNISENLTETHSILYCGAVAVCRVGGVRFPNLNRPTPQATITPAWQYRIEKRINAARTIIAKLLTFRSGNNRPRVMRFVHQAFEGTGIRPQDYTASVTERMDFYKQKVQAWAKRIRRFKMRSNRYNQNRLFQSDAKKVYRNWEQNSRQMSPGETPDPVGMYSFWQDIWSQPVIHSESEWMSVIRRACEPITAMGPINVDEADIARAVSSAPNWKSPGPDSLHNFWLKRFHSSHVRLATQFQNAIASGSLPTFLTTGVTYLLYKSGSTSEPKNYRPITCLPTTYKLLTSILKFKIMEHILANNIMASVQNGCKPRSRGTKELLLIDMTICQQVRRVKKNISMAWIDYKKAYDSVPHSWLSRVLDLYRLHPNLCSFLSVCMSQWTTRLCLPDMAGFSDSTGLLRIKRGIFQGDSLSPLWFCLAMNPLSTLLMHSKIGYRLRSGGEVISHLLYMDDLKLYAPKKSDLVSLLKITENFSNDIKMEFGVDKCAAIHVQRGRVVTSEELQLSQNMSLRCLSESETYRYLGMAEGLGIADKEIKQSLTACFFSRLTKVLKSLLSGGNKVRAVNGWVMPALAYSFGILRWTQTELDALDRKVRRQLTLYRMHHPRSSVMRLYIPRKCGGRGFLNVKNLHNREVCNLREYFLQPTEGVHRDMANVDNSFTPLSLAKQNWRKPQVLSISDRTTIWKSKELHGRFYKALTGPDVDQLASVAWLRFSNLFGETEGFACAIMDEVIMTNNYRRHILKDGTADICRACHRPGESIRHIVSGCSRLANGEYLHRHNQVAKIVHQQLALKYSLVDTEVPYYQYQPAPVLDNGHVTLYWDRSIITDRTIPANKPDIVIIDRSASRAMRLCELGTRLFQNYVFLCFLDRFG

SEQ ID NO: 27932 - protein, 1185 aa, Clostera curtula
MPTQGTSSSSLSSSSEEAYFTPNSEGSSDVVTSPPEPSPLRRSTRRRLPPLPASLGSSDTSVPSMTPATGGVVRRMRWTLQLNESVMRAYYGATQGGTVLTAYRSRMLSLFQELNPTTTITAQRLSDQVRAIQRLNLLEQPVLDRLRLESLSALPAVNQRSVMSRAVTASVGSITQEPAESTHIDEVSVTNQFSEKLRSALEEAILEFRDIPISARPRLPRLPTHTQNIVLVGVLNNILKSYIHTCSTLSETHSLLYCGAIAACRVGGARFLNFHSSNRRTNTIPLWQCRIQKKIDSARTTIAKLYAFRMGNSRPRIMRYVVQAFAGTGISRHDYQAWITERIDFFKQKMYAWAKRIRRYKERSDRFNQNRLFQSDQKRIYRSWECPEQQFSGSSRPSRELVSSFWQNIWSVPATHSEGLWFNSVERSCDSISEMDPVIICDEDVSSAIHGAPNWKAPGPDGLQNFWLKKFNCLHSVLATQFQNILDLGSFPAFMTTGVTYLLFKSGSTSEPNNYRPITCLPTLYKLLTSILKFKIMRHVSNNNILASIQNGCKPRSRGTKELLLIDMTICQQVRRVRKNISMAWVDYKKAYDSVPHSWLLRVCTLYKLHPILCSFLHSCMSSWATRLCHMDGMDFSDSPDLIKIKRGIFQGDSLSPLWFCLALNPLSTLLRDSMLGYRLRRNGEIVSHLLYMDDVKLYAPNESDLVTLLKITHNFSNDIRMEFGIDKCAVIRVQRGQIVNSSGVDISESVFLHSLSESENYMYLGMSQGLCIADKDMKQLLTARFLGRVKKVFKSLLSGGNKARAFNSWAIPALSYSFGILKWTQTELDKLDRKVRRLMTSFRMHHPRSSVMRLYIPRKCGGRGYLNAKSLHNREVCNLRDYFVRIDDNLHRDVVSVDNGLTPLSMAKQNWRRLKVLTTPDRIAVWQSKELHGRFYRAFTGPDVDQQASISWLSFGNLFAETEGFVCAIMDEVVMTNNYRRYIIKDGTVDICRACRCPGESIRHIVSGCSRLANGEYLHRHNQVAKIIHQQLALKYGLIDSEIPYYQYQPAPVLDNGLITLYWDRSIITDRTIVANRPDLVLIDRSVRKAMIVDITIPHDDNLIKAETEKLSKYLDLAHEITSMWGVDSTIIVPIVVSVNGLIAKSFNRYLEKLSLSCWVKHLAQKAVLLETARIVRRFLSADP

SEQ ID NO: 27933 - protein, 1205 aa, Clostera curtula
MSAPRRNPSRRCRSRAAYGTYSARPTPSSSSSPTSGNEYHTPPVTAASSDDAGSPVPPAAQSSARRGRPLPASLRSTEHNATSMASATGGSVRRMRWSQQLNENVMRAYYGATEGGTNLTAYRSRMFTLFQDLNPGTTVTVQRLSDQVRAIQRLQLLAQPVLDRLRLETLSSHPVVRPQPDPAVPAIAEQPDPLPLALVESLQNEEVNVNNQYNEQLRRALDDAILEYRDVPPSDRPRLPRLPMTKHNLALTSILDKILPPYFSTTENLTETHSILYCGAVAVCRVGGVRFPNHNRPTPQTTTTPAWQYRIEKRINAARTIIAKLLTFRSGNNRPRVMRFVHQAFEGTGIRPQEYTASVTERMDFYKQKVQAWAKRIRRFKKRSDRYNQNRLFQSDAKKVYRNWEQNSRQMSPGVTPDPVGMYSFWQDIWSQPVIHSEGEWMSVVRRACEPITAMGPINVDEADIARAVSSAPNWKSPGPDSLHNFWLKRFHSSHVRLATQFQNAIATGSLPTFLTTGVTYLLYKSGSTSEPKNYRPITCLPTTYKLLTSILKFKIMEHILANNIMAPVQNGCKPRSRGTKELLLIDMTICQQVRRVKKNISMAWIDYKKAYDSVPHSWLSRVLDLYRLHPNLCSFLSVCMSQWTTRLCLPDMAGFSDSTGLLRIKRGIFQGDSLSPLWFCLAMNPLSTLLMDSKIGYRLRRDGEVISHLLYMDDLKLYAPKKSDLVSLLKITENFSKDIKMEFGVDKCAAIHVQRGRVVTSEELQLSENMSLRCLSESETYRYLGMAEGLGIADKEIKQSLTACFLSRLTKVLKSLLSGGNKARAVNGWVMPALAYSFGILRWTQSELDALDRKVRRQLTLYRMHHPRSSVMRLYIPRKCGGRGYLNVKNLHNREVCNLREYFLQSTEDVHRDVANVDNSFTPLSLAKQNWRKPQVLSISDRTTIWKSKELHGRFYKALTGPDVDQLASVAWLRFSNLFGETEGFACAIMDEVIMTNNYRRHILKDGTADICRACHRPGESIRHIVSGCSRLANGEYLHRHNQVAKIVHQQLALKYSLVDTEVPYYQYQPAPVLDNGHVTLYWDRSIITDRTIPANKPDIVIIDRLASRAMLVDVTIPHDENLVKAEKDKLTKYLDLAHEVTAMWHVDSTIIVPIVVSVNGLIAKSFDQHLKKLSLSCWIKGLIQKAVILDSARIVRRFLSLEP

SEQ ID NO: 27934 - protein, 1205 aa, Clostera curtula
MSAPRRNPSRRCRSRAAYGTYSARPTPSSSSSPTSGNEYHTPPVTAASSDDAGSPVPPAAQSSARRGRPLPASLRSTEHNATSMASATGGSVRRMRWSQQLNENVMRAYYGATEGGTNLTAYRSRMFALFQDLNPGTTVTVQRLSDQVRAIQRLQLLAQPVLDRLRLETLSSHPVVRPQPDPAVPAIAEQPDPMPLALAESLQNEEVNVNNQYNEQLRRALDDAILEYRDVPPSDRPRLPRLPMTKHNLALTSILDKILPSYFSTTENLTETHSILYCGAVAVCRVGGVRFPNHNRPTPQTTTTPAWQYRIEKRINAARTIIAKLLTFRSGNNRPRVMRFVHQAFEGTGIRPQEYTASVTERMDFYKQKVQAWAKRIRRFKKRSDRYNQNRLFQSDAKKVYRNWEQNSRQMSPGVTPDPVGMYSFWQDIWSQPVIHSEGEWMSVVRRACEPITAMGPINVDEADIARAVSSAPNWKSPGPDSLHNFWLKRFHSSHVRLATQFQNAIATGSLPTFLTTGVTYLLYKSGSTSEPKNYRPITCLPTTYKLLTSILKFKIMEHILANNIMAPVQNGCKPRSRGTKELLLIDMTICQQVRRVKKNISMAWIDYKKAYDSVPHSWLSRVLDLYRLHPNLCSFLSVCMSQWTTRLCLPDMAGFSDSTGLLRIKRGIFQGDSLSPLWFCLAMNPLSTLLMNSKIGYRLRRDGEVISHLLYMDDLKLYAPKKSDLVSLLKITENFSKDIKMEFGIDKCAAIHVQRARVVTSEELQLSENMSLRCLSESETYRYLGMAEGLGIADKEIKQALTTCFFSRLTKVLKSLLSGGNKVRAVNGWVMPALAYSFGILRWTQTELDALDRRVRRQLTLYRMHHPRSSVMRLYIPRKCGGRGFLNIKNLHNREVCNLREYFLQSTEDVHRDMANVDNSFTPLSLAKQNWRKLQVLSISDRTTIWKSKELHGRFYKALTGPDVDQLASVTWLRFSNLFGETEGFACAIMDEVIMTNNYRRHILKDGTADICRACHRPGESIRHIVSGCSRLANGEYLHRHNQVAKIVHQQLALKYSLVDTEVPYYQYQPAPVLDNGHVTLYWDRSIITDRTIPANKPDIVIIDRLASRAMLVDVTIPHDENLVKAEKEKLTKYLDLAHEVTAMWHVDSTIIVPIVVSVNGLIAKSFDQHLKKLSLSCWIKGLIQKAVILDSARIVRRFLSLEP

SEQ ID NO: 27935 - protein, 1080 aa, Clostera curtula
MFALFQDLNPGTTVTVQRLSDQVRAIQRLQLLAQPVLDRLRLETLSSRPVVRPQPDPAVSAIAVQPDPPLVAPAELVQNEEVNVNNQYDEQLRRALDDAILVYRDVPASDRPRLPRLPMNKHILALTSVLNTFLQSHFDKSENLTETHTILYCGAVAVCRVGGARFPNQNRPTTQMETIPAWQHRIELRINTARTIIAKLYTYKNGNSRPRVMRFVHQAFNGTGVRPQDYSAWITERIDFYKQKVQAWAKRIRRFKERSDRYKQNRLFQSDAKKVYRNWEQNSRQISLGVTPDPVRMYTFWQDIWAQPINHTEGEWMTIVRRSCEHITAMEQVIISQADIARALRLAPNWKSPGPDGLHNFWLKRFHSSHERLATQFHNAISSKTLPTFLTNGVTYLLYKSGSTSEPKNYRPITCLPTTYKLLTSILKFKIMDHILANNIMATAQNGCKPRSRGTKELLLIDMTICQQVRRVKKNISMAWIDYKKAYDSVPHSWLSRVLDLYRLHPNLCSFLSVCMSQWTTRLCLPDMAGFSDSTGLLRIKRGIFQGDSLSPLWFCLAMNPLSTLLMDSKIGYLLRRDGEVISHLLYMDDLKLYAPKKSDLVSLLKITENFSNDIKMEFGVDKCAAIHVQRGRVVTSEELQLSENMSFRCLSESETYRYLGMAEGLGIADKEIKQALTTCFFSRLTKVLKSLLSGGNKVCAVNGWVMPALAYSFGILRWTQTELDALDRRVRRQLTLYRMHHPRSSVMRLYIPRKCGGRGFLNVKNLHNREVCNLREYFLQSTEDVHRDMANVDNSFTPLSLAKQNWRKPQVLSISDRTTIWKSKELHGRFYKALTGPDVDQLASVAWLRFSNLFGETEGFACAIMDEVIMTNNYRRHILKDGTADICRACHRPGESIRHIVSGCSRLANGEYLHRHNQVAKIVHQQLALKYSLVDTEVPYYQYQPAPVLDNGHVTLYWDRSIITDRTILANKPDIVIIDRSASRAMLVDVTIPHDENLVKAEKEKLTKYLDLAHEVTAMWHVDSTIIVPIVVSVNGLIAKSFDQHLKKLSLGCWIKGLIQKAVILDSARIVRRFLSLEP

SEQ ID NO: 27936 - protein, 1207 aa, Clostera curtula
MSDSAPRRNPSRRCRLRAAYGTNCARPTSSSSSSPTSGNEYHTPPVTAASSDDAGSPVPPAAQSSARRGRPLPASLRSTEHTATSMASATGGSVRRMRWSQELNEKVMRAYYGATEGGTNLTAYRSRMFALFQDLNPGTTVTVQRLSDQVRAIQRLQLLAQPVLDRLRLETLSSRPVVRPQPDPAVSAIAVQPDPPLVAPAELVQNEEVNVNNQYDEQLRRALDDAILVYRDVPASDRPRLPRLPMNKHILALTSVLNTFLQSHFDKSENLTETHSILYCGAVAVCRVGGVRFPNQNRPTTQMETIPAWQHRIELRINTARTIIAKLYTYKNGNSRPRVMRFVHQAFNGTGVRPQDYSAWITERIDFYKQKVQAWAKRIRRFKERSDRYKQNRLFQSDAKKVYRNWEQNSRQISLGVTPDPVRMYTFWQDIWAQPINHTEGEWMTIVRRSCEHITAMEQVIISQADIARALRLAPNWKSPGPDGLHNFWLKRFHSSHERLATQFHNAISSKTLPTFLTNGVTYLLYKSGSTSEPKNYRPITCLPTTYKLLTSILKFKIMDHILANNIMATAQNGCKPRSRGTKELLLIDMTICQQVRRVKKNISMAWIDYKKAYDSVPHSWLSRVLDLYRLHPNLCSFLSVCMSQWTTRLCLPDMAGFSDSTGLLRIKRGIFQGDSLSPLWFCLAMNPLSTLLMDSKIGYLLRRDGEVISHLLYMDDLKLYAPKKSDLVSLLKITENFSNDIKMEFGVDKCAAIHVQRGRVVTSEELQLSENMSFRCLSESETYRYLGMAEGLGIADKEIKQALTTCFFSRLTKVLKSLLSGGNKVRAVNGWVMPALAYSFGILRWTQTELDALDRRVRRQLTLYRMHHPRSSVMRLYIPRKCGGRGFLNVKNLHNREVCNLREYFLQSTEDVHRDMANVDNSFTPLSLAKQNWRKPQVLSISDRTTIWKSKELHGRFYKALTGPDVDQLASVAWLRFSNLFGETEGFTCAIMDEVIMTNNYRRHILKDGTADICRACHRPGESIRHIVSGCSRLANGEYLHRHNQVAKIVHQQLALKYSLVDTEVPYYQYQPAPVLDNGHVTLYWDRSIITDRTILANKPDIVIIDRSASRAMLVDVTIPHDENLVKAEKEKLTKYLDLAHEVTAMWHVDSTIIVPIVVSVNGLIAKSFDQHLKKLSLGCWIKGLIQKAVILDSARIVRRFLSLEP

SEQ ID NO: 27937 - protein, 1082 aa, Choaspes benjaminii
MSANHTSQNFKPQPSDDKLSQDSSSTARGQSCEVGPSMSRPPVRGRPPRSACLGPAEHRAPTKAPATGGVVRRMRWSQKINESVMRAYYRATMCETNLTAYRDRMLPLFQDLEPTLNVSAQRLSDQVRAIQRGHMLDESVLERLRSEVLPAVAVTDSHRMQSVVTCDDEILSVQSREQMRRTLENAILEFRSLPTDSRPCLPYLPTNKRNMALVREVDQLLPTYFENSKNLTDTHSIMYCGAVAVHRVAGIKFPYNIHNKTQRTTEYVPAWQSRIEKRISRCRILIAKLICFKSGNNRPKVMRFVNQAFVGTQIRTQEYMVHVTERIDYFRQKILAWAKRIRRFKTRANRYNQNRIFQINQKVVYRDWERSCVTYGDLPDQNLMFNFWQNIWSVPTKHTEGEWMRVIERESQHIQVMDTILITPMDVKCAINLTSNWKKPGLDGLHNFWLKWFKSSYIYLATQFQDALENGSLPMFMTTGITYLIHKSGCTTDPKNYRPITCLPTIYKLLTSILKLKLLKHLNANNVLSTVQNGCKAGSRGTKELLLIDMTICQQVRRVRKNLSAAWIDYKKAYDSLPHTWLLKVMKLYKVNNILYTFLSACIGQWVTFLCPPDGGNFSDSNNLIKIERGIFQGDSLSPLWFCLALNPLSSLLKNSGLGYRLRRGGEIISHLLYMDDLKLYASKKIDLVELLKITEDFSRSIKMDFGIDKCAVIHVERGKIVSTGENLNINSTVSLKTLSEIETYKYLGMPEALCIKDTDIKQSVKARFLARLTKVLKSLLSGGNKVRAFNGWAMPVLTYTFGILKWTQTELDALDRKVRKLLSLYRMHHPRSSIMRLYIPRKCGGRGFLNAKDLHNREVYNLREYFFNIDVGVHRDVVSVDKGFTPLSLAKQDWRKPSMLSTIERKTIWKSKELHGRFYKVLTGADVDFPASVSWLQFGNLFGETEGFVCAIMDEVIKTNNYRKHIMKDGTTDICRACRRPGESLRHIVSGCSYLANSDYLHRHNQVAKIIHQQLALKYGLIDFEVPYYKYTPVPILENGHALLYWDRSIVTDRCIIFNKPDIVILDHRSSTDRSTSGNYR

SEQ ID NO: 27938 - protein, 1195 aa, Bibasis iluska
MRKSKREKAQMSSKHASSSSTSQSSVEVEKMQRNSSSNAAVESNEAGPSTSRPPVRGRAPRSACLGPAELRAPMKAPATGGVVRRMRWSQKMNESVMRAYYRATEGETNLTAYRDRMLSLFQELEPTLTVSAQRLSDQVRAIQRCQLLEESVLERLRSEVLPVIASADFHRVHSVVAHSTMIVKQSVPDCEIGDRNDEIVSTQSSEQMRSALNDAILEFGSISSESRPVLPRLPINKHNMSLVRVLDQIIPQYFEKSKSLVDTHSILYCGAVAVCRTAGVKLHTDHLKPRNTDYVPAWQSRIEKRISLTRTLIGKLICFREGNTRPRVMRFVHQAFAGTQIRVPDYMINVTERIDYFKQKVLAWAKRINRFKTRTNRYNQNRIFQSNQKIVYRNWEGSSVTDGDLPDQKLLVNFWKNIWSAPVSHTESELMRVVERECELIQEMDPINITSGDIRTAINLASNWKSPGSDGLHNFWLKWLKSSHSYLASQFQEAVVNGSLPIFMTTGITYLIHKSGCTTDPKNYRPITCLPTIYKLLTSIIKSKIINHLKTNNVLSVVQNGCKVGSRGTKELLLIDMTICQQVRRARKNLSAAWIDYKKAYDSLPHTWLKKVLHLYKVNETLRTFLGTCMGRWVTYLCPPQCENFSDSTNLVKIERGIFQGDSLSPLWFCLALNPLGSILKNSGLGYRLRRGGEIVSHLLYMDDLKLYASKKQDLVELLRVTSNFSSSIRMEFGIDKCAVIHVERGKIVSTGETLNVREDVTLKTLSETDTYKYLGMPETLGFMDTDIKQSVKARFFARLTKVLKSLLSGGNKVRAFNGWVIPVITYTFGILKWTQTELDALDRKVRKMLTLYRMHHPRSSVMRLYIPRKCGGRGFLNAKDLHNREVYSLREYFFNMEAGVHRDVVSVDKGLTPLYLAKQDWNMPVVLGTSERRTIWKSKELHGRFYRALTGDDVDFSSSVYWLQFGDLFGETEGFVCAIMDEVIKTNNYRKHILKDGTIDICRACHRPGESLRHVVSGCSYLANSEYLHRHNQVAKIIHQQLALRYDLLDTEVPYYKYTPAPVLENGRAVLYWDRSVITDKCIIFNKPDIVIIDRSARRAILVDVTIPHDDNLVKAEKDKQSKYLDLAHEVTAMWDVDSTAIVPIVVSVNGLLAKSFDQHLKKLSLGGWIKGRVQKAVLLETARIVRRFLTLEP

SEQ ID NO: 27939 - protein, 1197 aa, Sesamia nonagrioides
MLTRSAARRARPPSPDSLLSSASPPPASSATVSAVTTPAAAVASSSSDEYFSPPTTPPPARRRGGRRPPDRLGPRGPSASDRVPAPGGSVQRMRWTQSINENVMRSYYGATEGGNNLTAYRVRMLSLFQVLEPAVNVSAQRLSDQVRVIQRNHMLDDTVLDRLRNEMQSSRIIAHQSQTAEIPPQPTNYADEGSNDRATNVSTQCNEELINALEAAIREYRFTPAELRPRLPRLPMHNRNRALMAALDAQLSDYFDTCEDLTDTHSILYCAAVAACRVAHVKFPSDSRATRPKPVVPAWQHRIERRIGGARALIGKLICFREGNTRPRVMRFVRRAFAGTNISPQNYMARVTERIDFLKQKVYAWANRIRRYKRRVERYTQNRTFQSNERWVYRDWERPEQGVTDTCLPDDDAMCSFWRSIWSVPVSHTEGDWARDVERACDPIPEMGAITICPQDVAYAVRPLPNWKSPGPDGLHNFWIKWFPRSHARLASQFQTALVSGSLPQFLTTGITHLLHKSGSTAEPKNYRPITCLPTVYKVLTSILKTKINKHIDSNSIMSASQNGCRSGSRGTKELLLIDMAISQQVRRSRKDLSTCWIDYRKAYDSVPHTWLMRVLELYKVDATLRTFLMSCMKTWRTVLRYPGCRNIQRNSEPIRIERGIFQGDSLSPLWFCLALNPLSTLLEDSGLGYRLRRGGQVISHLLYMDDLKLFAPNNSQLRELLKITETFSSSIRMEFGVDKCAVMHVKRGEIMESVGTQLTDSINLRALSASETYKYLGMSEALGINVTDMKQSLKERFFGRLKKVLNSLLSGGNKVRAFNGWVMPVLMYSFGILKWTQTELDALDQRVRTLLTANRLHHPRSSFMRLYIPRKCGGRGFLNAKTLHNREVCSLRDYFLVNDVGMHRDVVAADKGLTPLSLAKENWRKPVVLDTNDRMEVWKSKELHGRFFRALHGPDVDLQASVAWLRFGDLFGETEGFVFAIMDEVMMTNNYRRFIVKDGTVDICRACHRPGESIRHIISGCSRLANGEYLHRHNLVARIIHQQLALKYNLVESEVPYYRYTPDPVLENGYITLYWDRSIITDRTIVANKPDIVMVDRSERRAIIVDITIPHDENLVKAEKDKQIKYLDLAHEVVDMWEVDSAIIVPIVVTANGLIAKSLDQHLRRLSLGSWIKGLIQKAVLLDTARIVRKFLSLEP

SEQ ID NO: 27940 - protein, 1241 aa, Sesamia nonagrioides
MLTRSAARRARPPSPDSLLGSASSPPVSSATASAVTTPAAAVASSSSDEYFSPPTTPPPARRRGGRRPPDRLGPRGPSASDRVPAPGGSVQRMRWTQSINENVMHSYYGATEGGNNLTAYRVRMLSLFQVLEPAVNVSAQRLSDQVRVIQRNHMLDDVVLDRLRLESRNSHVTPASSLVAVQLNSVSPRPNHVDEEDDDRAISVSPQCIEKLRSALEDAFCEYRSTLPELRPRLPRLPMHKKNKALVCALDSQLSYYLKDSKDLTDTHSILYCGAVAICRVAHVKFPDSDRATRPKSAVPAWQCRIERRIGETRALIGKLTSFREGNTRPRVMRFVRRAFSGTDTSTRDYLSRVTERIDFFKQKIYAWANRIRRYKRRVERYSQNRNFQSDERRVYRTWERSDQGVTDTCLPDDDATCSFWRNIWSVPVSHTEGSWTRVVERACDPVPEMGAITICPQDVARAVRPLPNWKSPGPDGLHNFWIKWFSRSHARLASQFQTALESGSLPQFLTTGVTHLLHKSGSTAEPKNYRPITCLPTVYKVLTSILKSKINTHIDSNSIMSASQNGCRSGSRGTKELLLIDMAISQQVRRSRKDLSTCWIDYKKAYDSVPHTWLMRVLELYKVDATLRTFLMTCMRTWRTVLRYPGCRNIQRNSEPIRIERGIFQGDSLSPLWFCLALNPLSTLLEDSGLGYRLRRGGQVISHLLYMDDLKLFAHTDSQLKELLKITETFSSSIRMEFGVDKCAVMHVKRGEIMESVGTQLTSSINLRALSASETYKYLGMSEALGINVTDMKQSLKERFFGRLKKVLNSLLSGGNKVRAFNGWVMPVLMYSFGILKWTQTELDALDQRVRTLLTANRLHHPRSSVMRLYIPRKCGGRGFLNAKTLHNREVCSLREYFLETDVGMHRDVVAADKGLTPLSLAKENWRKPVVLDTNDRLEVWKSKELHGRFFRALHGPDIDFQASVAWLRFGDLFGETEGFVFAIMDEVMMTNNYRRFIVKDGTVDICRACHRPGESIRHIISGCSRLANGEYLHRHNLVARIIHQQLALKYNLVESEVPYYRYMPDPVLEYGHITLYWDRSIITDRTIVANKPDIVLVDRSERRAMIVDITIPHDENLVKAEKDKQIKYLDLAHEVVDMWEVDSAIIVPIVVTANGLIAKSLDQHLRRLSLGSWIKGLIQKAVLLDTARIVRKFLSSGALTAGSLDPVPDTGGLLFCIFLNVFMCLYKYLKISIICMLNK

SEQ ID NO: 27941 - protein, 1114 aa, Amphipyra tragopoginis
MCRACDGLSPLMRTSCAHIMGLQRGELTLLRTENRMLSLFQVLEPAINVSTQRLSDQVRVIQRNRRLDDTVLERLRSEVQNNRTVTTPLQAAEQPQLPAVSPRPIHVDEAGDGEVIVVSNQCSDELRSALEGAILEYRATPPELKPRLPRLPMHKKNRALVCALDSLLSNYFDGSEDLGDTHSILYCAAIAACRVANVKLTENERATRPKPAVPAWQYRIERRIDGARALIGKLICFREGNTRPRVMRFVRRAFSGTDISPRDYMSRVTERIDFLKQKVYAWANRIRRYKRRVERYTQNRTFQSDQRRVYRTWERPVPGVSDMRLPDDDAMSSFWRSIWSVPVAHTEGDWMRDIERACETIPEMGEIVISPQDVATAARPLPNWKSPGPDGLHNFWIKWLRSSHACLASQFQSSLESGSLPQFLTTGVTHLLYKSGSTAEPKNYRPITCLPTVYKLLTSILRVKISNHIDNNYILSPSQNGCRSGSRGTKELLLIDMAISQQVRRSQKDLSTCWIDYKKAYDSVPHTWLMRVMELYKINTTLRTLLMSCMRQWRTVLRYPGCREILGRGEPIRIERGIFQGDSLSPLWFCLALNPLSTLLEGTRLGYRLRREGQVISHLLYMDDLKLFAPTDLQLMELLKVTENFSNSIRMEFGVDKCAVMHVKRGGIVESEGIQFSNSIQLRSLSPTETYKYLGMSEALGISEADMRQSLRERFFGRLNKVLKSVLSGGNKVRAFNGWVMPVLMYSFGILRWTQTDLDALDRRVRALLTVHRMHHPRSSVMRLYIPRKCGGRGFLNAKTLHNREVYSLREYFLQAEGEMHRDVVAVDRGLTPLALAKENWRKPVVLSTNDREEVWQSKELHGRFYRALHGPDVDFSASVSWLRFGDLFGETEGFVCAIMDEVMMTNNYRKYIVKDGTVDICRACHRPGESIRHIVSGCSRLANGEYLHRHNLVARIIHQQLALKYNLVESEVPYYRYVPDPVLENGHATLYWDRSIITDRTIVANKPDIVVIDRSERRTVIVDITVPHDENLVKAEKDKQLKYLDLAHEVVAMWDVDSAVIVPIVVTANGLIAKSLDQHLKRLSLDGWIKGLIQKAVLLDTARIVRRFLSLEP

SEQ ID NO: 27942 - protein, 1202 aa, Amphipyra tragopoginis
MMLTRSQARARNYYAHPPPPDSSPSSASQQQELDPAPPAAAVASSSSDEYFSPPSSPPPVRRRGGARPPACLGPRGQPAPNRVPAAGGNVSRMRWTQSINENVMRAYYGATEGGINLTAYRDRMLSLFQVLEPAINVSTQRLSDQVRVIQRNRRLDDTVLERLRSEVQNNRTVTTPLQAAEQPQLPAVSPRPIHVDEAGDGEVIVVSNQCSDELRSALEGAILEYRATPPELKPRLPRLPMHKKNRALVCALDSLLSNYFDGSEDLGDTHSILYCAAIAACRVANVKLTENERATRPKPAVPAWQYRIERRIDGARALIGKLICFREGNTRPRVMRFVRRAFSGTDISPRDYMSRVTERIDFLKQKVYAWANRIRRYKRRVERYTQNRTFQSDQRRVYRTWERPVPGVSDMRLPDDDAMSSFWRSIWSVPVAHTEGDWMRDIERACETIPEMGEIVISPQDVATAARPLPDWKSPGPDGLHNFWIKWLRSSHACLASQFQSSLESGSLPQFLTTGVTHLLYKSGSTAEPKNYRPITCLPTVYKLLTSILRVKISNHIDNNYILSPSQNGCRSGSRGTKELLLIDMAISQQVRRSQKDLSTCWIDYKKAYDSVPHTWLMRVMELYKINTTLRTLLMSCMRQWRTVLRYPGCREILGRGEPIRIERGIFQGDSLSPLWFCLALNPLSTLLEGTRLGYRLRREGQVISHLLYMDDLKLFAPTDLQLMELLKVTENFSNSIRMEFGVDKCAVMHVKRGGIVESEGIQFSNSIQLRSLSPTETYKYLGMSEALGISEADMRQSLRERFFGRLNKVLKSVLSGGNKVRAFNGWVMPVLMYSFGILKWTQTDLDALDRRVRALLTVHRMHHPRSSVMRLYIPRKCGGRGFLNAKTLHNREVYSLREYFLQAEGEMHRDVVAVDRGLTPLALAKENWRKPVVLSTNDREEVWQSKELHGLFYRALHGPDVDFSASVSWLRFGDLFGETEGFVCAIMDEVMMTNNYRKYIVKDGTVDICRACHRPGESIRHIVSGCSRLANGVYLHRHNLVARIIHQQLALKYNLVESEVPYYRYVPDPVLENGHATLYWDRSIITDRTIVANKPDIVVIDRSERRTMIVDITVPHDENLVKAEKDKQLKYLDLAHEVVAMWDVDSAVIVPIVVTANGLIAKSLDQHLKRLSLDGWIKGLIQKAVLLDTARIVRRFLSLEP

SEQ ID NO: 27943 - protein, 1205 aa, Amphipyra tragopoginis
MKFRITLSLSFFYEKCIIFKMMMFDFFYCLDIHKYVKKNSRRTITKQQSFRFLRWKIPVGPIVRRRGGARPPACLGPRGQPAPNRVPAAGGNVSRMRWTQSINENVMRAYYGATEGGINLTAYRDRMLSLFQVLEPAINVSTQRLSDQVRVIQRNRRLDDTVLERLRSEVQNNRTVTTPLQAAEQPQLPAVSPRPIHVDETGDGEVIVVSNQCSDELRSALEGAILEYRATPPELKPRLPRLPMHKKNRALVCALDSLLSNYFDGSEDLGDTHSILYCAAIAACRVANVKLTENERATRPKPAVPAWQYRIERRIDGARALIGKLICFREGNTRPRVMRFVRRAFSGTDISPQDYMSRVTERIDYLKQKVYAWANRIRRYKRRVERYTRNRTFQSDQRRVYRTWERPVPGVSDMRLPDDDAMSLFWRSIWSVPVAHTEGDWMRDIERACETIPEMGEIVISPQDVATAARPLPNWKSPGPDGLHNFWIKWLRSSHACLASQFQSSLESGSLPQFLTTGVTHLLYKSGSTAEPKNYRPITCLPTVYKLLTSILRVKISNHIDNNYILSPSQNGCRSGSRGTKELLLIDMAISQQVRRSQKDLSTCWIDYKKAYDSVPHTWLMRVMELYKINTTLRTLLMSCMRQWRTVLRYPGCREILGRGEPIRIERGIFQGDSLSPLWFCLALNPQSTLLEGTRLGYRLRREGQVISHLLYMDDLKLFAPTDLQLMELLKVTENFSNSIRMEFGVDKCAVMHVKRGGIVESEGIQFSNSIQLRSLSPTETYKYLGMSEALGISEADMRQSLRERFFGRLNKVLKSVLSGGNKVRAFNGWVMPVLMYSFGILKWTQTDLDALDRRVRALLTVHRMHHPRSSVMRLYIPRKCGGRGFLNAKTLHNREVYRLREYFLQAEGEMHRDVVAVDRGLTPLALAKENWRKPVVLSTNDREEVWQSKELHGRFYRALHGPDVDFSASVSWLRFGDLFGETEGFVCAIMDEVMMTNNYRKYIVKDGTVDICRACHRPGESIRHIVSGCSRLANGEYLHRHNLVARIIHQQLALKYNLVESEVPYYRYVPDPVLENGHATLYWDRSIITDRTIVANKPDIVVIDRSERRTMIVDITVPHDENLVKAEKDKQLKYLDLAHEVVAMWDVDSAVIVPIVVTANGLIAKSLDQHLKRLSLDGWIKGLIQKAVLLDTARIVRRFLSLEP

SEQ ID NO: 27944 - protein, 1202 aa, Amphipyra tragopoginis
MMLTRSQARARNYYAHPPPPDSSPSSASQQQELDPAPPAAAVASSSSDEYFSPPSSPPPVRRRGGARPPACLGPRGQPAPNRVPAAGGNVSRMRWTQSINENVMRAYYGATEGGINLTAYRDRMLSLFQVLEPAINVSTQRLSDQVRVIQRNRRLDDTVLERLRSEVQNNRTVTTPLQAAEQPQLPAVSPRPIHVDEAGDGEVIVVSNQCSDELRSALEGAILEYRATPPELKPRLPRLPMHKKNRALVCALDSLLSNYFDGSEDLGDTHSILYCAAIAACRVANVKLTENERATRPKPAVPAWQYRIERRIDGARALIGKLICFREGNTRPRVMRFVRRAFSGTDISPRDYMSRVTERIDFLKQKVYAWANRIRRYKRRVERYTQNRTFQSDQRRVYRTWERPVPGVSDMRLPDDDAMSSFWRSIWSVPVAHTEGDWMRDIERACETIPEMGEIVISPQDVATAARPLPNWKSPGPDGLHNFWIKWLRSSHACLASQFQSSLESGSLPQFLTTGVTHLLYKSGSTAEPKNYRPITCLPTVYKLLTSILRVKISNHIDNNYILSPSQNGCRSGSRGTKELLLIDMAISQQVRRSQKDLSTCWIDYKKAYDSVPHTWLMRVMELYKINTTLRTLLMSCMRQWRTVLRYPGCREILGRGEPIRIERGIFQGDSLSPLWFCLALNPLSTLLEGTRLGYRLRREGQVISHLLYMDDLKLFAPTDLQLMELLKVTENFSNSIRMEFGVDKCAVMHVKRGGIVESEGIQFSNSIQLRSLSPTETYKYLGMSEALGISEADMRQSLRERFFGRLNKVLKSVLSGGNKVRAFNGWVMPVLMYSFGILKWTQTDLDALDRRVRALLTVHRMHHPRSSVMRLYIPRKCGGRGFLNAKTLHNREVYSLREYFLQAEGEMHRDVVAVDRGLTPLALAKENWRKPVVLSTNDREEVWQSKELHGRFYRALHGPDVDFSASVSWLRFGDLFGETEGFVCAIMDEVMMTNNYRKYIVKDGTVDICRACHRPGESIRHIVSGCSRLANGEYLHRHNLVARIIHQQLALKYNLVESEVPYYRYVPDPVLENGHATLYWDRSIITDRTIVANKPDIVVIDRSERRTMIVDITVPHDENLVKAEKDKQLKYLDLAHEVVAMWDVDSAVIVPIVVTANGLIAKSLDQHLKRLSLDGWIKGLIQKAVLLDTARIVRRFLSLEP

SEQ ID NO: 27945 - protein, 1236 aa, Amphipyra tragopoginis
MLTRARARQKDARPRSPDSSLCSASQPPESSPPVSAVTPAAAVASSSSDEYFSPPSSPPPVRRRGGARPPACLGPRSQPASNRVPAAGGNVSRMRWTQSINENVMRAYYGATDGGINLTAYRDRMLSLFQVLEPAINVSTQRLSDQVRVIQRNRRLDDTVLERLRSETQNNRTVTSPAQAAVQPQLPAVPPRPSHADGEGDGEVIEVSNQCSDELWSALEGAILEYRTTPPELRPRLPRLPMHKKNRALVCALDSLLSNYFDGSEDLADTHSILYCAAIAACRVAHVKFTESDRATRPKPVVPAWQCRIERRIGGARALIGKLICFREGNTRPRVMRFVRRAFSGTDISPRDYMSRITERIDFLKQKVYAWANRIRRYKRRVERYTRNRTFQSDQRRVFRTWERPDPSGSDVRLPDDEAMGSFWRSIWSVPIAHTEGDWMRDIERACEPIPEMGAIIISPQDVAGAARPLPNWKSPGPDGLHNFWLKWLRSSHACLASQFQSSLESGSLPQFLTTGATHLLYKSGSTAEPKNYRPITCLPTVYKLLTSILRVKISNHIDNNSILSPSQNGCRSGSRGTKELLLIDMTISQQVRRSRKDLSTCWIDYKKAYDSVPHTWLMRVLELYKINTTLRTFLMSCMRQWRTVLRYPGCREIRGRGEPIRIERGIFQGDSLSPLWFCLALNPLSTLLEGTRLGYRLRREGQVISHLLYMDDLKLFAPTDLRLMELLKVTENFSSSIRMEFGVDKCAVMHVKRGGIVESEGIQISNSIQLRSLSPTETYKYLGMSEALGISEADMRQSLRERFFGRLNKVLRSLLSGGNKVRAFNGWVMPVLMYSFGILKWTQTDLEALDRRVRALLTVHRMHHPRSSVMRLYIPRKCGGRGFLNAKTLHNREVCSLREYFLQAEGEMHRDVVAVDKGLTPLALAKENWRKPAVLSTNDREEVWQSKELHGRFYRALHGPDVDFPASVSWLRFGDLFGETEGFVCAIMDEVMMTNNYRKYIVKDGTVDICRACHRPGESIRHIISGCSRLANGEYLHRHNLVARIIHQQLALKYNLVESEVPYYRYVPDPVLENGHATLYWDRSIITDRTIVANKPDIVVIDRSERRTMIVDITVPHDENLVKAEKDKQIKYLDLAHEVVGMWDVDSAVVVPIVVTANGLIAKSLDQHLKRLSLGGWIKGLLQKAVLLDTARIVRRPSRGGSFLWSPDCRQLGPCSRCRWDTIFYIFKCILFFYL

SEQ ID NO: 27946 - protein, 1202 aa, Amphipyra tragopoginis
MMLTRSQARARNYYAHPPPPDSSPSSASQQQELDPAPPAAAVASSSSDEYFSPPSSPPPVRRRGGARPPACLGPRGQPAPNRVPAAGGNVSRMRWTQSINENVMRAYYGATEGGINLTAYRDRMLSLFQVLEPAINVSTQRLSDQVRVIQRNRRLDDTVLERLRSEVQNNRTVTTPLQAAEQPQLPAVSPRPIHVDEAGDGEVIVVSNQCSDELRSALEGAILEYRATPPELKPRLPRLPMHKKNRALVCALDSLLSNYFDGSEDLGDTHSILYCAAIAACRVANVKLTENERATRPKPAVPAWQYRIERRIDGARALIGKLICFREGNTRPRVMRFVRRAFSGTDISPRDYMSRVTERIDFLKQKVYAWANRIRRYKRRVERYTRNRTFQSDQRRVYRTWERPVPGVSDMRLPDDDAMSSFWRSIWSVPVAHTEGDWMRDIERACETIPEMGEIVISPQDVATAARPLPNWKSPGPDGLHNFWIKWLRSSHACLASQFQSSLESGSLPQFLTTGVTHLLYKSGSTAEPKNYRPITCLPTVYKLLTSILRVKISNHIDNNYILSPSQNGCRSGSRGTKELLLIDMAISQQVRRSQKDLSTCWIDYKKAYDSVPHTWLMRVMELYKINTTLRTLLMSCMRQWRTVLRYPGCREILGRGEPIRIERGIFQGDSLSPLWFCLALNPLSTLLEGTRLGYRLRREGQVISHLLYMDDLKLFAPTDLQLMELLKVTENFSNSIRMEFGVDKCAVMHVKRGGIVESEGIQFSNSIQLRSLSPTETYKYLGMSEALGISEADMRQSLRERFFGRLNKVLKSVLSGGNKVRAFNGWVMPVLMYSFGILRWTQTDLDALDRRVRALLTVHRMHHPRSSVMRLYIPRKCGGRGFLNAKTLHNREVYSLREYFLQAEGEMHRDVVAVDRGLTPLALAKENWRKPVVLSTNDREEVWQSKELHGRFYRALHGPDVDFSASVSWLRFGDLFGETEGFVCAIMDEVMMTNNYRKYIVKDGTVDICRACHRPGESIRHIVSGCSRLANGEYLHRHNLVARIIHQQLALKYNLVESEVPYYRYVPDPVLENGHATLYWDRSIITDRTIVANKPDIVVIDRSERRTVIVDITVPHDENLVKAEKDKQLKYLDLAHEVVAMWDVDSAVIVPIVVTANGLIAKSLDQHLKRLSLDGWIKGLIQKAVLLDTARIVRRFLSLEP

SEQ ID NO: 27947 - protein, 962 aa, Amphipyra tragopoginis
MHKKNRALVCALDSLLSNYFDGSEDLGDTHSILYCAAIAACRVANVKLTENERATRPKPAVPAWQYRIERRIDGARALMGKLICFREGNTRPRVMRFVRRAFSGTDISPRDYMSRVTERIDFLKQKVYAWANRIRRYKRRVERYTRNRTFQSDQRRVYRTWERPVPGVSDMRLPNDDAMSSFWRSIWSVPVAHTEGDWMRDIERACETIPEMGEIVISPQDVATAARPLPNWQSPGPDGLHNFWIKWLRSSHACLASQFQSSLESGSLPQFLTTGVTHLLYKSGSTAEPKNYRPITCLPTVYKLLTSILRVKISNHIDNNYILSPSQNGCRSGSRGTKELLLIDMAISQQVRRSQKDLSTCWIDYKKAYDSVPHTWLMRVMELYKINTTLRTLLMSCMRQWRTVLRYPGCREILGKGEPIRIERGIFQGDSLSPLWFCLALNPLSTLLEGTRLGYRLRREGQVISHLLYMDDLKLFAPTDLQLMELLKVTENFSNSIRMEFGVDKCAVMHVKRGGIVESEGIQFSNSIQLRSLSPTETYKYLGMSEALGISEADMRQSLRERFFGRLNKVLKSVLSGGNKVRAFNGWVMPVLMYSFGILKWTQTDLDALDRRVRALLTVHRMHHPRSSVMRLYIPRKCGGRGFLNAKTLHNREVYSLREYFLQAEGEMHRDVVAVDRGLTPLALAKENWRKPVVLSTNDREEVWQSKELHGRFYRALHGPDVDFSASVSWLRFGDLFGETEGFVCAIMDEVMMTNNYRKYIVKDGTVDICRACHRPGESIRHIVSGCSRLANGEYLHRHNLVARIIHQQLALKYNLVESEVPYYRYVPDPVLENGHATLYWDRSIITDRTIVANKPDIVVIDRSERRTMIVDITVPHDENLVKAEKDKQLKYLDLAHEVVAMWDVDSAVIVPIVVTANGLIAKSLDQHLKRLSLDGWIKGLIQKAVLLDTARIVRRFLSLEP

SEQ ID NO: 27948 - protein, 1202 aa, Amphipyra tragopoginis
MMLTRSQARARNYYAHPPPPDSSPSSASQQQELDPAPPAAAVASSSSDEYFSPPSSPPPVRRRGGARPPACLGPRGQPAPNRVPAAGGNVSRMRWTQSINENVMRAYYGATEGGINLTAYRDRMLSLFQVLEPTINVSTQRLSDQVRVIQRNRRLDDTVLERLRSEVQNNRTVTTPLQAAEQPQLPAVSPRPIHVDEAGDGEVIVVSNQCSDELRSALEGAILEYRATPPELKPRLPRLPMHKKNRALVCALDSLLSNYFDGSEDLGDTHSILYCAAIAACRVANVKLTENERATRPKPAVPAWQYRIERRIDGARALIGKLICFREGNTRPRVMRFVRRAFSGTDISPRDYMSRVTERIDFLKQKVYAWANRIRRYKRRVERYTRNRTFQSDQRRVYRTWERPVPGVSDMRLPDDDAMSSFWRSIWSVPVAHTEGDWMRDIERACETIPEMGEIVISPQDVATAARPLPNWKSPGPDGLHNFWIKWLRSSHACLASQFQSSLESGSLPQFLTTGVTHLLYKSGSTAEPKNYRPITCLPTVYKLLTSILRVKISNHIDNNYILSPSQNGCRSGSRGTKELLLIDMAISQQVRRSQKDLSTCWIDYKKAYDSVPHTWLMRVMELYKINTTLRTLLMSCMRQWRTVLRYPGCREILGRGEPIRIERGIFQGDSLSPLWFCLALNPLSTLLEGTGLGYRLRREGQVISHLLYMDDLKLFAPTDLQLMELLKVTENFSNSIRMEFGVDKCAVMHVKRGGIVESEGIQFSNSIQLRSLSPTETYKYLGMSEALGISEADMRQSLRERFFGRLNKVLKSVLSGGNKVRAFNGWVMPVLMYSFGILKWTQTDLDALDRRVRALLTVHRMHHPRSSVMRLYIPRKCGGRGFLNAKTLHNREVYSLREYFLQAEGEMHRDVVAVDRGLTPLALAKENWRKPVVLSTNDREEVWQSKELHGRFYRALHGPDVDFSASVSWLRFGDLFGETEGFVCAIMDEVMMTNNYRKYIVKDGTVDICRACHRPGESIRHIVSGCSRLANGEYLHRHNLVARIIHQQLALKYNLVESEVPYYRYVPDPVLENGHATLYWDRSIITDRTIVANKPDIVVIDRSERRTMIVDITVPHDENLVKAEKDKQLKYLDLAHEVVAMWDVDSAVIVPIVVTANGLIAKSLDQHLKRLSLDGWIKGLMQKAVLLDTARIVRRFLSLEP

SEQ ID NO: 27949 - protein, 1200 aa, Amphipyra tragopoginis
MMLTRSQARNYYAHPPPPDSSPSSASQQQELDPAPPAAAVASSSSDEYFSPPSSPPPVRRRGGARPPACLGPRGQPAPNRVPAAGGNVSRMRWTQSINENVMRAYYGATEGGINLTAYRDRMLSLFQVLEPAINVSTQRLSDQVRVIQRNRRLDDTVLERLRSEVQNNRTVTTPLQAAEQPQLPAVSPRPIHVDEAGDGEVIVVSNQCSDELRSALEGAILEYRATPPELKPRLPRLPMHKKNRALVCALDSLLSNYFDGSEDLGDAHSILYCAAIAACRVANVKLTENERATRPKPAVPAWQYRIERRIDGARALIGKLICFREGNTRPRVMRFVRRAFSGTDISPRDYMSRVTERIDFLKQKVYAWANRIRRYKRRVERYTQNRTFQSDQRRVYRTWERPVPGVSDMRLPDDDAMSSFWRSIWSVPVAHTEGDWMRDIERACETIPEMGEIVISPQDVATAARPLPNWKSPGPDGLHNFWIKWLRSSHACLASQFQSSLESGSLPQFLTTGVTHLLYKSGSTAEPKNYRPITCLPTVYKLLTSILRVKISNHIDNNYILSPSQNGCRSGSRGTKELLLIDMAISQQVRRSQKDLSTCWIDYKKAYDSVPHTWLMRVMELYKINTTLRTLLMSCMRQWRTVLRYPGCREILGRGEPIRIERGIFQGDSLSPLWFCLALNPLSTLLEGTRLGYRLRREGQIISHLLYMDDLKLFAPTDLQLMELLKVTENFSNSIRMEFGVDKCAVMHVKRGGIVESEGIQFSNSIQLRSLSPTETYKYLGMSEALGISEADMRQSLRERFFGRLNKVLKSVLSGGNKVRAFNGWVMPVLMYSFGILKWTQTDLDALDRRVRALLTVHRMHHPRSSVMRLYIPRKCGGRGFLNAKTLHNREVYSLREYFLQAEGEMHRDVVAVDRGLTPLALAKENWRKPVVLSTNDREEVWQSKELHGRFYRALHGPDVDFSASVSWLRFGDLFGETEGFVCAIMDEVMMTNNYRKYIVKDGTVDICRACHRPGESIRHIVSGCSRLANGEYLHRHNLVARIIHQQLALKYNLVESEVPYYRYVPDPVLENGHATLYWDRSIITDRTIVANKPDIVVIDRSERRTMIVDITVPHDENLVKAEKDKQLKYLDLAHEVVAMWDVDSAVIVPIVVTANGLIAKSLDQHLKRLSLDGWIKGLIQKAVLLDTARIVRRFLSLEP

SEQ ID NO: 27950 - protein, 1202 aa, Amphipyra tragopoginis
MMLTRSQARARNYYAHPPPPDSSPSSASQQQELDPAPPAAAVASSSSDEYFSPPSSPPPVRRRGGARPPACLGPRGQPAPNRVPAAGGNVSRMRWTQSINENVMRAYYGATEGGINLTAYRDRMLSLFQVLEPAINVSTQRLSDQVRVIQRNRRLDDTVLERLRSEVQNNRTVTTPLQAAEQPQLPAVSPRPIHVDEAGDGEVIVVSNQCSDELRSALEGAILEYRATPPELKPRLPRLPMHKKNRALVCALDSLLSNYFDGSEDLGDTHSILYCAAIAACRVANVKLTENERATRPKPAVPAWQYRIERRIDGARALIGKLICFREGNTRPRVMRFVRRAFSGTDISPRDYMSRVTERIDFLKQKVYAWANRIRRYKRRVERYTQNRTFQSDQRRVYRTWERPVPGVSDMRLPDDDAMSSFWRSIWSVPVAHTEGDWMRDIERACETIPEMGEIVISPQDVATAARPLPNWKSPGPDGLHNFWIKWLRSSHACLASQFQSSLESGSLPQFLTTGVTHLLYKSGSSAEPKNYRPITCLPTVYKLLTSILRVKISNHIDNNYILSPSQNGCRSGSRGTKELLLIDMAISQQVRRSQKDLSTCWIDYKKAYDSVPHTWLMRVMELYKINTTLRTLLMSCMRQWRTVLRYPGCREILGRGEPIRIERDIFQGDSLSPLWFCLALNPLSTLLEGTRLGYRLRREGQVISHLLYMDDLKLFAPTDLQLMELLKVTENFSNSIRMEFGVDKCAVMHVKRGGIVESEGIQFSNSIQLRSLSPTETYKYLGMSEALGISEADMRQSLRERFFGRLNKVLKSVLSGGNKVRAFNGWVMPVLMYSFGILKWTQTDLDALDRRVRALLTVHRMHHPRSSVMRLYIPRKCGGRGFLNAKTLHNREVYSLREYFLQAEGEMHRDVVAVDRGLTPLALAKENWRKPVVLSTNDREEVWQSKELHGRFYRALHGPDVDFSASVSWLRFGDLFGETEGFVCAIMDEVMMTNNYRKYIVKDGTVDICRACHRPGESIRHIVSGCSRLANGEYLHRHNLVARIIHQQLALKYNLVESEVPYYRYVPDPVLENGHATLYWDRSIITDRTIVANKPDIVVIDRSERRTMIVDITVPHDENLVKAEKDKQLKYLDLAHEVVAMWDVDSAVIVPIVVTANGLIAKSLDQHLKRLSLDGWIKGLIQKAVLLDTARIVRRFLSLEP

SEQ ID NO: 27951 - protein, 1079 aa, Amphipyra tragopoginis
MLSLFQVLEPAINVSTQRLSDQVRVIQRNRRLDDTVLERLRSEVQNNRTVTTPLQAAEQPQLPAVSPRPIHVDEAGDGEVIVVSNQCSDELRSALEGAILEYRATPPELKPRLPRLPMHKKNRALVCALDSLLSNYFDGSEDLGDTHSILYCAAIAACRVANVKLTENERATRPKPAVPAWQYRIERRIDGARALIGKLICFREGNTRPRVMRFVRRAFSGTDISPRDYMSRVTERIDFLKQKVYAWANRIRRYKRRVERYTRNRTFQSDQRRVYRTWERPVPGVSDMRLPDDDAMNSFWRSIWSVPVAHTEGDWMRDIERACETIPEMGEIVISPQDVATAARPLPNWKSPGPDGLHNFWIKWLRSSHACLASQFQSSLESGSLPQFLTTGVTHLLYKSGSTAEPKNYRPITCLPTVYKLLTSILRVKISNHIDNNYILSPSQNGCRSGSRGTKELLLIDMAISQQVRRSQKDLSTCWIDYKKAYDSVPHTWLMRVMELYKINTTLRTLLMSCMRQWRTVLHYPGCREILGRGEPIRIERGIFQGDSLSPLWFCLALNPLSTLLEGTRLGYRLRREGQVISHLLYMDDLKLFAPTDLQLMELLKVTENFSNSIRMEFGVDKCAVMHVKRGGIVESEGIQFSNSIQLRSLSPTETYKYLGMSEALGISEADMRQSLRERFFGRLNKVLKSVLSGGNRVRAFNGWVMPVLMYSFGILKWTQTDLDALDRRVRALLTVHRMHHPRSSVMRLYIPRKCGGRGFLNAKTLHNREVYSLREYFLQAEGEMHRDVVAVDRGLTPLALAKENWRKPVVLSTNDREEVWQSKELHGRFYRALHGPDVDFSASVSWLRFGDLFGETEGFVCAIMDEVMMTNNYRKYIVKDGTVDICRACHRPGESIRHIVSGCSRLANGEYLHRHNLVARIIHQQLALKYNLVESEVPYYRYVPDPVLENGHATLYWDRSIITDRTIVANKPDIVVIDRSERRTMIVDITVPHDENLVKAEKDKQLKYLDLAHEVVAMWDVDSAVIVPIVVTANGLIAKSLDQHLKRLSLDGWIKGLIQKAVLLDTARIVRRFLSLEP

SEQ ID NO: 27952 - protein, 1109 aa, Amphipyra tragopoginis
MRWTQSINENVMRAYYGATEGGINLTAYRDRMLSLFRVLEPAINVSTQRLSDQVRVIQRNRRLDDTVLERLRSEVQNNRTVTTPLQAAEQPQLPAVLRPIHVDEAGDGEVIVVSNQCSDELRSALEGAILEYRATPPELKPRLPRLPMHKKNRALVCALDSLLSNYFDGSEDLGDTHSILYCAAIAACRVANVKLTENERATRPKPAVPAWQYRIERRIDGARALIGKLICFREGNTRPRVMRFVRRAFSGTDISPRDYMSRVTERIDFLKQKVYAWANRIRRYKRRVERYTQNRTFQSDQRRVYRTWERPVPGVSDMRLPDDDAMSSFWRSIWSVPVAHTEGDWMRDIERACETIPEMGEIVISPQDVATAARPLPNWKSPGPDGLHNFWIKWLRSSHACSASQFQSSLESGSLPQFLTTGVTHLLYKSGSTAEPKNYRPITCLPTVYKLLTSILRVKISNHIDNNYILSPSQNGCRSGSRGTKELLLIDMAISQQVRRSQKDLSTCWIDYKKAYDSVPHTWLMRVMELYKINTTLRTLLMSCMRQWRTVLRYPGCREILGRGEPIRIERGIFQGDSLSPLWFCLALNPLSTLLEGTRLGYRLRREGQVISHLLYMDDLKLFAPTDLQLMELLKVTENFSNSIRMEFGVDKCAVMHVKRGGIVESEGIQFSNSIQLRSLSPTETYKYLGMSEALGISEADMRQSLRERFFGRLNKVLKSVLSGGNKVRAFNGWVMPVLMYSFGILKWTQTDLDALDRRVRALLTVHRMHHPRSSVMRLYIPRKCGGRGFLNAKTLHNREVYSLREYFLQAEGEMHRDVVAVDRGLTPLALAKENWRKPVVLSTNDREEVWQSKELHGRFYRALHGPDVDFSASVSWLRFGDLFGETEGFVCAIMDEVMMTNNYRKYIVKDGTVDICRACHRPGESIRHIVSGCSRLANGEYLHRHNLVARIIHQQLALKYNLVESEVPYYRYVPDPVLENGHATLYWDRSIITDRTIVANKPDIVVIDRSERRTMIVDITVPHDENLVKAEKDKQLKYLDLAHEVVAMWDVDSAVIVPIVVTANGLIAKSLDQHLKRLSLDGWIKGLIQKAVLLDTARIVRRFLSLEP

SEQ ID NO: 27953 - protein, 1202 aa, Amphipyra tragopoginis
MMLTRSQARARNYYAHPPPPDSSPSSASQQQELDPAPPAAAVASSSSDEYFSPPSSPPPVRRRGGARPPACLGPRGQPAPNRVPAAGGNVSRMRWTQSINENVMRAYYGATEGGINLTAYRDRMLSLFRVLEPAINVSTQRLSDQVRVIQRNRRLDDTVLERLRSEVQNNRTVTTPLQAAEQPQLPAVSPRPIHVDEAGDGEVIVVSNQCSDELRSALEGAILEYRATPPELKPRLPRLPMHKKNRALVCALDSLLSNYFDGSEDLGDTHSILYCAAIAACRVANVKLTENERATRAKPAVPAWQYRIERRIDGARALIGKLICFREGNTRPRVMRFVRRAFSGTDISPRDYMSRVTERIDFLKQKVYAWANRIRRYKRRVERYTQNRTFQSDQRRVYRTWERPVPGVSDMRLPDDDAMSSFWRSIWSVPVAHTEGDWMRDIERACETIPEMGEIVISPQDVATAARPLPNWKSPGPDGLHNFWIKWLRSSHACLASQFQSSLESGSLPQFLTTGVTHLLYKSGSTAEPKNYRPITCLPTVYKLLTSILRVKISNHIDNNYILSPSQNGCRSGSRGTKELLLIDMAISQQVRRSQKDLSTCWIDYKKAYDSVPHTWLMRVMELYKINTTLRTLLMSCMRQWRTVLRYPGCREILGRGEPIRIERGIFQGDSLSPLWFCLALIPLSTLLEGTRLGYRLRREGQVISHLLYMDDLKLFAPTDLQLMELLKVTENFSNSIRMEFGVDKCAVMHVKRGGIVESEGIQFSNSIQLRSLSPTETYKYLGMSEALGISEADMRQSLRERFFGRLNKVLKSVLSGGNKVRAFNGWVMPVLMYSFGILKWTQTDLDALDRRVRALLTVHRMHHPRSSVMRLYIPRKCGGRGFLNAKTLHNREVYSLREYFLQAEGEMHRDVVAVDRGLTPLALAKENWRKPVVLSTNDREEVWQSKELHGRFYRALHGPDVDFSASVSWLRFGDLFGETEGFVCAIMDEVMMTNNYRKYIVKDGTVDICRACHRPGESIRHIVSGCSRLANGEYLHRHNLVARIIHQQLALKYNLVESEVPYYRYVPDPVLENGHATLYWDRSIITDRTIVANKPDIVVIDRSERRTMIVDITVPHDENLVKAEKDKQLKYLDLAHEVVAMWDVDSAVIVPIVVTANGLIAKSLDQHLKRLSLDGWIKGLIQRAVLLDTARIVRRFLSLEP

SEQ ID NO: 27954 - protein, 1214 aa, Amphipyra tragopoginis
MLTRSKARARNHHAHPPPPDSSPSSASQQQELDPAPPAAAVASSSSDEYFSPPSSPPPVRRRGVARPPASLGLRDRPAPNRVPAAGGNVSRMRWTQSINENVMRAYYGATEGGINLTAYRDRMLSLFQVLEPAINVSTQRLSDQVRVIQRNRRLDDAVLERLRSEEQNNRAVTPPVQAAEQPQLLAVAPRPIHVDGESDGAVINVSSQCSDELRSALEGAILEYRATPPELKPRLPRLPMHKKNRALVCALDSLLSNYFDGSEDLGDTHSILYCAAIAACRVAHVKLTQNERATRPKPAVPAWQCRIERRIDGARALIGKLICFREGNTRPRVMRFVRRAFSGTDISPRDYMSRVTERIDFLKQKVYAWANRIRRYKRRVERYTQNRTFQSDQRRVYRTWERPVPGVSDMRLPDDDAMSSFWRSIWSVPVAHTEGDWMRDIERACETIPEMGEIVISPQDVATAARPLPNWKSPGPDGLHNFWIKWLRSSHACLASQFQSSLESGSLPQFLTTGVTHLLYKSGSTAEPKNYRPITCLPTVYKLFTSILRVKISNHIDNNYILSPSQNGCRSGSRGTKELLLIDMAISQQVRRSRKDLSTCWIDYKKAYDSVPHTWLMRVMELYKINTTLRTLLMSCMRQWRTVLRYPGCREILGRGEPIRIERGIFQGDSLSPLWFCLALNPLSTLLEGTRLGYRLRREGQVISHLLYMDDLKLFAPTDLQLMELLKVTENFSNSIRMEFGVDKCAVMHVKRGGIVESEGIQLSNSIQLRSLSPTETYKYLGMSEALGISEADMRQSLRERFFGRLNKVLKSLLSGGNKVRAFNGWVMPVLMYSFGILKWTQTDLDALDRRVRALLTVHRMHHPRSSVMRLYIPRKCGATPTLSRNVRRLMYVGFLNAKTLHNREVYSLREYFLQAEGEMHRDVVAVDRGLTPLALAKENWRKPVVLSTNDREEVWQSKELHGRFYRALHGPDVDFLASVSWLRFGDLFGETEGFVCAIMDEVMMTNNYRKYIVKDGTVDICRACHRPGESIRHIISGCSRLANGEYLHRHNLVARIIHQQLALKYNLVESEVPYYRYVPDPVLENGHATLYWDRSIITDRTIVANKPDIVVIDRSERRTMIVDITVPHDENLVKAEKDKQLKYLDLAHEVVAMWDVDSAVIVPIVVTANGLIAKSLDQHLKRLSLDGWIKGLIQKAVLLDTARIVRRFLSLEP

SEQ ID NO: 27955 - protein, 1171 aa, Griposia aprilina
MLTRSAALRARPPTPDSSLSSASPPPVSSPIVSAVTTPAAVVASSSSDEYFSPPTTPPPARRRGGHRPPDGLGPRGPPASDRVPAPGGSVQRMRWTQSINENVMRSYYGATKGGNNLTAYRVRMLSLFQVLEPAVNVSAQRLSDQVRVIQRNHMLDDTVLDRLRNEMQSSHVIAPPSQTVVVLPQPITSHDEGSDDRATNVSTQCNEELRSVLEGAIREYRFMSPELRPRLPRLPMHNKNRALVAALDSQLSNYFDDCVDLTDTHSILYCAAVAACRVAHVKFANDSRATRPKPAVPAWQCRIERRVGGARALIGKLICFREGNTRPRVMRFVRRAVAGTDVSPQDYISCVTERIDFLKQKVYAWASRIRRYKRRVERYTQNRTFQRDERWVYRDWERPDQGVADTYLPDDDAMCSFWHNIWSVPVSHTEGDWTREVERACEPIPEMGAITICPQDVARAVRPLPNWKSPGPDGLHNFWIKWFLRSHARLAAQFQAALESGSLPQFLTTGVTYLLHKSGSIAGPENYRPITCSPTVYKVLTSILRAKINKHIDTNSIMSASQNGCRNGSRGTKELLLIDMAISQQVRRSRKDLSICWIDYKKAYDSVPHTWLMRVLELYKVDATLRTFLKSCMGQWRTVLRYPTCRYTQRNSEPIRIERGIFQGDSLSPLWFCLALNPLSTLLEDSGLGYRLRRGGRVISHLLYMDDLKLFAPNNLQLIELLKVTETFSSAIRMEFGLDKCAVMHVKRGEIVESVGTQLSDSMNLRALSASETYKYLGMSEALGVNNTDMKQSLKERFFGRLKKVFNSLLSGGNKVRAFNGWVMPVLMYSFGILKWTQTELDTLDRKVRTLLTANQMHHPRSSVMRLYIPRKCGGRGFLNAKTLHNREIRSLREYFLEADVGMHRDVVAVDKGLTPLSLAKENWRKPVVLLVLLLLLFIIITNDRMEVWQSKELHGRFFRALHGPDVDVQASVAWLRFGDLFGETEGFVCAIMDEVMMTNNYRRFIVKDGTVDICRACHRPGESIRHIISGCSRLANEEYLHRHNLVARIIHQQLALKYSFVESEVPYYRYVPDPVLENGTITLYWDRSIITDRTIIANKPDIVLVDRRERRAMIVDITIPHDGNLVKAEKDKQIKYLDLAREVVDMWDVDSAIIVPIVVTANGLIAKSLD

SEQ ID NO: 27956 - protein, 1030 aa, Sesamia nonagrioides
MRAYFGATEGGSNLTAYRGRMLSLFQVLEPAVNVSAQRLSDQVRVIQRNHMLDDVVLDRLRLESRNSHVTPASSLVAVQLNSVPSRPNLVDEEDDDEAIPVNPQCNEKLRSALEDAFREYRSTPPELRPHLPRLPMHKKNKALVCALDSQLSNYLKDSKDLNDTHSILYCGAVAICRVTHVKFPDSDRATRPKSAVPAWQCRIERRIGETRALIGKLISFREGNTRPRVMRFVRRAFSGTDTSTRDYLFRVTERIDFFKQKIYAWANRIRRYKRRVERYSQNRNFQSDERRVYRAWERSDQGVTDTCLPDDDATCSFWRNIWSVPVSHTEGSWTRVVERACDPVPEIGAITICPQDVAHAVRPLPNWKSPGPDGLHNFWIKWFTRSHARLASQFQTALESGSLPQFLTTGVTHLLHKSGSTAEPKNYRPITCLPTVYKVLTSILKSKINTHIDSNSIMSASQNGCRSGSRGTKELLLIDMAISQQVRRSRKDLSTCWIDYKKAYDSVPHTWLMRVLELYKVDATLRTFLMTCMRTWRTVLRYPGCRNIQRNSEPIRIERGIFQGDSLSPLWFCLALNPLSTLLEDSGLGYRLRRGGQVISHLFYMDDLKLFAHTDSQLKELLKITETFSSSIRMEFGVDKCAVMHVKRGEIMESVGTQLTSSINLRALSASETYKYLGMSEALGINVTDMKQSLKERFFGRLKKVLNSLLSGGNKVRAFNGWVMPVLMYSFGILKWTQTELDALDRRVRTLLTANRLHHPRSSILRLYIPRKCGGRGFLNAKTLHNREICSLREYFLTTDVGMHRDVVAVDKGLTPLSLAKENWRKPVVLDTNDRMEVWKSKELHGRFFKALHGPDVDLQASVAWLRFGDLFGETEGFVCAIMDEVMMTNNYRRFIVKDGTVDICRACHRPGESIRHIISGCSRLANGEYLHRHNLVARIIHQQLALKYNLVESEVPYYRYTPDPVLENDHITLYWDRSIITDRTIVANKPDIVLVDRSERRAMIVDITIPHDENLVKAEKDTQIKYLFT

SEQ ID NO: 27957 - protein, 909 aa, Hydraecia micacea
MLDDTVLDRLRNEIQSSHAIAPQSQTAVILLQSNTSHADEGSNDRATNVSTQCNEELRSALEDAIQEYRFMSPELRPRLPRLPMHNKNRALVAVLNSQLSKYVDDCEDLTDTHSILYCAAVAACRVAHVKFTNDSRATRPKPAVPAWQCRIERRIGGARALIGKLICFREGNTRPRVMRFVRRAFLGTDISPQDYTSCVTERIDFLKQKVYAWANRIRRYKRRVERYTQNRTFQSDERWVYKDWERPDQSVADTCLPDDDAMCSFWRSIWSVPVSHTEGDWARDVERACDPIPEMEAITTCPQDIARAVRPLYNWKSPGPDGLHNFWIKWFSRSHARLASQFQTALESGSLPQFLTTGITHLLHKSGSTAEPKNNRPITCLPTVYKVLTSILRAKINKHIDTNFIMSASQNGCRNGSRGTKELLLIDMTISQQVRRFRKDLSTCWIDYKKAYDSVPHTWLMRVLELYKVDTTLRTFLMSCMGQWRTVLRYPGCQNIQRNSEPIRIERGIFQGDSLSPLWFCLALNPLSTLLEDSGLGYRLRRGGQVTSHLLYMDDLKLFAPNNLQLMGLLKVTQTFSNAIRMEFGVDKCAVMHVKRGEIVEFVGNQLSDSTNLRVLSASETYKYLCMSEALGINVTDMKQSLKERFFGRLKKVLNSLLSGGNKVRAFNGWVMPVLMYSFGILKWTQTELDALDRRVRTLLTANRMHHPRSSVMRLYIPRKCGGRGFLNSKTLHNREICSLREYFLETDVGMHRDVVMVDKGLTPLSLAKENWRKPGVLDTNDRMEAWQSKELHRRFFRALHGPDVDLLASVAWLRFGDLFGETEGFVFAIMDEVMMTNNYRRFIVKDGTVDICRACHRPGESIRHIISGCSRLANGEYLYRHNLVARIIHQQLALKYSLVESEVPYYSP

SEQ ID NO: 27958 - protein, 1106 aa, Noctua janthe
MRWTQSINANVMRAYYGATEGGNNLTAYRVRMLSLFQVLEPAVNVSAQRLSDQVRVIQRNGMLDDTVLDRLRTEMQSSHVIATPPQTVVPPQSTIIPNHDNNVSNDMVTNVSTQCNEEMRCALEGAIREYRFMQPDLRPRVPRLPMHNKNRVLVAVLDSQLSNYFDNCEDLTDAHSVLYCAAVAACRVAHVKFSDDRVTRPKPAVPSWQYRIERRIGEARALIGKLICFREGNTRPRVMRFVRRAFSGTDISARDYMSRVTERIDFLKQNVYAWANRIRRYKRRVDRYTQNRTFQRDKRWVYRAWERPDQGVADTRLPDDDVMCSFWRSIWSVPVSHTEGEWTREVERACDLVPEMGAITTSPQDVVRAVRPLPNWKSPGPDGLHNFWIKWFTRSHARLAILFQSALESGSLPEFLTTGITHLLHKSGSTAEPKNYRPITCLPTVYTVLTSILRAKINKHIDDNSVMSASQNGCRNGSRGTKELLLIDMAISQQVRRSRRDLSTCWIDYKKAYDSVPHTWLMRVLELYKVDSTLRIFLMSCMGQWRTVLRYPGCRQIQRNSEPIRIERGIFQGDSLSPLWFCLALNPLSTLLEDSGLGYRLRRGGQVISHLLYVDDLKLFAPNDLQLMGLLKVTETFSSAIRMEFGVDKCAVLHVKRGEIVESVGTQLSDSINLRSLSATETYKYLGMSEALDINVADMKQSLKKRFFGRLKKVFNSLLSGGNKVRAFNGWVMPVLMYSFGILKWTQTELDALDRRVRTLLTAYRMHHPRSSVMRLYIPRRCGGRGFLNAKTLHNREICSLREYFLETDVGMHRDVVAVDKGLTPLYLAKENWRKPVVLDTNDRMEVWQSKELHGRFFRALHGPDVDLSASVAWLRSGDLFGETEGFVCAIMDEIMMTNNYRRFIVKDGTVDICRACHRPGESIRHIISGCSRLANGEYLHRHNLVARIIHQQLALKYNLVESEVPYYKYVPDPVLENGSITLYWDRSIVTDRTIVANKPDIVVVDRSERRAMIVDITVPHDGNLVKAEKDKQIKYLDLAHEVVDMWDVDSAIIVPIVVSAHGLIAKSLDQYLRRLSLGSWIKGLIQKAVLLDTARIVRRFLSLEP

SEQ ID NO: 27959 - protein, 1128 aa, Sesamia nonagrioides
MLTRSAARRARPPSPDSLPSSASPPPASSTTVSAVTTPAATVASSSSDEYFSPPTTPPPVRRRGGRRPPDCLGLRGPSASDRVPAPGGSVQRMRWTQSINENVMRSYYGATEGGNNLTAYRVRMLSLFQVLEPAVNVSAQRLSDQVRVIQRNHMLDDTVLDRLRNEMQSSRVITHQSKSAEIPPQPTNYADEGSNDRATNVSTQCNEELRNALEAAIREYRFMSAELRPRLPRLPMHNRNRALMAALDAQLSNYFDTCENLTDTHSILYCAAIAACRVAHVKFSSDSRATRPKPVVPAWQHRIERRIGGARALIGKLICFREGNTRPRVMRFVRRVFSGTNTSPQNYMARITERIDFLKQKVYAWANRIRRYKRRVERYTQNRTFQSNQRWVYRDWERPEQGVADTCLPDDDAMCSFWRSIWSVPVSHTEGDWARDVERACDPIPEMGAITICPQDVARAVRPLPNWKSPGPDGLHNFWIKWFPRSHASLASQFQTALVSGSLPQFLTTGITHLLHKSGSTAEPKNYRPITCLPTVYKVLTSILKAKINNHIDSNSIMSVFQNGCRSGSRGTKELLLIDMAISQQVRRSQKDLSTCWIDYKKAYDSVPHTWLMRVLELYKVDATLRTFLMSCMKTWRTVLRYPGCRNIQRNSEPIRIERGIFQGDSLSPLWFCLALNPLSTLLEDSGLGYRLRRGGQVISHLLYMDDLKLFAPNNSQLRELLKITETFSSAIRMEFSVDKCAVMLIKRGEIVESVGTQLTSSINLRALSASETYKYLGISEALGINVTDMKQSLKERFFGRLKKVLNSLLSGGNKVRAFNGWVMPVLMYSFGILKWTQTELDALDQRVRTLLTANRLHHPRSSVMRLYIPRKCGGRGFLNAKTLHNREVCSLRDYFLVTDVGMHRDVVAVDKGLTPLSLAKENWRKPVVLDTNDRMEVWKSKELHGRFFRALHGPDVDFQAFVAWLRFGDLFGETEGFVFAIMDEVMMTNNYRRFIVKDGTVDICRACHRPGESIRHIISGCSRLANGEYLHRHNLVARIIHQQLALKYNLVESEVPYYWYMADPVLENGHITLYWDRSIITDRTIVANKPDIVMVDRSERRAMIVDITIPHDENLVKAEKDKQNQVS

SEQ ID NO: 27960 - protein, 1092 aa, Sesamia nonagrioides
MLTRSAARRARPPSPDSLPSSASPPPASSTTVSAVTTPAAAVASSSSDEYFSPPTTPPPVRRRGGRRPPDCLGPRGPSASDRVPAPGGSVQRMRWTQSINENVMRSYYGATEGGNNLTAYHVRMLSLFQVLEPAVNVSAQRLSDQVRVIQRNHMLDDTVLDRLRNEMQSSRVITHQSQSAEIPPQPTNYADEGSNDRATNVSTQCNEELRSALEAAIREYRFISAELRPRLPRLPMHNRNRALMAALDAQLSNYFDTCENLTDTHSILYCAAVAACRVAHVKFSSDSRATRPKPVVPAWQHRIERRIGGARALIGKLICFREGNTRPRVMRFVRRAFSGTNTSPQNYMARITERIDFLKQKVYAWANRIRRYKRRVERYTQNRTFQSNQRWVYRDWERPEQGVTDTCLPDDDAMCSFWRSIWSVPVSHTEGDWARDVERACDPIPEMGAITICPQDVARAVRPLPNWKSPGPDGLHNFWIKWFPRSHASLASQFQTALVSGSLPQFLTTGITHLLHKSGSTAEPKNYRPITCLPTVYKVLTSILKAKINNHIDSNSIMSVSQNGCRSGSRGTKELLLIDMAISQQVRRSRKDLSTCWIDYKKAYDSVPHTWLMRVLELYKVDTTLRTFLMTCMGQWRTVLRYPGCRNIQRNSEPIRIERGIFQGDSLSPLWFCLALNPLSTLLEDSGLGYPLWRGGQVISHLLYMDDLKLFAPNNLQLKELLKITETFSSAIRMEFGVDKCAVMHIKQGEIVESVGSQLTSSINLRALSASETYKYLGMSEALGINVTDMKQSLKERFFGRLKKVLNRLLSGGNKVRAFNGWVMPVLMYSFGILKWTQTELDALDRRVRTLLTANRLHHPQSSVMRLYIPRKCGGRGFLNAKTLHNREICSLREYFLETDVGMHRDVVAVDKGLTPLSLAKENWRKPVVLDTNDRMEVWKSKELHGRFFRALHGPDVDLQASVAWLRFGDLFGETEGFVCAIMDEVMMTNNYQRFIVKDGTLDICRACHRPGESIRHIISGCSRLANGEYLHRHNLVARIIHQQLALKYNLVESEVPYYRYMPDPVLENKRKKKEKKNRLFALNMTQAFTKT

SEQ ID NO: 27961 - protein, 1105 aa, Sesamia nonagrioides
MRWTQSINENVMRSYYGATEGGNNLTAYRVRMLSLFQVLEPAVNVSAQRLSDQVRVIQRNHMLDDTVLDRLRNEMQSSRVIAHQSQTAEIPPQPTNYADERSNDRATNVSTQCNEELINALEAAIREYRFTPAELRPRLPRLPIHNRNRALMAALDAQLSDYFDTCEDLTDTHSILYCAAVAACRVAHVKFPSDSRATRPKPVVPAWQHRIERRIGGARALIGKLICFREGNTRPRAMRFVRRAFAGTNISPQNYMARVTERIDFLKQKVYAWANRIRRYKRRVERYTQNRTFQSNERRVYRDWERPEQGVTDTCLPDDDAMCSFWRSIWSVPVSHTEGDWARDVERACDPIPEMGAITICPQDVACAVRPLPNWKSPGPDGLHNFWIKWFPRSHARLASQLQTALVSGSLPQFLTTGITHLLHKSGSTAEPKNYRPTTCLPTVYKVLTSILKTKINKHIDSNSIMSASQNGSKSGSRGTKELLLIDMAISQQVRRSRKDLSTCWIDYRKAYDSVPHTWLMRVLELYKVEATLRTFLMSCMRTWRTVLPYPGCRNIQRNSEPIRIERGIFQGDSLSPLWFCLALNPLSTLLEDSGLGYRLRRGGQVISHLLYMDDLKLFAPNNSQLRELLKITETFSSSIRMEFGMDKCAVMHIKRGEIMESLGTQLTDSINLRALSASETYKYLGMLEALGINVTDMKQSLKERFFGRLKKVLNSLLSGGNKVRAFNGWVMPVLMYSFGILKWTQTELDALDQRVRMLLTANRLHHPRSSVMRLYIPRKCGGRGFLNAKTLHNREVCSLRDYFLVTDVGMHRDVVAADKGLTPLSLAKENWRKPVVLDTNDRLEVWKSKELHGRFFRALHGPDVDFQASVAWLRFGDLFGETEGFVFAIMDDVMMTNNYRRFIVKDGTVDICRACHRPGESIRHIISGCSRLANGEYLHRHNLVARIIHQQLALKYKLVESEVPYYRYMPDPVIENGHITLYWDRSIITDRTIVANKPDIVLVDRSERRAMIVGITIPHDENLVKAEKDKQIKYLDLAHEVVDMWEVDSAIIVPIVVTANGLIAKSLDQHLRRLSLGSWIKGLIQKAVLLDTARIVRKLLSLEP

SEQ ID NO: 27962 - protein, 1197 aa, Sesamia nonagrioides
MLTRSAARRARPPSPDSLLGSASSPPVSSATASAVTAPAAAVASSSSDEYFSPPTTPPPARRRGGRRPPDRLGPRGPSASDRVPAPGGSVQRMRWTQSINESVMRSYYGATEGGNNLTAYRVRMLSLFQVLEPAVNVSAQRLSDQVRVIQRNHMLDDTVLDRLRNEMQSSRIIAHQSQTAEIPPQPTNYADEGSNDRATNVSTQCNEELINALEAAIREYRFTPAELRPRLPRLPMHNRNRALMAALDAQLSDYFDTCEDLTDTHSILYCAAVAACRVAHVKFPSDSRATRPKPVVPAWQHRIERRIGGARALIGKLICFREGNTRPRVMRFVRRAFAGTNISPQNYMARVTERIDFLKQKVYAWANRIRRYKRRVERYTQNRTFQSNERWVYRDWERPEQGVTDTCLPDDDAMCSFWRSIWSVPVSHTEGDWARDVERACDPIPEMGAITICPQDVAFAVRPLPNWKSPGPDGLHNFWIKWFPRSHARLASQFQTALVSGSLPQFLTTGITHLLHKSGSTAEPKNYRPITCLPTVYKVLTSILKTKINKHIDSNSIMSASQNGCKSGSRGTKELLLIDMAISQQVRRSRKDLSTCWIDYRKAYDSVPHTWLMRVLELYKVDATLRTFLMSCMRTWRTVLRYPRCRNIQRNSEPIRIERGIFQGDSLSPLWFCLALNPLSTLLEDSGLGYRLRRGGQVISHLLYMDDLKLFAPNNSQLRELLKITETFSSSIRMEFGVDKCAVMHVKRGEIMESVGTQLTDSINLRALSASETYKYLGMSEALGINVTDMKQSLKERFFGRLKKVLNSLLSGGNKVRAFNGWVMPVLMYSFGILKWTQTEVDALDQRVRTLLTANRLHHPRSSVMKLYIPRKCGGRGFLNAKTLHNREVCSLRDYFLVADVGMHRDVVAADKGLTPLSLAKENWRKPVVLDTNDRMEVWKSKELHGRFFRALHGPDVDFQASVAWLRFGDLFGETEGFVFAIMDEVMMTNNYRRFIVKDGTVDICRACHRPGESIRHIISGCSRLANGEYLHRHNLVARIIHQQLALKYNLVESEVPYYRYTPDPVLENGYITLYWDRSIITDRTIVANKPDIVMVDRSERRAMIVDITIPHDENLVRAEKDKQIKYLDLAHEVVDMWEVDSAIIVPIVVTANGLIAKSLDQHLRRLSLGSWIKGLIQKAVLLDTAGIVRKFLSLEP

SEQ ID NO: 27963 - protein, 1110 aa, Amphipyra tragopoginis
MRWTQSINENVMRAYYGATEGGINLTAYRDRMLLLFQVLEPAINVSTQRLSDQVRVIQRNRRLDDTVLERLRSEVQNNHAVTPPVQAAVQAHLPAVPPRPSHGDGEGDGEVIEVSNQCSDELRSALEGAILEYRATPPELRPRLPRLPMHKKNRALVCALDSLLSNYFDGSEDLADTHSILYCAAIAACRVAHVKFTDSERATRPKPAVPAWQCRIERRIGGARALIGKLICFREGNSRPRVMRFVRRAFSGTDISPRDYMSRITERIDFLKQKIYAWANRIRRYKRRVERYTLNCTFQSDQRRVYRTWERPDPSGSDVRLPDDDAMSSFWRSIWSVPVAHTEGDWMRDIERACEPIPEMGDIIISPQDVAGAALPLPNWKSPGPDGLHNFWLKWLRSSHACLASQFQSSLESGSLPQFLTTGATHLLYKSGSTAEPKNYRPITCLPTVYKLLTSILRVKISNHIDNNSIMSASQNGCRNGSRGTKELLLIDMTISQQVRRSRKDLSTCWIDYKKAYDSVPHTWLMRVLELYKINTTLRTFLMSCMRQWRTVLRYPGCREIRGRGEPVRIERGIFQGDSLSPLWFCLAFNPLSTLLEGTRLGYRLRREGQVISHLLYMDDLKLFAPTDLRLMELLKVTENFSSSIRMEFGVDKCAVMHVKRGGIVESEGTQLSNSIQLRSLSPTETYKYLGMSEALGISEVDMRQSLRERFFGRLNKVLRSLLSGGNKVRAFNGWVMPVLMYSFGILKWTQTDLDALDRRVRALLTTHRMHHPRSSVMRLYIPRKCGGRGFLNAKTLHNREVCSLREYFLQAEGAMHRDVVAVDKGLTPLALAKENWRKPAVLSTNDREEVWQSKELHGRFYRALHGPDVDFPASVSWLRFGDLFGETEGFVCAIMDEVMMTNNYRRYIVKDGTVDICRACHRPGESIRHIVSGCSRLANGEYLHRHNLVARIIHQQLALKYNLVESEVPYYRYVPDPVVENGHVTLYWDRSIITDRTIVANKPDIVVIDRSERRTMIVDITVPHDENLVKAEKDKQIKYLDLAHEVVGMWDVDSAVVVPIVVTANGLIAKSLDQHLKRLSLGGWIKGMIQKAVLLDTARIVRRFLSLEP

SEQ ID NO: 27964 - protein, 975 aa, Furcula furcula
MPLNLRPRLPRLPMHKRNRALVCALDSLLSSYFDSSEDHADAHSLLYCAAMTACRVAHVKFPSTDAATRPRPAVPAWQFRIECRIGEARVLIGKLNCFREDNTRPRVMRFVRRAFSGTGIDPREYLSRVTERIDFLKQKVCAWANRIRRYKARVDRYSQNNMFQRDQRWVYRSWERSSQIEGDGRRPDDNAMTTFWRNIWTVPITHSEGDWMRDVEQICEPLPEMGAITIRPQDVADAVRPMPNWKAPGPDGLHNFWLKWIRSSHICLASLFQSALESGSLPEFMTMGITHLLHKTSSTTDPKNYRPITCLPTVYKTLTSILRAKIYRHVEHNSIMSASQNGCRSGARGTKELLLIDMAICQQARRNRKDLSTCWIDYKKAYDSVPQTWLMRVLELYKVNPTLRTFLASCMRQWRTILLYPGSQRILGNGDPIRIERGIFQGDSLSPLWFCLALNPLSTLLRGSGLGCRLRRGGQVISHLLYMDDLKLFAPTELQLMGLLRVTKTFSDSISMEFGVDKCAVMHVKRGRMVESRSVQLLDSTNLRTLSATETYKYLGMSQALGINETDMKQSLRERFLGRLRKVLKSLLSGGNRVRVYNGWVMPVLMYSFGILKWTQTELDTLDRTVRTLLTTYRMHHPRSSVMRLYIPRKCGGRGFLNVKTLHNREICNLREYFLHCGGVMHTDVVAVDNGLTPLSLAKGNWRKPVVLTTGDREAVWQSKELHGRFYRALHGPDVDFSASVAWLRFRDLFGETEGFVCAIMDEVVMMNNYRKYILRDDTIDICRACYRPGESLRHIISGCSRLANGEYLHKHNQVARIIHQQLALKYRLVTSEVPFYRYVPEPVVEDGHITLYWDRSIITDRTIVANKPDIVLIDRTERRAMIVDVTVPHDENLVKAEKDKECKYLDLAHEVVDMWDVDRAIIVPIVVSAHGLMAKSLDKHLKRLTLGGWIKGQMQKSVLLETARIVRKFLSLEP

SEQ ID NO: 27965 - protein, 1201 aa, Hydraecia micacea
MLTRSAAARRARIPPPDSSLSSASPPAPLVSSPTVSAVMTPAAAVASSSSDEYFSPPTTPPPARRRGGRRPPDGLGPRGPPASDRVPAPDGSVQRMRWTRSINENVMRSYYGATEGGSNLTAYRVRMLSLFQVLEPAVNVSAQRLSDQVRVIQRNHMLDDTVLDRLRNEIQSSHAIAPQSQTAVILPQSNTSHADEGSNDRATNVSTQCNEELRSALEDAIQEYRSMSPELRPRLPRLPMHNKNRALVAVLNSQLSKYFDDCEDLTDTHSILYCAAVAACRVAHVKFTNDSRATRPKPAVPAWQCRIERRIGGARALIGKLICFREGNTRPRVMRFVRRAFLGTDISPQAYTSCVTERIDFLKQKVYAWANRIRRYKRRVERYAQNRTFQSDERWVYRDWERPDQSVADTCLPDDDAMCSFWRSIWSVPVSHTEGDWARDVERACDPIPEMEAITICPQDVARAVRPLPNWKSPGPDGLHNFWIKWFSRSHARLASQFQTALESGSLPQFLTTGITHLLHKSGSTAEPKNYRPITCLPTVYKVLTSILRAKINKHIDTNFIMSASQNGCRNGSCGTKELLLIDMTISQQVRRFRKDLSTCWIDYKKAYDSVPHTWLMRVLELYKVDTTLRTFLMSCMGQWRTVLRYPGCRNIQRNSEPIRIERGIFQGDSLSPLWFCLALNPLSTLLEDSGLGYRLRRGGQVISHLLYMDDLKLFAPNNLQLMELLKVTQTFSNAIRMEFGVDKCAVMHVKRGEIVESVGNQLSDSTNLRALSASETYKYLGMSEALGINVTDMKQSLKERFFGRLKKVLNSLLSGGNKVRAFNGWVMPVLMYSFGILKWTQTELDALDRRVRTLLTANRMHHPRSSVMRLYIPRKCGGRGFLNSKTLHNREICSLREYFLETDVGMHRDVVMVDKGLTPLSLAKENWRKPVVLDTNDRMEVWQSKELHGRFFRALHGPDVDLLASVAWLRFGDLFGETEGFVCAIMDEVMMTNNYRRFIVKDGTVDICRACHRPGESIRHIISGCSRLANGEYLHRHNLVARIIHQQLALKYSLVESEVPYYRYVPDPVIENGNITLYWDRSIITDMTIIANKPDIVVVDRSERRAMIVDITVPHDENLVKAEKDKQIKYLDLAREVVDMWDVDSAIIVPIVVTANGLIAKSLDQHLRRLSLGSWIKGLIQKAVLLDTARIVRRFLSLEP

SEQ ID NO: 27966 - protein, 1091 aa, Mythimna ferrago
MLIFEEIFKNMINMYIIINEWNNNKAQRLSAQRLSDQVRVIQRNRMLDDAVLDRLRLESRNGRVSPISPPAAVQRQPSVSPRPDHVGEDDDDEAISVSTQCNARLRSALEDAFREYRSIPPELRPRLPRLPMHRKNRALVCALDSQLSNCFDSSEDLSDTHSILYCAAAAACRVAHVKIPNNDRATRPAKPAWQCRIERRIGEARALIGKLICFREGNTRPRVMRFVRRAFSGTDISPRDYLPRITERIDFLKQKVYAWANRIRRYKRRVERYTQNHTFQSNERWVYRAWERPDQSVIDTRLPDDDAMYSFWRSIWSVPVNHTEGDWTREIERECELIPEMGAINISPQDVARAVRPLPNWKSPGPDGLHNFWLKWFQSSHARLASQFQSTLESGSLPQFLTTGITHLLHKSGSTAEPKNYRPITCLPTVYKVLTSILRAKINNHIETNSIMSASQNGCRNGSRGTKELLLIDVAISQQVRRSRRDLSTCWIDYKKAYDSVPHTWLMRVLELYKVDATLRAFLMSCMGQWRTVLHYPGCRRVSENSEPLRIERGIFQGDSLSPLWFCLALNPLSTLLEGSGLGYRLRREGQVISHLLYMDDLKLFASNNLQLMELLKVTETFSSAIRMEFGLDKCAVMHVKRGEIRESVGTQLSDSIHLRSLCSTETYKYLGMSEALGINAADVKQSLRERFFGRLNKVLNSLLSGGNKVRAFNGWVMPVLMYSFGILKWTQTELDALDRRVRTLLTANRMHHPRSSVMRLYIPRKCGGRGFLNAKTLHNREVCSLREYFLETDVGMHRNVVAVDKGLTPLSLASENWRKPIVMDTNERKEVWKGKELHGRFYRALHGPDVDLLASVSWLRFGNLFGETEGFVFAIMDEVMMTNNYRKYIVKDGTVDICRACHRPGESIRHIISGCSHLANGDYLHRHNLVARIIHQQLALKYNLVESEVPYYKYVPDPVIENGSVTLYWDRSIITDRTIVANKPDIVVIDRLERCTMIVDIAVPHDENLVKAEKDKQTKYLDLAREVVDMWEVDRAIIVPIVVTANGLIAKSLDQHLRRLSLGSWIKGLIQKAVLLDTARIVRRFLSQEP

SEQ ID NO: 27967 - protein, 992 aa, Sesamia nonagrioides
MKTSCAHTMGLQREGTTWLRTVFECSLCFRCLSQLSTCRRNDCRIRCGSSSVTTCWMMLCLIAYVSSHGIVMLRLLRHWSRYNLTVFHRDPTVDEEDDDRAISVSPQCNEQLRSALEDAFREYRSTPPELRPRLPRLPMHKKNKALVCALDSQLSNYLKDSKDLTDTHSILYCGAVAICRVAHVKFPNSDRATRLKPAVPAWQRRIERRIGETRALIGKLISFREGNTRPRVMRFVRRAFSGTDISTRDYLLRVTERIDFFKQKIYAWANRIRRYRRRVERYSQNRNFQSDERRVYRAWERSDQGVTDTCLPDDDATCSFWRNIWSVPVSHTEGGWTRDVERACDSVPEMGAITICPQDVARAVRPLPNWKSPGPDGVHNFWIKWFFGSHACLASQFQTALESGSLPQFLTTGITHLLHKSGSTAEPKNYRPITCLPTVYKVLTSILKAKINTHIDSNSIMSASQNGCRNGSRGTKELLLIDMAISQQVRRSRKDLSTCWIDYKKAYDSVPHTWLMRVLELYKVDATLRTFLMTCMSQWRTVLRYPGCRNIQMNSEPIRIERGIFQASPLWFCLTLNPLSTLLEDSGLGDRLRRGGQVISHLLYMDDLKLFAHTNSQLKELLKITETFSSAIRMEFGVDKCAVMHVQRGKIVESVGTQLTGSINLRSLSASETYKYLGMSEALGINITDMKQSLKERFFGRLKKVLNSLLSGGNKVRAFNGWVMPVLMYSFGILKWTQTELDALDQRVRMLLTANRLHHPRSSVMRLYIPRKCGGRGFLNAKTLHNREICSLREYFLKTDVGMQRDVVAVDKGLTPLSLAKDNWRKPVVLETNDRMEVWQSKELHGRFFRALRGPNVDFQASVAWLRCGDLFGETEGFVCAIMDEVMMTNNYRRFIVKDGTVDICRACHRPGESIRHIISGCSRLANGEYLHRHNLVARIIHQQLALKYNLVKSEVPYYRYMLDPVLENGHITFTGIDPSSLTGLLLPISLT

SEQ ID NO: 27968 - protein, 1200 aa, Eilema depressum
MLTRSRTRNNANAPTTSPDSSLSSAAQPLATEPAASSSSSSDEFFSPPTSPPPVRRPGRGRPPASLEPRRPPASNRAPAAGGEVRRMRWTNSINENVMRAFYAATEGGTNLTAYRARMLPLFQVLEPTVNVSAQRLSDQVRAIQRCRLLDDSVLERLRSDSRSSPGASTSSQPLTQHEHFNSQVNEESVSHVSEEVVDAGVTHVSTVCIDIIRSALECAMREYRSMPFDCRPRLPRLPTHKKNIALVCALDSLLSDYFDNSEDLSDTHSILYCAAVAACRVANVKFHSTILTTRPKSAVPAWQSRIERRITETRALIGKLICFRSGNTRPRVMRFVTRAFSGTDIRPREFLSRVTERIDFLKQKIYAWANRIRRYKRRVDRYSQNRTFQRDERWVYRSWERPDSNGTDMRRPDDDATNTFWRSIWSTPVSHTEGDWMRIVERSCESIETMEPVTISDEDVTNAVRLLPNWRSAGPDGLHNFWLKWFRSSHGRLAMQFQSCLESGSLPAFITTGVTHLLHKSGSTTDPKNYRPITCLPTVYKLLTSILREKISSHLIDNSIMSISQNGCRSGARGTKELLIIDMAICQQARRHRKDLATCWIDYKKAYDSVPHTWLLRVLELYKIDATLCAFMKTCMGQWRTVLCYPGCRQICEDNGLIKIERGIFQGDSLSPLWFCLALNPLSTILESSGLGCRLRRDGQVISHLLYMDDLKLFAPNNLHLIELLKLTETFSSSIRMDFGVDKCAVMHVKRGRIVESESVELSDSTKLRALSAADTYKYLGMSQALGISEAGMKQSLQERFFGRLRKVLKSLLSGGNKVRACNGWVMPVLMYSFGILRWTQTELDALDRKVRAHLTAYRMHHPRSSVMRLYIPRKCGGRGFLNAKTLHNREVCNLRDYFLHNDADMHRDVVMVDNGLTPLGLAKENWRKPAVLSINDRRDVWKGKELHGRFYRALHGPEIDIPASLSWLRFGDLFGETEGFVFAIMDEVVMTNNYRRYIIKDGTVDICRACHRPGESLRHIISGCSRLANGEYLHRHNQVARIIHQQLALKYNLVESEVPYYRYVPDPVLENGHITLYWDRSIITDRTIVANKPDIVIIDRLERRAIIVDITIPHDENLVKAEKEKQIKYLDLAHEIVDMWDVDSAIIVPIVVSVHGLIAKSLDQHLKRLSLDGWLKGLMQKAVLLGTARIVRKFLSLEP

SEQ ID NO: 27969 - protein, 903 aa, Sesamia nonagrioides
MSTELRPRLPRLPMHNRNRALMAALDAQLSNYFDTCENLTDTHSILYCAAVAACRVAHVKFSSDSRATRPKPVVPAWQHRIERRIGGARALIGKLICFREGNTRPRVMRFVRRAFSGTNTSPRNYMARITERIDFLKQKVYAWANRIRRYKRRVERYTQNRTFQSNLRWVYRDWERPEQGVADTCLPDDDAMCSFWRSIWSVPVSHTEGDWARDVERACDPIPEMGAITICPQDVARAVRPLPNWKSPGPDGLHNFWIKWFPRSHASLASQFQTALVSGSLPQFLTTGITHLLHKSGSTAEPKNYRPITCLPTVYKVLISILKAKINNHIDSNSIMSVSQNGCRSGSRGTKELLLIDMAISQQVRRSRKDLSTCWIDYKKAYDSVPHTWLMRVLELYKVDTTLRTFLMTCMGQCRTVLRYPGCRNIQRNSEPIRIERGIFQGDSLSPLWFCLALNPLSTLLEDSGLGYRLKRGGQVISHLLYMDDLKLFAPNNLQLKELLKITETFSSAIRMEFGVDKCAVMHIKRGEIMESVGSQLTSSINLRALSASETYKYLGMSEALGINVTDMKQSLKERFFGRLKKVLNSLLSGGNKVRAFNGWVMPVLMYSFGILKWTQTELDALDQRVRTLLTANRLHHPRSSVMRLYIPRKCGGRGFLKAKTLHNREICSLREYFLETDVGMHRDVVAVDKGLTPLSLAKENWRKPVVLDTNDRMEVWKSKELHGRFFRALHGPDVDLQASVAWLRFRDLFGETEGFVCAIMDEVMMTNNYRRFIVKDGTVDICRACHRPGESIRHIISGCSRLANGEYLHRHNLVARIIHQQLALKYNLVESEVPYYRYMPDPVLENGHITLYWDRSIITDRTIVANKPDIVLVDRSERRAMIVDITIPHDENLVKAEKDKQI

SEQ ID NO: 27970 - protein, 1197 aa, Sesamia nonagrioides
MLTRSAARRARPPSPDSLLSSALPPPVSSATVSAVTTPAAAVASSSSDEYFSPPTTPPPVRRRGGRRPPDCLGPRGPPASDRVPAPGGSVQRMRWTQSINENVMRSYYGATEGGTNLTAYRVRMLSLFQVLEPAVNVSAQRLSDQVRVIQRNHMLDDTVLDRLRNEMQSSRIIAHQSQSAEIPPQPTIYADEGSNDRATNVSTQCNEELRNALEAAIREYRSISAELRPRLPRLPMHNRNRALMGALDAQLSNYFDTCEDLTDTHSILYCAAVAACRVAHVKFPSDSRATRPKPVIPAWQHRIERRIGGARALIGKLICFREGNTRPRVMRFVRRAFSGTNTSPQNYMARVTERIDFLKQKVYAWANRIRRYKRRVERYTQNRTFQSNERRVYRDWERPEQGVTDTCLPDDDAMCSFWRSIWSVPVSHTEGDWAQDVERACDPIPEMGAITICPQDVAHAVRPLPNWKSPGPDGLHNFWIKWFPRSHARLASQFQTALVSGSLPQFLTTGITHLLHKSGSTAEPKNYRPITCLPTVYKVLTSILKTKINKHIDSNSILSASQNGCRSGSRGTKELLLIDTAISQQVRRSRKDLSTCWIDYKKAYDSVPHTWLMRVLELYKVDATLRTFLMTCMRTWRTVLRYPGCRNIQRNSEPIRIERGIFQGDSLSPLWFCLALNPLSTLLEDSGLGYRLRRGGQVISHLLYMDDLKLFAPNNSQLNELLKITEIFSSSIRMEFGVDKCAVMHVKRGEIMEPVGTQLTSSINLRALSASETYKYLGMSEALGINVTDMKQSLKERFFGRLKKVLNSLLSGGNKVRAFNGWVMPVLMYSFGILKWTQTELDALDQRVRTLLTANRLHHPRSSVMRLYIPRKCGGRGFLNAKTLHNREICSLRDYFLETDVGMHRDVVAADKGLTPLSLAKENWRKPVVLDTNDRMEVWKSKELHGRFFRALHGPDVDFQASVAWLRFGDLFGETEGFVFAIMDEVMMTNNYRRFIVKDGTVDICWACHRPGESIRHIISGCSRLANGEYFHRHNLVARIIHQQLALKYKLVESEVPYYRYMPDPVLENGHITLYWDRSIITDRTIVANKPDIVLVDRSERRAMIVGITIPHDENLVKAEKDKQIKYLDLAHEVVDMWEVDSAIIVPIVVTANGLIAKSLDQHLRRLSLGSWIKGLIQKAVLLDTARIVRKFLSLEP

SEQ ID NO: 27971 - protein, 900 aa, Sesamia nonagrioides
MRFVRRAFSRTNTSPQNYMARVTERIDFLKQKVYAWANRIRRYKRRVERYTQNRTFQSNERRVYRDWERSEQGVTDTCLPDDDAMCSFWRSIWSVPVSHTEGDWARDVERACDPIPEMGAITICPLDVAHAVRPLPNWKSPGPDGLHNFWIKWFPRSHARLASQFQTALVSGSLPQFLTTGITHLLHKSGSTAEPKNYRPITCLPTVYKVLTSILKTKINKHIDSNSILSASQNGCRSGSRGTKELLLIDMAISQQVRRSRKDLSTCWIDYKKAYDSVPHTWLMRVLELYKVDATLRTFLMTCMRTWRTVLRYPGCRNIQRNSEPIRIERGIFQGDSLSPLWFCLALNPLSTLLEDSGLGYRLRRGGQVISHLLYMDDLKLFAPNNSQLNELLKITEIFSSSIRMEFGVDKCAVMHVKRGEIMEPVGTQLTSSINLRALSASETYKYLGMSEALGINVTDMKQSLKERFFGRLKKVLNSLLSGGNKVRAFNGWVMPVLMYSFGILKWTQTELDALDQRVRTLLTANRLHHPRSSVMRLYIPRKCGGRGFLNAKTLHNREICSLRDYFLETDVGMHRDVVAADKGLTPLSLANENWRKPVVLDTNDRMEVWKSKELHGRFFRALHGPDVDFQASVAWLRFGDLFEETEGFVFAIMDEVMMTNNYRRFIVKDGTVDICRACHRPGESIRHIISGCSRLANGEYLHRHNLVARIIHQQLALKYKLVESEVPYYRYMPDPVLENGHITLYWDRSIITDRTIIANKPDIVLVDRSERRAMIVDITIPHDENLVKAEKDKQTKYLDLAHEVVDMWEVDSAIIVPIVVTANGLIAKSLDQHLRRLSLGSWIKGLIQKAVLLGHGSHRQEVPLSGALTAGSLDPVPDTGGLLFFYIFKCFFLFIYINI

SEQ ID NO: 27972 - protein, 1202 aa, Sesamia nonagrioides
MLTRSAARRARSPPPDSSPSSASPPPVSSPTVNAVMTPAAAVALSSSDEYFSPPTTPPPVRRRGGRRPPDCLGPRGPPASDRAPATGGNVQRMKWTQTINENVMRAYFGATEGGSNLTAYRGRMLSLFQVLEPAVNVSAQRLSDQVRVIQRNHMLDDVVLDRLRLESRNSHVTPASSLVAVQFNSVPSRPNLVDEEDDDEAISVTPQCNEKVRSALEDAFREYRSTPPELRPRLPRLPMHKKNKALVCALDSQLSNYLKDSKDLADTHSILYCGAVAICRVAHVKFPDSDRATRPKPAVPAWQCRIERRIGETRALIGKLISFREGNTRPRVMRFVGRAFSGTDVSTRDYLLRVTERIDFLKQKIYAWANRIRRYRRRVERYSQNRNFQSDERWVYRAWERSDQGVTDTCLPDDDATRSFWRNIWSVPVSHTEGGWTRDVERACDPVPEMGAITICPQDVARAVRPLPNWKSPGPDGLHNFWIKWFSGSHACLASQFQTALESGSLPQFLTTGITHLLHTSGSTAEPKNYRPITCLPTVYKVLTSILKAKINTHIDSNSIMSASQNGCRNGSRGTKELLLIDMAISQQVRRSRKDLSTCWIDYKKAYDSVPHTWLMRVLELYKVDATLRTFLMTCVCMSQWRTVLRYPGCRNIQRNSEPIRIERGIFQGDSLSPLWFCLALNPLSTLLEDSGLGYRLRRGGQVISHLLYMDDLKLFAHTNSQLKELLKITETFSSAIRMEFGVDKCAVMHVQRGEIVESVGTQLTGSINLRSLSASETYKYLGMSEALGINVTDMKQSLKERFFGRLKKVLNSLLSGGNKVRAFNGWVMPVLMYSFGILKWTQTELDALDQRVRTLLTANRLHHPRSSVMRLYIPRKCGGRGVLNAKTLHNREVCSLREYFLKTDVGMHRDVVAVDKGLTPLSLAKENWRKPVVLETNDRMGVWQSKELHGRFFRALRGPDVDFQASVAWLRYGDLFGETEGFVCAIMDEVMMTNNYRKFIVKDGTVDICRACHRPGESIRHIISGCSRLANGEYLHRHNLVARIIHQQLALKYNLVESEVPYYRYTPDPVLENGYITLYWDRSIITDRTIVANKPDMVMVDRSERRAMIVDITIPHDENLVKAEKDKQIKYLDLAHEVVDMWEVDSTIIVPIVVTANGLIAKSLDQHLRRLSLGGWIKGLIQKAVLLDTARIVRKFLSLEP

SEQ ID NO: 27973 - protein, 1031 aa, Sesamia nonagrioides
MQSSRIIAHQSQSAEIPPQPTIYADEGSHDRATNVSTQCNEELRNALEAAIREYRSISAELRPRLPRLPMHNRNRALMGALDAQLSNYFDTCEDLTDTHSILYCAAVAACRVKFPSDSRATRPKPVIPAWQHRIERRIGGARALIGKLICFREGNTRPRVMRFVRRAFSGTNTSPQNYMARVTERIDFLKQKVYAWANRIRRYKRRVERYTQNRTFQSNERRVYRDWERPEQGVTDTCLPDDDVMCSFWRSIWSVPVSHTEGDWARDVERACDPIPEMGPITICPQDVAHAVRPLPNWKSPGPDGLHNFWIKWFPRSHARLASQFQTALVSGSLPQFLTTGVTHLLHKSGSTAEPKNYRPITCLPTVYKVLTSILKTKINKHIDSNSILSASQNGCRSGSRGTKELLLIDMAISQQVRRSRKDLSTCWIDYKKAYDSVPHTWLMRVLELYKVDATLRTFLMTCMRTWRTVLRYPGCRNIQRNSEPIRIERGIFQGDSLSPLWFCLALNPLSTLLEDSGLGYRLRRGGQVISHLLYMDDLKLFAPNNSQLNELLKITEIFSSSIRMEFGVDKCAVMHVKRGEIMEPVGTQLTSSINLRALSASETYKYLGMSEALGINVTDVKQSLKERFFGRLKKVLNSLLSGGNKVRAFNGWVITQHPVLMYSFGILKWTQTELDALDQRVRTLLTANRLHHPRSSVMRLYIPRKCGGRGFLNAKTLHNREICSLRDYFLETDVGMHRDVVAADKGLTPLSLAKENWRKPVVLDTNDRMEVWKSKELHGRFFQALHGPDVDFQASVAWLRFGDLFGETEGFVFAIMDEVMMTNNYRRFIVKDGTVDICRACHRPGESIRHIISGCSRLANGEYLHRHNLVARIIHQQLALKYKLVESEVPYYRYMPDPVLENGHITLYWDRSIITDRTIVANKPDIVLVDRSERRAMIVDITIPHDENLVKAEKDKQIKYLDLAHEVVDMWEVDSAIIVPIVVTANGLIAKSLDQHLRRLSLGSWIKGLIQKAVLLDTARIVRKFLSLEP

SEQ ID NO: 27974 - protein, 1095 aa, Sesamia nonagrioides
MLTRSAARCARPPPPDSSLSSASPPPVSSPNVNAVMTPAAVVASSSSDEYFSPPTTPPPARRRGGRRPPDRLGPRGPSASDRVPAPGGSVQRMRWTQSINENVMRSYYGATEGGNNLTAYRVRMLSLFQVLEPAVNVSAQRLSDQVRVIQRNHMLDDVVLDRLRLESRNSHVTPASSLVAVQLNSVSPRPNHVDEEDDDRAISVSPQCNEKLRSALEDAFREYRSIPPEFRPRLPRLPMHKKNKALVCALDSQLSNYLKDSNDLNDTHSILYCGAVAICRVAHVKFPDSDRATRPKSAVPAWQCRIERRIGETRALIGKLISFREGNTRPRVMRFVRRAFSGTDTSTRDYLFRVTERIDFFKQKIYAWANRIRRYRRRVERYSQNRNFQSDERRVYRAWERSDQGVTDTCLPDDDATCSFWRNIWSVPVSHTEGSWTRVVERACDPVPEMGAITICPQDVARAVRPLPNWKSPGPDGLHNFWIKWFSGSHARLASQFQTALESGSLPQFLTTGVTHLLHKSGSTAEPKNYRPITCLPTVYKVLTSILKSKINTHIDSNSIMSASQNGCRSGSRGTKELLLIDMAISQQVRRSRKDLSTCWIDYKKAYDSVPHTWLMRVLELYKVDATLRTFLMTCMRTWRTVLRYPGCRNIQRNSEPIRIERGIFQGDSLSPLWFCLALNPLSTLLEDSGLGYRLRRGGQVISHLLYMDDLKLFAHTDSQLKELLKITETFSSSIRMEFGVDKCAVMHVKRGEIMESVGTQLTSSINLRALSASETYKYLGMSEALGINVTDMKQSLKERFFGRLKKVLNSLLSGGNKVRAFNGWVMPVLMYSFGILKWTQTELDALDRRVRTLLTANRLHHPRSSVMRLYIPRKCGGRGFLNAKTLHNREICSLRQYFLTTDVGMHRDVVAVDKGLTPLSLAKENWRKPVVLDTNDRMEVWKSKELHGRFFKALHGPDVDLQASVAWLRFGDLFGETEGFVCAITDEVMMTNNYRRFIVKDGTVDICRACHRPGESIRHIISGCSRLANGEYLHRHNLVARIIHQQLALKYNLVESEVPYYRYTPDPVLENDISHCTGIDPSSLTGLLLPISLI

SEQ ID NO: 27975 - protein, 1092 aa, Sesamia nonagrioides
MLTRSAARRARPPSPDSLPSSASPPPASSTTVSAVTTPAATVASSSSDEYFSPPTTPPPVRRRGGRRPPDCLGPRGPSASDRVPAPGGSVQRMRWTQSINENVMRSYYGATEGGTNLTAYRVRMLSLFQVLEPAVNVSAQRLSDQVRVIQRNHMLDDTVLDRLRNEMQSSRIIAHQSQSAEIPPQPTNYADEGSNDRATNVSTQCNEELRNALEAAIREYRSISAELRPRLPRLPMHNRNRALMGALDAQLSNYFDTCEDLTDTHSILYCAAVAPCRVAHVKFPSDSRATRPKPVVPAWQHRIERRIGGARALIGKLICFREGNTRPRVMRFVRRAFAGTNISPQNYMARVTERIDFLKQKVYAWANRIRRYKRRVERYTQNRTFQSNERWVYRDWERPEQGVADKCLPDDDAMCSFWRSIWSVPVSHTEGDWARDVERACDPIPEMGAITICPQDVARAVRPLPNWKSPGPDGLHNFWIKWFPRSHASLASQFQTALVSGSLPQFFTTGITHLLHKSGSTAEPKNYRPITCLPTVYKVLTSILKAKINNHIDSNSIMSVSQNGCRSGSRGTKELLLIDMAISQQVRRSRKDLSTCWIDYKKAYDSVPHTWLMRVLELYKVDTTLRTFLMTCMGQWRTVLRYPGCRNIQRNSEPIRIERGIFQGDSLSPLWFCLALNPLSTLLEDSGLGYRLRRGGQVISHLLYMDDLKLFAPNNLQLKELLKITETFSSAIRMEFGVDKCAVMHIKRGEIVESVGTQLTSSINLRALSASETYKYLGMSEALGINVTDMKQSLKERFFGRLKKVLNSLLSGGNKVRAFNGWVMPVLMYSFGILKWTQTELDALDQRVRTLLTANRLHHPRSSVMRLYIPRKCGGRGFLNAKTLHNREICSLREYFLETDVGMHRDVVAVDRGLTPLSLAKENWRKPVVLDRNDRMEVWKSKELHGRFFRALHGPDVDLQASVAWLRFGDLFGETEGFVCAIMDEVMMTNNYRRFIVKDGTVDICRACHRPGESIRHIISGCSRLANGEYLHRHNLVARIIHQQLALKYNLVESEVPYYRYMPDPVLENGHITLYWDRSIITDRLLLPISLI

SEQ ID NO: 27976 - protein, 1203 aa, Sesamia nonagrioides
MLTRSAARCARPPPPDSSLSSASPPPVSSPNVNAVMTPAVVVASSSSDEYFSPPTTPPPARRRGGRRPPDRLGPRGPSASDRVPAPGGSVQRMRWTQSINENVMRSYYGATEGGNNLTAYRVRMLSLFQVLEPAVNVSAQRLSDQVRVIQRNHMLDDVVLDRLRLESRNSHVTPASSLVAVQLNSVSPRPNHSDEEDDDRAISVSPQCNEKLRSALEDAFREYRSIPPEFRPRLPRLPMHKKNKALVCALDSQLSNYLKDSNDLNDTHSILYCGAVAICRVAHVKFPDSDRATRPKSAVPAWQCRIEHRIGETRALIGKLISFREGNTRPRVMRFVRRAFSGTDTSTRDYLFRVTERIDFFKQKIYAWANRIRRYRRRVERYSQNRNFQSDERRVYRAWERSDQGVTDTCLPDDDATCSFWRNIWSVPVSHTEGSWTRVVERACDPVPKMGAITICPQDVARAVRPLPNWKSPGPDGLHNFWIKWFSGSHARLASQFQTALESGSLPQFLTTGVTHLLHKSGSTAVPKHYRPITCLPTVYKVLTSILKSKINTHIDSNSIMSASQNGCRSGSRSTKELLLIDMAISQQVRRCRKDLSTCWIDYKKAYDSVPHTWLMRVLELYKVDATLRTFLMTCMRTWRTVLRYPGCRNIQRNSEYNNEIRIERGIFQGDSLSPLWFCLALNPLSTLLEDSGLGYRLRRGGQVISHLLYMDDLKLFAHTDSQLKELLKITETFSSSIRMEFGVDKCAVMHVKRGEIMESVGTQLTSSINLRALSASETYKYLGMSEALGINVTDMKQSLKERFFGRLKKVLNSLLSGGNKVRAFNGWVMPVLMYSFGILKWTQTELDALDRRVRTLLTANRLHHPRSSVMRLYIPRKCGGRGFLNAKTLHNREICSLRQYFLTTDVGMNRDVVAVDKGLTPLSLAKENWRKPVVLDTNDRMEVWKSKELHGRFFKALHGPDVDFQASVAWLRLGDLFGETEGFVCAITDEVMMTNNYRRFIVKDGTVDICRACHRPGESIRHIISGCSRLANGEYLHRHNLVARIIHQQLALKYNLVESEVPYYRYTPDPVLENDHITLYWDRSIITDRTIVANKPDIVLVDRSERRAMIVDITIPHDENLVKAEKDKQIKYLDLAHEVVDMWEVDSAIIVPIVVTTNGLIAKSLDQHLRRLSLGSWIKGLIQKAVLLDTARIVRKFLSLGP

SEQ ID NO: 27977 - protein, 1093 aa, Sesamia nonagrioides
MLTRSAARRAGPPSLDSLLSSASPPPSSSATVSAVTTPAAAAASSSSDEYFSPPTTPPPVRRRGGRRPPDCLGPRGPSASDRVPAPGGSVQRMRWTQSINENVMRSYYGATEGGTNLTAYRVRMLSLFQVLEPAVNVSAQRLSDQVRVIQRNHMLDDTVLDRLRNEMQSSRFIAHQSQSAEIPPQPTNYADEGSNDRATNVSTQCNEELRNALEAAIRDYRSISAELRPRLPRLPMHNRNRALMAALDAQLSNYFDTCEDLTDTHSILYCAAVAACHVAHVKFPSDSRATRPKPVVPAWQHRIERRIGGARALIGKLICFREGNTRPRVMRFVRRAFSGTNTSPQNYMARVTERIDFLKQKVYAWANRIRRYKRRVERYTQNRTFQSNEKRVYRDCERPEQGLTDTCLPDDDAMCSFWRSIWSVPVSHTEGDWARDVERACDPIPVMGAITICPQDVAHAVRPLPTWKSPGPDGLHNFWIKWFPRSHARLASQFQTALVSGSLPQFLTTGITHLLHKSGSTAEPKNYRPITCLPTVYKVLTSILKTKINKDIDSNFILSASQNGCRSGSRGTKELLLIDMAISQQVRRSRKDLSTCWIDYKKAYDSVPHTWLMRVLELYKVDATLRTFLMTCMRTWRTVLRYPGCRNIQRNSEPIRIERGIFQGDSLSPLWFCLALNPLSTLLEDSGLGYRLLRRGGQVISHLLYMDDLKLFAPNNSQLNELLKITEIFSSSIRMEFGVDKCAVMHVKRGEIMEPVGTQLTSSINLRALSASETYKYLGMSEALGINVTDMKQSLKERFFGRLKKVLNSLLSGGNKLRAFNGWVMPVLMYSFGILKWTQTELDALDQRVRTLLTANRLHHPRSSVMRLNIPRKCGGRGFLNAKTLHNREICSLRDYFLETNVGMHRDVVAADKGLTPLSLAKENWRKLVVLDTNDRMEVWKSKELHGRFFRALHGPDVDFQASVAWLRFGDLFGETEGFVFAIMDEVMMTNNYRRFIVKDGTVDICRACHRPGESIRHIISGCSRLANGEYLHRHNLVARIIHQKLALKYKLVESEVPYYRYMPDRFSKMAISHCTGIDPSSLTGLLLPTSLI

SEQ ID NO: 27978 - protein, 1074 aa, Sesamia nonagrioides
MLTRSAARRARPPSPDSLLGSASPPPVSSPTVSAVTTPAAAVALSSSDEYFFPPTTPPPVRRRGGRRPPDRLGPRGPSASDRVPAPGGSVQRMRWTQSINENVMRSYYGATEGGNNLTAYRVRMLSLFQVLEPAVNVSAQRLSDQVRVIQRNHMLDDTVLDRLRNEMQSSRVIAHRSQTAEIPPQSTNYADEGSNDRATNVSTQCNEELINALEVAIREYRSTSAELRPRLPRLPMHNRNRALMAALDAQLSNYFDTCEDLTDTHSILYCAAVAACRVAHVKFPSDSRATRPKPVVPAWQHRIERRIGGARALIGKLICFREGNTRPRVMRFVRRAFAGTNISPQNYMARVTERIDFLKQKVYAWANRIRRYIRRVERYTQNRTFQNNERWVYRDWERPEQGVTDTCLPDDDVMCSFWRSIWSVPVSHTEGDWARDVERACDLIPEMGTITICPQDVACAVRPLPNWKSPGPDGLHNFWIKWFPRSHARLASQFQTALVSGSLPQFLTTGITHLLHKSGSTAEPKNYRPITCLPTVYKVLTSILKTKINKHIDSNSIMSASQNGCKSGSRGTKELLLIDMAISQQVRRSRKDLSTCWIDYRKAYDSVPHTWLMRVLELYKVDATLRTFLMSCMRTWRTVLRYPGCRNIQRNSEPIRIERGIFQGDSLSPLWFCLALNPLSTLLEDSGLGYRLRRGGQVISHLLYMDDLKLFAPNNSQLRELLKITETFSSSIRMEFGVDKCAVMHVKRGEIMESVGTQLTGSINLRALSASETYKYLGMSEALGINVTDMKQLLKERFFGRLKKVLNSLLSGGNKVRAFNGWVMPVLMYSFGILKWTQTELDALDQRVRTLLTANRLHHPRSSVMRLYIPRNCGGRGFLNAKTLHNREVCSLREYFLETDVGMHRDVVAADKGLTPLSLAKENWRKPVVLDTNDRLEVWKSKELHGRFFRALHGPDVDFQAFVAWLRFGDLFGETEGFVFAIMDEVMMTKNYRRFIVKDGTVDICRACHRPGESIRHIISGCSRLANGEYLHRHNLVARIIHQQLALKYKLVESEVPYYRYMPDPVRKFISLEP

SEQ ID NO: 27979 - protein, 1185 aa, Ochropleura plecta
MHAFHLRARRSPPPEPSLVMSAVTPAVAVASSSSDEYFSPPTTPPPARRRGGRRLPDGLGLRGPPASDRVPAPGGNVQRMRWTSSINENVMRSYYGATEGGNNLTAYRVRMLSLFQVLEPAVNVSAQRLSDQVRVIQRNRMLDDTVLDRLLTEMQSSQVITSSSQAVVPPQSHQLVSRADEVSNDMATNVSTQCSEEMRSALEGAIREYRYISPELRPRLPRLPMHNKNRMLVAVLDSQLSNYFDNCENLTDAHSLLYCAAVAACRVAHVKFPDDRATRSKPAVPVWQYRIERRIGVARALIGKLICFREGNTRPRVMRFVRRAFAETDISPSDYMSRITERIDFLKQKVYAWANRIRRYKRRVERYTLNRTFQSDERWVYRAWERPDQDVSDMRLPDDDAMCSFWRSIWSVPVSHTEGEWTREVERACDPIPVMGAITISPQDVACAVRPLPNWKSPGPDGLHNFWLKWIQRSHARLATLFQTALESGSLPKFLTTGITHLLHKSGSTAEPKNYRPITCLPTIYKVLTSILRAKITKHIDDNSIMSASQNGCRNGSRGTKELLLIDMAISQQVRRSRRHLSTCWIDYKKAYDSVPHTWLMRVLELYKIDATLRTFLISCMRQWSTVLRYPGCRQIQRNSEPIRIERGIFQGDSLSPLWFCLALNPLSTLLENSGLGYRLRRGGQVISHLLYMDDLKLFAPNDLQLMELLKVTETFSSSISMEFGVDKCAVMHVKRGEIVESVGTQLSDSINLRSLSATETYKYLGMSEALGINVSDMKQSLKERFFGRLRKVFNSLLSGGNKVRAFNGWVMPVLMYSFGILKWTQTELDALDRKVRTLLTAFRMHHPRSSVMRLYIPRNCGGRGFLNAKTLHNREICSLREYFLETDVGMHRDVVAVDKGLTPLSLAKENWRKPVVLDTNDRREVWQSKELHGRFFRALHGPDVDQPASVAWLRSGDLFGETEGFVCAIMDEVMMTNNYRRFIVKDGTVDICRACHRPGESIRHIISGCSRLANGEYLHRHNLVARIIHQQLALKYSLVESEVPYYRYEPDPVLEHGNITLYWDRSIITDRTIVANKPDIVVVDRSERRAMIVDITVPHDENLVKAEKDKQIKYIDLAREVVDMWDVDSAIIVPIVVSANGLIAKSLDQHLRRLSLGSWIKGLIQKAVLLDTARIVRRFLSLEP

SEQ ID NO: 27980 - protein, 1200 aa, Eilema depressum
MLTRSRTRNNANAPTTSPDSSLSSAAQPLTTEPAALSSSSSDEFFSPPTSPPPVRRTGRGRPPASLEPRRPPASNRAPAAGGEVRRMRWTNSINENVMRAFYAATEGGTNLTAYRARMLPLFRVLEPTVNVSAQRLSDQVRAIQRCRLLDDSVLERLRSDSRSSPGASTSSHPLTQHEHFISQVNEESVSHVSEEVADAGVTHVSTVCIDIIRSALECAMREYRSTPFDCRPRLPRLPTHKKNIALVCALDSLLPDYFDNSEDLSDTHSILYCAAVAACRVANVKFHSTILTTRPKSAVPAWQSRIERRIAETRALIGKLICFRSGNTRPRVMRFVTRAFSGTDIRPREFLSRVTERIDFLKQKIYAWANRIRRYKRRVDRYSQNRTFQRDERWVYRSWERPDSNGTDMRRPDDDATNTFWRSIWSTPVSHTEGDWMRIVERSCESIETMEPVTISDEDVTNAVRLLPNWRSAGPDGLHNFWLKWFRSSHGRLAMQFQSCLESGSLPAFITTGVTHLLHKSGSTTDPKNYRPITCLPTVYKLLTSILREKISSHLIDNSIMSISQNGCRSGARGTKELLIIDMAICQQARRHRKDLATCWIDYKKAYDSVPHTWLLRVLELYKIDATLCAFMKTCMGQWRTVLCYPGCRQICEDNGLIKIERGIFQGDSLSPLWFCLALNPLSTILESSGLGCRLRRDGQVISHLLYMDDLKLFAPNNLHLIELLKLTETFSSSIRMDFGVDKCAVMHVKRGRIVESESVELSDSTKLRALSAADTYKYLGMSQALGISEAGMKQSLQERFFGRLRKVLKSLLSGGNKVRACNGWVMPVLMYSFGILRWTQTELDALDRKVRAHLTAYRMHHPRSSVMRLYIPRKCGGRGFLNAKTLHNREVCNLREYFLHNDADMHRDVVMVDNGLTPLGLAKENWRKPAVLSINDRRDVWKGKELHGRFYRALHGPEIDIPASLSWLRFGDLFGETEGFVFAIMDEVVMTNNYRRYIIKDGTVDICRACHRPGESLRHIISGCSRLANGEYLHRHNQVARIIHQQLALKYNLVESEVPYYRYVPDPVLENGHITLYWDRSIITDRTIVANKPDIVIVDRLERRAIIVDITIPHDENLVKAEKEKQIKYLDLAHEIVDMWDVDSAIIVPIVVSVHGLIAKSLDQHLKRLSLDGWLKGLMQKAVLLGTARIVRKFLSLEP

SEQ ID NO: 27981 - protein, 1195 aa, Sesamia nonagrioides
MLTRSAARRARPPSPDSLLRSASPPPATSATVSAVTTPAAAAASSSSDEYFSPPTTPPPVRRRGGRRPPDCLGPRGPSASDRVPAPGGSVQRMRWTQSINENVMRSYYGATEGGTNLTAYRVRMLSLFQVLEPAVNVSAQRLSDQVRVIQRNHMLDDTVLDRLRNEMQSSRVIAHQSQSAEIPPQPTNYADEGSNDRATNVSTQCNEELRNALEAAIREYRSISAELRPRMPRLPMHNRNSSLMAALDAQLSNYFDTCEDLTDTHSILYCAAVAACRVTHVKFPSDSRATRPKPVVPAWQHRIERRIGGARALIGKLICFREGNTRPRVMRFVRRAFSGTNTSPQNYMARVTERIDFLKQKVYAWANRIRRYKRRVERYTQNRTFQSNERRVYRDWERPEQGVTDTCLPDDDAMCSFWRSIWSVPVSHTEGDWARDVERACDPIPEMGAITICPLDVAHAVRPLPNWKSPGPDGLHNFWIKWFPRSHARLASQFQTALVSGSLPQFLTTGITHLLHKSGSTAKTKNYRPITCLPTVYKVLTSILKTKINKHIDSNSILSASQNGCRSGSRGTKELLLIDMAISQQVRRSRKDLSTCWIDYKKAYDSVPHTWLMRVLELYKVDATLRTFLMTCMRTWRTVLRYPGCRKIQRNSEPIRIERGIFQGDSLSPLWFCLALNPLSTLLEDSGLGYRLRRGGQVISHLLYMDDLKLFAPNNSQLNELLKITEIFSSSIRMEFGVDKCAVMHVKRGEIMEPVGTQLTSSINLSSASETYKYLGMSEALGIYVTDMKQSLKERFFGRLKKVLNSLLSGGNKVRAFNGWVMPVLMYSFGILKWTQTELDALDQRVRTLLTANRLHHPRSSVMRLNIPRKCGGRGFLNAKTLHNREICSLRDYFLETNVGMHRDVVAADKGLTPLSLAKENWRKPVVLDTNDRMEVWKSKELHGRFFRALHGPDVDFQASVAWLRFGDLFGETEGFVFAIMDEVMMTNNYRRFIVKDGTVDICRACHRPGESIRHIISGCSRLANGEYLHRHNLVARIIHQQLALKYKVVESEVPYYRYMPDPVLENGHITLYWDRSIITDRTIIANKPDIVMVDRSERRAMIVDITIPHDENLVKAEKDKQTKYLDLAHEVVDMWEVDSAIIVPIVVTANGLIAKSLDQHLRRLSLGSWIKGLIQKAVLLDTARIVRKFLSLEP

SEQ ID NO: 27982 - protein, 981 aa, Amphipyra tragopoginis
MREYRSTRPELRPRLPRLPMHRRNRALMCALDSLLSNYFDSSEDLGDTHSILYCAAVAACRVAHVKFINNERATRPKNAVPAWQCRIERRIAEARALIGKLICFGEGNTRPRVMRFVRRAFSGTDVSPREYMSRVTERIDFLKQKVYAWANRIRRYRRRVDRYNQNRMFRSDERWVYRNWERPDQSVGDSHPPDDDAMNSFWRSIWSVPVTHTEGDWMRDVERMCEPILDMGAIIISPQDVAGAVRPLPNWKSPGPDGLHNFWLKWLRSSHARLASQFQSSLETGTLPQFLTTGVTHLLHKSGSTAEPKNYRPITCLPSVYKVLTSILRTKINNHIDNNSIMSASQNGCRNGSRGTKELLLIDMAISQQVRRSRKDLSTCWIDYKKAYDSVPHTWLMRVLELYKVNTTLCAFLTSCMRQWRTVLRYPGCRQIQGIGEPIRIERGIFQGDSLSPLWFCLALNPLSTLLEGSGLGYRLRRGGQAISHLLYMDDLKLFAPNKLQLLELLKVTETFSNSIRMEFGVDKCAVMHVKRGRIMESVGTQLTDSIHLRSLSSTETYKYLGMSEALGINETDMKQSLRERFYGRLKKVLNSLLSGGNKVRAFNGWVMPVLMYSFGILKWTQTELDALDRRVRSLLTANRMHHPRSSVMRLYIPRKCGGRGFLNAKTLHNREVCSLREYFSQADVGMHRDVVAVDKGFTPLSLAKENWRKPVIFDTNGRREVWRSKELHGRFYRALHGPDVDFLASVAWLRFGDLFGETEGFVCAIMDEVMMTNNYRKYIVKDGTVDICRACHCPGESIRHIVSGCSRLANGEYLHRHNLVARIIHQQLALKYNLVDAEVPYYKYVPDPVLENGHVTLYWDRSIITDRTIVANKPDIVVIDRSERLTMIIDITVPHDENLVKAEKDKEIKYQDLAHEVVDMWDVDSAVIVPIVVTANGLIAKSLDQHLKRLSLGGWIKGLIQKAVLLDTARIVRRFLSLRP

SEQ ID NO: 27983 - protein, 1027 aa, Sesamia nonagrioides
MRWTQSINENVMRSYYGATEGGNNLTAYRVRMLSLFQVLEPAVNVSAQRLSDQVRVIQRNHMLDDTVLDRLRNEMQSSRIIAHQSQTAEIPPQPTNYADEGSNDRATNVSTQCNEELINALEAAIREYRFTPAEQRPRLPRLPMHNRNRALMAALDAQLSDYFDTCEDLTDTHSILYCAAVAACRVAHVKFPSDSRATRPKPVVPAWQRRIERRIGGARALIGKLICFREGNTRPRVMRFVRRAFAGTNISPQNYMARVTERIDFLKQKVYAWANRIRRYKRRVERYTQNRTFQSNERWVYRDWERPEQGVTDTCLPDDDAMCSFWRSIWSVPVSHTEGDWARDVERACDPIPEMGAITICPQDVACAVRPLPNWKSPGPDGLHNFWIKWFPRSHARLASQFQTALVSGSLPQFLTTGITHLLHKSGSTAEPKNYRPITCLPTVYKVLTSILKTKINKHIDSNSIMSASQNGCKSGSRGTKELLLIDMAISQQVRRSRKDLSTCWIDYRKAYDSVPHTWLMRVLELYKVDATLRTFLMSCMKTWRTVLRYPGCRNIQRNSEPIRIERGIFQGDSLSPLWFCLALNPLSILLEDSGLGYRLRRGGQVISHLLYMDDLKLFAPNNSQRRELLKITETFSSSIRMEFGVDKCAVMHVKRGEIMESVGTQLTDSINLRALSASETYKYLGMSEALGINVTDMKQSLKERFFGRLKKVLNSLLSGGNKVRAFNGWVMPVLMYSFGILKWTQTELDALDQRVRTLLTANRLHHPRSSVMRLYIPRKCGGRGFLNAKTLHNREVCSLRDYFLVTDVGMHRDVVAADKGLTPLSLAKQNWRKPVVLDTNDRMEVWKSKELHGRFFRALHGPDVDLQASVAWLRFGDLFGETEGFVFAIMDEVMMTNNYRRFIVKDGTVDICRACHRPGESIRHIISGCSRLANGEYLHRHNLVARIIHQQLALKYNLVESEVPYYRYTPDPVLENGYITLYWDRSIITDRTIVANKPDIVMVDRSERAMIVDINDCRDIILDHST

SEQ ID NO: 27984 - protein, 1199 aa, Amphipyra tragopoginis
MLTRAQARANARPPPPDSSPSSASQQQGLDPASPAVAVASSSSDEYYSPPSSPPPARRRGGTRPPVGLGLRGPLASDRVPAPGGIVPRMKWTRTINENVMRAYYGATEGGTNLTAYRGRMLSLFQVLEPAVNVSAQRLSDQVRVIQRGHMLDDTVLDRIRSEVQNSPVISPSPQVLEQSQNLAATLPRPNRADEEDDDRATNVSTQCNEELRSALEDAMREYRFIRPDLRPRIPRLPMHRKNRALVCALDSLLSNYFDGSEDLSDTHSILYCAAVAACRVAHIKLTDNERATRPKNAVPAWQCRIERRIAEARALIGKLVCFREGNSRPRVMRFVRRAFSGTDVSPREYMSRVTERIDFLKQKVYAWANRIRRYRLRVDRYTQNRLFQSDERWVYRTWERPDQRVSDTRLPDDDVMNAFWRNIWSVPVAHTEGDWMQEVQRACEPIQEMGDIIISPQDVASAVRPMSNWKSPGPDGLHNFWLKWLRSSHARLASQFQSSLESGSLPQFLTTGVTHLLHKSGSTAEPKNYRPITCLPTVYKVLTSILRAKINNHIDNNSIMSASQNGCRNGSRGTKELLLIDMAISQQVRRSRKDLSTCWIDYKKAYDSVPHTWLMRVLELYKVNTTLCAFLTSCMGQWRTVLHYPGCRQIRGMGEPIRIERGIFQGDSLSPLWFCLALNPLSTLLEGSGLGYRLRRGGQVISHLLYMDNLKLFAPNNLRLLELLKVTETFSNSIRMEFGVDKCAVMHVKRGRIMESVGTQLSDSIHLRSLSSTETYKYLGMSEALGINETDMKQSLRERFYGRLKKVLNSLLSGGNKVRAFNGWVMPVLMYSFGILKWTQTELDALDRRVRSLLTANRMHHPRSSVMRLYIPRKCGGRGFLNAKTLHNREVCSLREYFSQADVGMHRDVVAVDKGLTPLSLAKENWRKPVVLDTNGRREVWRSKELHGRFYRALHGPDVDFLASVAWLRFGDLFGETEGFVCAIMDEVMMTNNYRKYIVKDGTVDICRACHCPGESIRHVVSGCSRLANGEYLHRHNLVARIIHQQLALKYNLVDAEVPYYKYVPDPVLENGHVTLYWDRSIITDRTIVANKPDIVVIDRSKRLTMIVDITVPHDENLVKAEKDKEIKYQDLAHEVVAMWDVDSAIIVPIVVTANGLIAKSLDQHLKRLSLGSWIKGLIQKAVLLDTARIVRKFLSLRP

SEQ ID NO: 27985 - protein, 967 aa, Atethmia centrago
MSPEVRPRLPRLPMHKKNRALVAVLDLQLSNYFDDCEDLTDTHSILYCAAVVVCRVAHVIFPNDSRATRPKPTVPIWQCRIERRIGGARALIGKLICFREGNTRPRVMRFVRRAFSGTDISPQDYMSRVTERIDFLKQKVYAWANRIRRYKRRVDRYTQNRTFQSDERWVYRGWEQRDQGVTDTRLPDDDVMCSFWRSIWSVPVSHTEGDWARKVERACDPLPEMGAITICPQDVARAVRLLPNWKSPGPDGLHNFWLKWFLGSHARLAAQYQTALESGSLPQFLTIGVTHLLHKSGSTAEPKNYRPITCLPTVYKVLTSILRAKINKHIDTNSIMSASQNGCRNGSRGTKELLLIDMTISQQVRRFRKDLSTCWIDYKKAYDSVPHTWLMRVLELYKVDATLRTFLMSCMGQWRTVLRYPGCRNIQRNSEPIRIERGIFQGDSLSPLWFCLALNPLSMLLEDSGLGYRLRRGGQVISHLLYMDDLKLFASNNLQLMELLKITETFSSAIRMEFGVDKCAVMHVKRGEIVESVGTQPSDSINLRALSASETYKYLGMSEALGINVTDMKQSLKQRFFDRLKKVFNSLLSGGNKVRAFNGWVMPVLMYSFGILKWTQTELDALDRRVRTLLTAYRMRLYIPRKCGGRGFLNAKTLHNREVCSLREYFLEADVGMHRDVVAVDKGLTPLSLAKENWRKLVVLDTNDRREVWQSKELHGRFFRALHEPDVDFQASVAWLRFGDLFGETEGFVCAIMDEVIMTKNYRRFIVKDGTVDMCRACHRPGESIRHIISGCSRLANEEYLHRHNLVARIIHQQLALKYSLVESEVPYYRYVPDPVLDNGNITLYWDRSIITDRTIVANKPDIVVVDRTERRAMIVDITVPHDGNLVKAEKDKQIKYLDLAREVVDMWDVDSAIIVPIVVSANGLIAKSLDQHLRRLTLDGWIKGLIQKAVLLDTARIVRRFLSLEP

SEQ ID NO: 27986 - protein, 1200 aa, Sesamia nonagrioides
MLTRSAARRARPPSPDSLLSSASPPPASSATVSAVTTPAAAAASSSSDEYFSPPTTPPPVRRWGGRRPPDCLGPRGPSASDRVPAPGGSVQRMRWTQSINENVMRSYYGATEGGTNLTAYRVRMLSLFQVLEPAVNVSAQRLSDQVRVIQRNHMLDDTVLDRLRNEMQSSRVIAHQSQSAEIPPQPTNYADEGSNDRATNVSTQCNEELRNALEAAIREYRSISAELRPRLPRLPMHNRNRALMAALDAQLSNYFDTCEDLTDTHSILYCAAVAACRVAHVKFPSDSRATRPKPVVPAWQHRIERRIGGARALIGKLICFREGNTRPRVMRFVRRAFSGTNTSPLNYMARVTERIDFLKQKVYAWANRIRRYKRRVERYTQNRTFQSNERRVYRDWERPEQGVTDTCLPDDDAMCSFWRSIWSVPVSHTEGDWARDVGRACDPIPEMGAITICPQDVAHAVRPLPNWKSPRPDGLHNFWIKWFPRSHARLASQFQTALVSGSLPQFLTTGITHLLHKLGSTAEPKNYRPITCLPTVYKVLTSILKTKINKHIDSNSILSASQNGCRSGSRGTKELLLIDMAISQQVRRSRKDLSTCWIDYKKAYDSVPHTWLMRVLELYKVDATLRTFLMTCMRTWRTVLRYPGCRNIQRNSEPIRIERGIFQGDSLSPLWFCLALNPLSTLLEDSGLGYRLRRGGQVISHLLYMDDLKLFAPNNSQLNELLKITEIFSSSIRMEFGVDKCAVMHVKRGEIMEPVGTQLTSSINLRALSASETYKYLGMSEALGINVTDMKQSLKERFFGRLKKVLNSLLSGGNKVRAFNGWVMPVLMYSFGILKWTQTELDALDQRVRTLLTANRLHHPWSSVMRLYIPRKCGGRGFLNAKTLHNREICSLRDYFLETNVGMHRDVVASDKGLTPLSLAKENWRKPVVLDTNDRMEVWKSKELHGRFFRALHGPDVDFQASVAWLRFGDLFWETEGFVFAIMDEVMMTNNYRRFIVKDGTVDICRACHRPGESVRHIISGCSRLANGEYLHRHNLVARIIHQQLALKYKLVESEVPYYRYSPRSQVPVLENGHITLYWDRSIITDRTIIANKPDIVLVDRSERRAMIVDITIPHDENLVKAEKDKQTKYLDLAHEVVDMWEVDSAIIVPIIVTANGLIAKSLDQHLRRLSLGSWIKGLIQKAVLLDTARIVRKFLSQEP

SEQ ID NO: 27987 - protein, 1083 aa, Eilema depressum
MLPLFQVLEPTVNVSAQRLSDQVRAIQRCRLLDDSVLERLRSDSRSSPGASTSSHPLTQHEHFISQVNEESVSHVSEEVADAGVTHVSTVCIDIIRSALECAMREYRSTPFDCRPRLPRLPTHKKNIALVCALDSLLSDYFDNSEDLSDTHSILYCAAVAACRVANVKFHSTILTTRPKSAVPAWQSRIERRIAETRALIGKLICFRSGNTRPRVMRFVTRAFSGTDIRPREFLSRVTERIDFLKQKIYAWANRIRRYKRRVDRYSQNCTFQRDERWVYRSWERPDSNGTDMRRPDDDATNTFWRSIWSTPVSHTEGDWMRIVERSCESIETMEPVTISDEDVTNAVRLLPNWRSAGPDGLHNFWLKWFRSSHGRLAMQFQSCLESGSLPAFITTGVTHLLHKSGSTTDPKNYRPITCLPTVYKLLTSILREKISSHLIDNSIMSISQNGCRSGARGTKELLIIDMAICQQARRHRKDLVTCWIDYKKAYDSVPHTWLLRVLELYKIDATLCAFMKTCMGQWRTVLCYPGCRQICEDNGLIKIERGIFQGDSLSPLWFCLALNPLSTILESSGLGCRLRRDGQVISHLLYMDDLKLFAPNNLHLIELLKLTETFSSSIRMDFGVDKCAVMHVKRGRIVESESVELSDSTKLRALSAADTYKYLGMSQALGISEAGMKQSLQERFFGRLRKVLKSLLSGGNKVRACNGWVMPVLMYSFGILRWTQTELDALDRKVRAHLTAYRMHHPRSSVMRLYIPRKCGGRGFLNAKTLHNREVCNLREYFLHNDADMHRDVVMVDNGLTPLGLAKENWRKPAVLSINDRRDVWKGKELHGRFYRALHGPEIDIPASLSWLRFGDLFGETEGFVFAIMDEVVMTNNYRRYIIKDGTVDICRACHRPGESLRHIISGCSRLANGEYLHRHNQVARIIHQQLALKYNLVESEVPYYRYVPDPVLENGHITLYWDRSIITDRTIVANKPDIVIIDRLERRAIIVDITIPHDENLVKAEKEKQIKYLDLAHEIVDMWDVDSAIIVPIVVSVHGLIAKSLDQHLKRLSLDGWLKGLMQKAVLLGTARIVRKFLSLEP

SEQ ID NO: 27988 - protein, 981 aa, Eilema depressum
MREYRSMPFDYRPRLPRLPTHKKNIALVCALDSLLSDYFDNSEDLSDTHSILYCAAVAACRVANVKFHRTILTTRPKSAVPAWQSRIERRIAETRALIGKLICFRSGNTRPRVMRFVTRAFSGTDIRPREFLSRVTERIDFLKQKIYAWANRIRRYKRRVDRYSQNRTFQRDERWVYRSWERPDSNGTDMRRPDDDATNTFWRSIWSTPVSHTEGDWMRVVERSCESIGTMKPVTIFDEDVTNAVRLLPNWRSAGPDGLHNFWLKWFRSSHGRLAMQFQSCLESGSLPAFITTGVTHLLHKSGSTTDPKNYRPITCLPTVYKLLTSILREKISSHLIDNSIMSISQNGCRSGARGTKELLIIDMAICQQARRHRKDLATCWIDYKKAYDSVPHTWLLRVLELYKIDTTLCTFMKTCMGQWRTVLCYPGCRQICEDSGLIKIERGIFQGDSLSPLWFCLALNPLSTILDSSGLGCRLRRDGQVISHLLYMDDLKLFAPNNLHLIELLKLTETFSNSIRMDFGVDKCAVMHVKRGRIVESDSVELSDSTKLRALSATDTYKYLGMSQALGISEAGMKQSLQERFFGRLKKVLKSLLSGGNKVRACNGWVMPVLMYSFGILRWTQTELEALDRKVRAHLTAYRMHHPRSSVMRLYIPRKCGGRGFLNAKTLHNREVCNLREYFLHNDADMHRDVVMVDNGLTPLGLAKENWRKPAVLSINDRKDVWKGKELHGRFYRTLHGPEIDIPASLSWLRFGDLFGETEGFVFAIMDEVVMTNNYRRYIIKDGTVDICRACHRPGESLRHIISGCSRLANGEYLHRHNQVARIIHQQLALKYNLVESEVPYYRYVPDPVLENGHITLYWDRSIITDRTIVANKPDIVIIDRLERRAIIVDITIPHDENLMKAEKEKQIKYLDLAHEIVDMWDVDSAIIVPIVVSVHGLIAKSLDQHLKRLSLDGWLKGLMQNAVLLGTARIVRKFLSLEP

SEQ ID NO: 27989 - protein, 981 aa, Eilema depressum
MREYRSMPFDCRPRLPRLPTHKKNIALVCALDSLLSDYFDNSEDLSDTHSILYCAAVAACRVANVKFHSTILTTRPKSAVPAWQSRIERRITETRALIGKLICFRSGNTRPRVMRFVTRAFSGTDIRPREFLSRVTERIDFLKQKIYAWANRIRRYKRRVDRYSQNRTFQRDERWVYRSWERPDSNGTDMRRPDDDATNTFWRSIWSTPVSHTEGDWMRIVERSCESIETMEPVTISDEDVTNAVRLLPNWRSAGPDGLHNFWLKWFRSSHGRLAMQFQSCLESGSLPAFITTGVTHLLHKSGSTTDPKNYRPITCLPTVYKLLTSILREKISSHLIDNSIMSISQNGCRSGARGTKELLIIDMAICQQARRHRKDLATCWIDYKMAYDSVPHTWLLRVLELYKIDATLCAFMKTCMGQWRTVLCYPGCRQICEDNGLIKIERGIFQGDSLSPLWFCLALNPLSTILESSGLGCRLRRDGQVISHLLYMDDLKLFAPNNLHLIELLKLTETFSSSIRMDFGVDKCAVMHVKRGRIVESESVELSDSTKLRALSAADTYKYLGMSQALGISEAGMKQSLQERFFGRLRKVLKSLLSGGNKVRACNGWVMPVLMYSFGILRWTQTELDALDRKVRAHLTAYRMHHPRSSVMRLYIPRKCGGRGFLNAKTLHNREVCNLREYFLHNDADMHRDVVMVDNGLTPLGLAKENWRKPAVLSINDRRDVWKGKELHGRFYRALHGPEIDIPASLSWLRFGDLFGETEGFVFAIMDEVVMTNNYRRYIIRDGTVDICRACHRPGESLRHIISGCSRLANGEYLHRHNQVARIIHQQLALKYNLVESEVPYYRYVPDPVLENGHITLYWDRSIITDRTIVANKPDIVIIDRLERRAIIVDITIPHDENLVKAEKEKQIKYLDLAHEIVDMWDVDSAIIVPIVVSVHGLIAKSLDQHLKRLSLDGWLKGLMQKAVLLGTARIVRKFLSLEP

SEQ ID NO: 27990 - protein, 1019 aa, Lymantria monacha
MTTSAGIQYNEEVSQVLECAIREYRSMPPNLRPRLPRLPINRRNLAALSDINRLITTYLNSSENISDTHSILYCAAIATCRLAGAPLLEINPVIQQKPTVPMWQRRIERRINEARKQIGKLICFRYSNNRPRVMRFVHQAFLGTNIDPQNYMSQITERIDYLKQKVYAWASRIRRFKKRMDRYTLNRTFEKDQKWVYRSWERSEHSLSGRKLPDIDETVAFWRNIWSVAVTHTEADWIRDVKQACENMSQMDAVTITPQDVADALRPLSNWKSPGLDGLHNFWLKRLYSSHVCLSSQFQSAINSASLLDFMTTGITHLIFKNGSTTAPSNYRPIACLPSIYKLLTSILRVKISRHIELNSIISDFQNGCGSGCRGTKELLLIDMTIGQQVRRNRKDLSTCWIDYRKAFDSVPHTWLLRVLELYKINNTLRTFLKSCMGQWKTVLSYPTCQQRRGTGEPISIRRGIFQGDSLSPLWFCLALNPLSTLLERSGLGYKLRRGGQVISHLLYMDDLKLFAPGTQLVELLKVTETFSNSIKMEFGVDKCAVMHVKRGRIVQSQSVLSDTFHLRPLLVTDTYRYLGMSQSLNITDADMKQALQERFFGRLKKVFNSLLSGGNKVRACNAWAMPILMYSFGILKWTQTELDTTDRRVRTLMTTYRMHHPRSSVMRLYIPRKCGGRGFLNAKSLHNREVCNLRNYFLRMTKVVHRDVVAVDSGLTPLRLAKENWCSPIVLSTNDRKDVWQSKELHGRFYRALNGPEVDSLASVAWLRFGNLFGETEGFVCAIADEVIMTKNYRKYILRDGTADICRACHRPGESLRHIVSGCSSLSNGEYLHRHNQVARIIHQQLALRYKLVNVEMPYYRYVPEAVLENSHVTLYWDRSIITDRTVVANKPDIVVIDRLERRAMIVDVTVPHDENLVKAEKDKQVKYLDLAHEIVDMWDVDSAIIVPIVVSVNGLMAKSLDQHLSRLALGGWGQESDAEGSSPRHGTNCEEVSLSGSLTTGSLVLTPAAGAILFLLF

SEQ ID NO: 27991 - protein, 1197 aa, Lymantria monacha
MLTRSKARAELARLPSPGSLQCSASQSQDTSDTIALSAEASSSSDEFFSPPTSPIPVCRREENRPPVSLGPRGLLVSNRAPAAGGNVQRMKWTEETNKNVMRAYFGATEGGANLTAYRSRMLVLFQALEPTINVTTQRLSDQVRAIQRCQLLDVTVLDMLRSEYLQSMPACPTPVVATPLSPIISASANTDNIDLDNGMTTSAGIQYNEEVSQVLECAIREYRSMPPNLRQRLPRLPINRRNLAALSDINRLITTYLNSNENISDTHSILYCAAIATCRLAGAPLLEINPVIQQKPTVPMWQRRIERRINEARKQIGKLICFRSGNNRPRVMRFVHQAFLGTNIDPQNYMSQITERIDYLKQKVYAWASRIRRFKKRMDRYTLNRTFEKDQKWVYRSWERSEHSLSGRKLPDIDETVAFWRNIWSVAVTHTEGDWIRDVKQACENMSQMDAVTITPQDVADALRPLSNWKSPGLDGLHNFWLKRLYSSHVCLSSQFQSAINSASLPDFMTTGITHLIFKNGSTTAPSNYRPITCLPSIYKLLTSILRVKISRHIELNSIISDFQNGCGSGCRGTKELLLIDMTIGQQVRRNRKDLSTCWIDYRKAFDSVPHTWLLRVLELYKINNTLRTFLKSCMGQWKTVLSYPTCQQRRGTGEPISIRRGIFQGDSLSPLWFCLALNPLSTLLERSGLGYKLRRGGQVISHLLYMDDLKLFAPGTQLVELLKVTETFSNSIKMEFGVDKCAVMHVKRGRIVQSQSVLSDTFHLRPLLVTDTYRYLGMSQSLNITDADMKQALQERFFGRLKKVFNSLLSGGNKVRACNAWAMPILMYSFGILKWTQTELDTIDRRVRTLMTTYRMHHPRSSVMRLYIPRKCGGRGFLNAKSLHNREVCNLRNYFLRMTKVVHRDMVAVDSGLTPLRLAKENWCSPIVLSTNDRKDVWQSKELHGRFYRALNGPEVDSLASVAWLRFGNLFGETEGFVCAIADEVIMTKNYRKYILRDGTADICRACHRPGESLRHIVSGCSSLSNGEYLHRHNQVARIIHQQLALRYKLVNVEMPYYRYVPEAVLENSHVTLYWDRSIITDRTVVANKPDIVVIDRLERRAMIVDVTVPHDENLVKAEKDKQVKYLDLAHEIVDMWDVDSAIIVPIVISVNGLMAKSLDQHLSRLALGGWVKSQMQKAVLLDTARIVRRFLSLDP

SEQ ID NO: 27992 - protein, 893 aa, Lymantria monacha
MPPNLRPGLPRLPINRRNLAALSDINRLITTYLNSSENISDTHSILYCAAIATCRLAGAPLQEINPVIQQKPTVPMWQRRIERRINEARKQIGKLICFRSGNNRPRVMRFVHQAFLGTNIDPQNYMSQITERIDYLKQKVYAWANRIRRFKIRMDRYTLNRTFEKDQKWVYRSWERSEHSLSGSKLPDIDETVAFWRNFWSVAVTHTEADWIRDIKQACENMSQMDAVAITPQDVADALRPLSNWKSPGLDGLHNFWLKRLYSSHVCLSSQFQSAINSASLPDFMTTGITHLIFKNGSTTVPSNYRPITCLPSIYKLLTSILRVKISRHIELNSIISDFKNGCESGCRGTKELLLIDMTIGQQVRRNRKDLSTCWIDYSKAFDSVPHTWLLRVLELYKISNMLRTFLKSCIGQWKTVLSYPTCQQRRGTGEPISIRRGIFQGDSLSPLWFCLALNPLSTLLEHSGLGYKLRRGGQVISHLLYMDDLKLFAPGTQLVELLKVTETFSNAIKMEFGVDKCAVMHVKRGRIVKSQSVLSDTFHLRPLLVTDTYRYLGMSQSLNITEADMKQALQERFFGRLKKVFNSLLSGGNKVRACNAWAMPILMYSFGILEWTQTELDTIDRRVRTLMTTYRMHHPRSSVMRLYIPRKCGGRGFLNAKSLHNREVCNLRNYFLRMTKVVHRDVVAVDSGLTPLRLAKENWCSPIVLSTNDRKDVWQSKELHGKFYRALNGPEVDSLASVAWLRFGNLFGETEGFVCAIADEVIMTKNYRKYILRDGMADICRACHRPGESLRHIVSGCSSPSNGEYLHRHNQVARIIHQQLALRYKLVNVEVPYYRYVPEVVLENSHVTLYWDRSIITDRTVVANKPDMVVIDRLERRAMIVDVTVPQESHEG

SEQ ID NO: 27993 - protein, 1006 aa, Lymantria monacha
MLTRSKARAELARLPSPGSLQFSASQSQDTSDTIALSAEASSSSDEFFSPPTSPIPVCRREENRPPVSLGPRGLLVSNRAPAAGGNVQRMKWTEETNKNVMRAYFGATEGGANLTAYRSRMLVLFQALEPTINVTTQRLSDQVRAIQRCQLLDVTQNYMSQITERIDYLKQKVYAWASRICRFKKRMDRYTLNWTFEKDQKWVYRSWERSEHSLSGSKLPDIDETVAFWRNIWSVPVTHTEADWIRDAKQACENMSQMDAVTITPQDVVDALRPLSNWKSPGLDGLHNFWLKRLCSSHVCLSSQFQSAINSASLPDFMTTGITHLIFKNGSTTAPSNYRPITCLPSIYKLLTSILRVKISRHIELNSIISDFQNGCVSGCRGTKELLLIDMTIGQQVRRNRKDLSTCWIDYRKAFDSVPHTWLLRVLELYKINNTLRTFLKSCMGQWKTVLSYPACQQRRGTGEPISIRRGIFQGDSLSPLWFCLALNPLSTLLERSGLDYKLRRGGQVISHLLYMDDLKLFAPGTQLVELLKVTETFSNSIKMEFGVDKCAVMHVKRGRIVQSQSVLSDTFHLRPLLVTDTYRYLGMSQSLNITDADMKQALQERFFGRLKKVFNSLLSGGNKVRACNACAMPILMYSFGILKWTQTELDTIDRRVRTLMTTYRMHHPRSSVMRLYIPRKCGGRGFLNAKSLHNREVCNLRNYFLRMTKVVHRDVVAVDSELTPLRLAKENWCSPIVLSTNDRKDVWQSKELHGRFYRALNGPEVDSLASVAWLRFGNLFGETEGFICAIADEVIMTKNYRKYILRDGTADICRACRRPGESLRHIVSGCSSLSNGEYLHRHNQVARIIHQQLALRYKLVNVEVPYYRYVPEVVLENSHVTLYWDRSIITDRTVVANKPDIVVIDRLERRAMIVDVTVPHDENLVKAEKDKQVKYLDLAHEIVDMWDVDSAIIVPIVVSVNGLMAKSLDQHLSRLALGGWVKGQMPKAVLLDTARIVRRFLSLDP

SEQ ID NO: 27994 - protein, 1197 aa, Lymantria monacha
MLTRSKARAELARLPSPGSLQCSASQSQDTSDTIALSAEASSSSDEFFSPPTSPIPVCRREENRPPVSLGPRGLLVSNRAPAAGGNVQRMKWTEETNKNVMRAYFGATEGGANLTAYRSRMLVLFQALEPTINVTTQRLSDQVRAIQRCQLLDVTVLDMLRSEYLQNMPACPTPVVATPLSPIISASANTDNIDLDNGMTTSAGIQYNEEVSQVLECAIREYRSMPPNLRPRLPRLPINRRNLAALSDINRLITTYLNSSENISDTHSILYCAAIATCRLAGASLLEINPVIQQKPTVPIWQRRIERRINEARKQIGKLICFRSGNNRPRVMRFVHQAFLGTNIDPQNYMSQITERIDYLKQKVYAWASRIRRFKKRMDRYTLNRTFEKDQKWVYRSWERSEHSLSGRKLPDIDETVAFWRNIWSVAVTHTEADWIRDVKQACENMSQMDAVTITPQDVADALRPLSNWKSPGLDGLHNFWLKRLYSSHVCLSSQFQSAINSASLPDFMTTGITHLIFKNGSTTAPSNYRPITCLPSIYKLLTSILRVKISRHIELNSIISDFQNGCGSGCRGTKELLLIDMTIGQQVRRNRKDLSTCWIDYRKAFDSVPHTWLLRVLELYKINNTLRTFLKSCMGQWKTVLSYPACQQRRGTGEPISIRRGIFQGDSLSPLWFCLALNPLSTLLERSGLGYKLRRGGQVISHLLYMDDLKLFAPGTQLVELLKVTETFSNSIKMEFGVDKCAVMHVKRGRIVQSQSVLSDTFHLRPLLVTDTYRYLGMSQSLNITDADMKQALQERFFGRLKKVFNSLLSGGNKVRACNAWAMPILMYSFGILKWTQTELDTIDRRVRTLMTTYRMHHPRSSVMRLYIPRKCGGRGFLNAKSLHNREVCNLRNYFLRMTKVVHRDVVAVDSGLTPLRLAKENWCSPIVLSTNNRKDVWQSKELHGRFYRALNGPEVDSLASVAWLRFGNLFGETEGFVCAIADEVIMTKNYRKYILRDGTADICRACHRPGESLRHIVSGCSSLSNGEYLHRHNQVARIIHQQLALRYKLVNVEMPYYRYVPEAVLENSHVTLYWDRSIITDRTVVANKPDIVVIDRLERRAMIVDVTVPHDENLVKAEKDKQVKYLDLAHEIVDMWDVDSATIVPIVVSVNGLMAKSLDQHLSRLALGGWVKSQMQKAVLLDTARIVRRFLSLDP

SEQ ID NO: 27995 - protein, 1197 aa, Lymantria monacha
MLTRSKARAELARLPSPGSLQCSASQSQDTSDTIALSAEASSSSDEFFSPPTSPIPVCRREENRPPVSLGPRGLLVSNRAPAAGGNVQRMKWTEETNKNVMRAYFGATEGGANLTAYRSRMLVLFRALEPTINVTTQRLSDQVRAIQRCQLLDVAVLDMLRSEYLQSMPACPTPVVATPLSPIISASANTDNIDLDNGMTTSAGIQYNEEVSQVLECAIREYRSMPPNLRPRLPRLPINRRNLAALSDINRLITTYLNSNENISDTHSILYCAAIATCRLAGAPLLEINPVIQQKPTVPMWQRRIERRINEARKQIGKLICFRSGNNRPRVMRFVHQAFLGTNIDPQNYMSQITERIDYLKQKVYAWASRIRRFKKRMDRYTLNRTFEKDQKWVYRSWERSEHSLSGRKLPDIDETVAFWRNIWSVAVTHTEGDWIRDVKQACENMSQMDAVTITPQDVADALRPLSNWKSPGLDGLHNFWLKRLYSSHVCLSSQFQSAINSASLPDFMTTGITHLIFKNGSTTAPSNYRPITCLPSIYKLLTSILRVKISRHIELNSIISDFQNGCGSGCRGTKELLLIDMTIGQQVRRNRKDLSTCWIDYRKAFDSVPHTWLLRVLELYKINNTLRTFLKSCMGQWKTVLSYPTCQQRRGTGEPISIRRGIFQGDSLSPLWFCLALNPLSTLLERSGLGYKLRRGGQVISHLLYMDDLKLFAPGTQLVELLKVTETFSNSIKMEFGVDKCAVMHVKRGRIVQSQSVLSDTFHLRPLLVTDTYRYLGMSQSLNITDADMKQALQERFFGRLKKVFNSLLSGGNKVRACNAWAMPILMYSFGILKWTQTELDTIDRRVRTLMTTYRMHHPRSSVMRLYIPRKCGGRGFLNAKSLHNREVCNLRNYFLRMTKVVHRDMVAVDSGLTPLRLAKENWYSPIVLSTNDRKDVWQSKELHGRFYRALNGPEVDSLASVAWLRFGNLFGETEGFVCAIADEVIMTKNYRKYILRDGTADICRACHRPGESLRHIVSGCSSLSNGEYLHRHNQVARIIHQQLALRYKLVNVEMPYYRYVPEAVLENSHVTLYWDRSIITDRTVVANKPDIVVIDRLERRAMIVDVTVPHDENLVKAEKDKQVKYLDLAHEIVDMWDVDSAIIVPIVVSVNGLMAKSLDQHLSRLALGGWVKSQMQKAVLLDTARIVRRFLSLDP

SEQ ID NO: 27996 - protein, 1143 aa, Lymantria monacha
MLTRSKARAELARLPSPGSLQCSASQSQDTSDTIALSAEASSSSDEFFSPPTSPIPVCRREENRPPVSLGPRGLLVSNRAPAAGGNVQRMKWTEETNKNVMRAYFGATEGGANLTAYRSRMLVLFQALEPTINVTTQRLSDQVRAIQRCQLLDVAVLDMLRSEYLQSMPACPTPVVATPLSPIISASANTDNIDLDNGMTTSAGIQYNEEVSQVLECAIREYRSMPPNLRPRLPRLPINRRNLAALSDINRLITTYLNSNENISDTHSILYCAAIATCRLAGAPLLEINPVIQQKPTVPMWQRRIERRINEARKQIGKLICFRSGNNRPRVMRFVHQAFLGTNIDPQNYMSQITERIDYLKQKVYAWASRIRRFKKRMDRYTLNRTFEKDQKWVYRSWERSEHSLSGRKLPDIDETVAFWRNIWSVAVTHTEGDWIRDVKQACENMSQMDAVTITPQDVADALRPLSNWKSPGLDGLHNFWLKRLYSSHVCLSSQFQSAINSASLPDFMTTGITHLIFKNGSTTAPSNYRPITCLPSIYKLLTSILRVKISRHIELNSIISDFQNGCGSGCRGTKELLLIDMTIGQQVRRNRKDLSTCWIDYRKAFDSVPHTWLLRVLELYKINNTLRTFLKSCMGQWKTVLSYPTCQQRRGTGEPISIRRGIFQGDSLSPLWFCLALNPLSTLLERSGLGYKLRRGGQVISHLLYMDDLKLFAPGTQLVELLKVTETFSNSIKMEFGVDKCAVMHVKRGRIVQSQSVLSDTFHLRPLLVTDTYRYLGMSQSLNITDADMKQALQERFFGRLKKVFNSLLSGGNKVRACNAWAMPILMYSFGILKWTQTELDTIDRRVRTLMTTYRMHHPRSSVMRLYIPRKCGGRGFLNAKSLHNREVCNLRNYFLRMTKVVHRDMVAVDSGLTPLRLAKENWCSPIVLSTNDRKDVWQSKELHGRFYRALNGPEVDSLASVAWLRFGNLFGETEGFVCAIADEVIMTKNYRKYILRDGTADICRACHRPGESLRHIVSGCSSLSNGEYLHRHNQVARIIHQQLALRYKLVNVEMPYYRYVPEAVLENSHVTLYWDRSIITDRTVVANKPDIVVIDRLERRAMIVDVPFRPFRYYYYYYVCPMYMYPLVISWTPKIHHFGYG

SEQ ID NO: 27997 - protein, 1197 aa, Lymantria monacha
MLTRSKARAELARLPSPGSLQCSASQSQDTSDTIALSAEASSSSDEFFSPPTSPIPVCRREENRPPVSLGPRGLLVSNRAPAAGGNVQRMKWTEETNKNVMRAYFGATEGGANLTAYRSRMLVLFQALEPTINVTTQRLSDQVRAIQRCQLLDVTVLDMLRSEYLQSMPACPTPVVATPLSPIISASANTDNIDLDNGMTTSAGIQYNEEVSQVLECAIREYRSMPPNLRPRLPRLPINRRNLAALSDINRLITTYLNSSENISDTHSILYCAAIATCRLAGAPLLEINPVIQQKPTVPTWQRRIERRINEARKQIGKLICFRSGNNRPRVMRFVHQAFLGTNIDPQNYMSQITERIDYLKQKVYAWASRIRRFKKRMDRYTLNRTFEKDQKWVYRSWERSEHSLSGRKLPDIDETVAFWRNIWSVAVTHTEADWIRDVKQACENMSQMDAVTITPQDVADALRPLSNWKSPGLDGLHNFWLKRLYSSHVCLSSQFQSAINSASLPDFMTTGITHLIFKNGSTTAPSNYRPITCLPSIYKLLTSILRVKISRHIELNSIISDFQNGCGSGCRGTKELLLIDMTIGQQVRRNRKDLSTCWIDYRKAFDSVPHTWLLRVLELYKINNTLRTFLKSCMGQWKTVLSYPACQQRRGTGEPISIRRGIFQGDSLSPLWFCLALNPLSTLLERSGLGYKLRRGGQVISHLLYMDDLKLFAPGTQLVELLKVTETFSNSIKMEFGVDKCAVMHVKRGRIVQSQSVLSDTFHLRPLLVTDTYRYLGMSQSLNITDADMKQALQERFFGRLKKVFNSLLSGGNKVRACNAWAMPILMYSFGILKWTQTELDTIDRRVRTLMTTYRMHHPRSSVMRLYIPRKCGGRGFLNAKSLHNREVCNLRNYFLRMTKVVHRDVVAVDSGLTPLRLAKENWCSPIVLSTNDRKDVWQSKELHGRFYRALNGPEVDSLASVAWLRFGNLFGETEGFVCAIADEVIMTKNYRKYILRDGTADICRACHRPGESLRHIVSGCSSLSNGEYLHRHNQVARIIHQQLALRYKLVNVEMPYYRYVPEAVLENSHVTLYWDRSIITDRTVVANKPDIVVIDRLERRAMIVDVTVPHDENLVKAEKDKQVKYLDLAHEIVDMWDVDSAIIVPIVVSVNGLMAKSLDQHLSRLALGGWVKSQMQKAVLLDTARIVRRFLSLDP

SEQ ID NO: 27998 - protein, 1197 aa, Lymantria monacha
MLTRSKARAELARLPSPGSLQCSASQSQDTSDTIALSAEASSSSDEFFSPPTSPIPVCRREENRPPVSLGPRGLLVSNRAPAAGGNVQRMKWTEETNKNVMRAYFGATEGGANLTAYRSRMLVLFQALEPTINVTTQRLSDQVRAIQRCQLLDVAVLDMLRSEYLQSMPACPTPVVATPLSPIISASANTDNIDLDNGMTTSAGIQYNEEVSQVLECAIREYRSMPPNLRPRLPRLPINRRNLAALSDINRLITTYLNSNENISDTHSILYCAAIATCRLAGAPLLEINPVIQQKPTVPMWQRRIERRINEARKQIGKLICFRSGNNRPRVMRFVHQAFLGTNIDPQNYMSQITERIDYLKQKVYAWASRIRRFKKRMDRYTLNRTFEKDQKWVYRSWERSEHSLSGRKLPDIDETVAFWRNIWSVAVTHTEADWIRDVKQACENMSQMDAVTITPQDVADALRPLSNWKSPGLDGLHNFWLKRLYSSYVCLSSQFQSAINSASLPDFMTTGITHLIFKNGSTTAPSNYRPITCLPSIYKLLTSILRVKISRHIELNSIISDFQNGCGSGCRGTKELLLIDMTIGQQVRRNRKDLSTCWIDYRKAFDSVPHTWLLRVLELYKINNTLRTFLKSCMGQWKTVLSYPTCQQRRGTGEPISIRRGIFQGDSLSPLWFCLALNPLSTLLERSGLGYKLRRGGQVISHLLYMDDLKLFAPGTQLVELLKVTETFSNSIKMEFGVDKCAVMHVKRGRIVQSQSVLSDTFHLRPLLVTDTYRYLGMSQSLNITDADMKQALQERFFGRLKKVFNSLLSGGNKVRACNAWAMPILMYSFGILKWTQTELDTIDRRVRTLMTTYRMHHPRSSVMRLYIPRKCGGRGFLNAKSLHNREVCNLRNYFLRMTKVVHRDMVAVDSGLTPLRLAKENWCSPIVLSTNDRKDVWQSKELHGRFYRALNGPEVDSLASVAWLRFGNLFGETEGFVCAIADEVIMTKNYRKYILRDGTADICRACHRPGESLRHIVSGCSSLSNGEYLHRHNQVARIIHQQLALRYKLVNVEMPYYRYVPEAVLENSHVTLYWDRSIITDRTVVANKPDIVVIDRLERRAMIVDVTVPHDENLVKAEKDKQVKYLDLAHEIVDMWDVDSAIIVPIVVSVNGLMAKSLDQHLSRLALGGWVKSQMQKAVLLDTARIVRRFLSLDP

SEQ ID NO: 27999 - protein, 1197 aa, Lymantria monacha
MLTRSKARAELARLPSPGSLQCSASQSQDTSDTIALSAEASSSSDEFFSPPTSPIPVCRREENRPPVSLGPRGLLVSNRAPAAGGNVQRMKWTEETNKNVMRAYFGATEGGANLTAYRSRMLVLFQALEPTINVTTQRLSDQVRAIQRCQLLDVTVLNMLRSEYLQSMPACPTPVVATPLSPIISASANTDNIDLDNGMTTSAGIQYNEEVSQVLECAIIEYRSMPPNLRPRLPRLPINRRNLAALSDINRLITTYLNSSENISDTHSILYCAAIATCRLAGAPLLEINPVIQQKPTVPMWQRRIERRINEARKQIGKLICFRSGNNRPRVMRFVHQAFLGTNIDPQNYMSQITERIDYLKQKVYAWASRIRRFKKRMDRYTLNRTFEKDQKWVYRSWERSEHSLSGRKLPDIDETVSFWRNIWSVAVTHTEADWIRDVKQACENMSQMDAVTITPQDVADALRPLSNWKSPGLDGLHNFWLKRLYSSHVCLSSQFQSAINSASLPDFMTTGITHLIFKNGSTTAPSNYRPITCLPSIYKLLTSILRVKISRHIELNSIISDFQNGCGSGCRGTKELLLIDMTIGQQVRRNRKDLSTCWIDYRKAFDSVPHTWLLRVLELYKINNTLRTFLKSCMGQWKTVLSYPTCQQRRGTGEPISIRRGIFQGDSLSPLWFCLALNPLSTLLERSGLGYKLRRGGQVISHLLYMDDLKLFAPGTQLVELLKVTETFSNSIKMEFGVDKCAVMHVKRGRIVQSQSVLSDTFHLRPLLVTDTYRYLGMSQSLNITDADMKQALQERFFGRLKKVFNSLLSGGNKVRACNAWAMPILMYSFGILKWTQTELDTIDRRVRTLMTTYRMHHPRSSVMRLYIPRKCGGRGFLNAKSLHNREVCNLRNYFLRMTKVVHRDVVAVDSGLTPLRLAKENWCSPIVLSTNDRKDVWQSKELHGRFYRALNGPEVDSLASVAWLRFGNLFGETEGFVCAIADEVIMTKNYRKYILRDGTADICRACHRPGESLRHIVSGCSSLSNGEYLHRHNQVARIIHQQLALRYKLVNVEMPYYRYVPEAVLENSHVTLYWDRSIITDRTVVANKPDIVVIDRLERRAMIVDVTVPHDENLVKAEKDKQVKYLDLAHEIVDMWDVDSTIIVPIVVSVNGLMAKSLDQHLSRLALGGWVKSQMQKAVLLDTARIVRRFLSLDP

SEQ ID NO: 28000 - protein, 1097 aa, Lymantria monacha
MKWTEETNKNVMRAYFGATEGGANLTAYRSRMLVLFQALEPTINVTTQRLSDQVRAIQRCQLLDVTVLDMLRSEYLQSMPACPTPVVATPLSPIISASANTDNIDLDNGMTTSAGIQYNEEVSQVLECAIREYRSMPPNLRPRLPRLPINRRNLAALSDINRLITTYLNSSENISDTHSILYCAAIATCRLAGAPLLEINPVIQQKPTVPMWQRRIERRINEARKQIGKLICFRSGNNRPRVMRFVHQAFLGTNIDPQNYMSQITERIDYLKQKVYAWASRIRRFKKRMDRYTLNRTFEKDQKWVYRSWERSEHSLSGSKLPDIDETVAFWRNIWSVAVTHTEADWIRDVKQACENMSQMDAVTITPQDVADALRPLSNWKSPGLDGLHNFWLKRLCSSHVCLSSQFQSAINSASLPDFMTTGITHLIFKNGSTTAPSNYRPITCLHSIYKLLTSILRVKISRHIELNSIISDFQNGCVSGCRGTKELLLIDMTIGQQVRRNRKDLSTCWIDYREAFDSVPHTWLLRVLELYKINNTLRTFLKSCMGQWKTVLSYPTCQQRRGTGEPISIRRGIFQGDSLSPLWFCLALNPLSTLLERSELGYKLRRGGQVISHLLYMDDLKLFAPGTQLVELLKVTETFSNYIKMEFGVDKCAVMHVKRGKIVQSQSVLSDTFHLRPLFVTDTYWYLGMSQSLNITDADMKQALQERFFGRLKKVFNSLLSGGNKVRACNAWAMPILMYSFGILKWTQTELDTIDRRVRTLMTTYRMHHPRSSVMRLYIPRKWGGRGFLNAKSLHNREVCNLSNYFLRMTKVVHRDVVAVDSGLTPLRLAKENWCSPIVLSTNDRKDVWQSKELHGSFYRALNGPEVDSLASVAWLRFGNLFGETEGFVCAIADEVIMTKNYRKYILRDGTADICRACRRPGESLRHIVSGCSSLSNGEYLHRHNQVARIIHQQLALRYKLVNVEVPYYRYVPEVVLENSHVTLYWDRSIITDRTVVANKPDIVVIDCLERRAMIVDVTVPHDENLVKAEKDKQVKYLDLAHEIVDMWDVDSAIIVPIVVSVNGLMAKSLDQHLSRLALGGWVKGQMQKAVLLDTA

SEQ ID NO: 28001 - protein, 1197 aa, Lymantria monacha
MLTRSKARAELARLPSPGSLQCSASQSQDTSDTIALSAEASSSSDEFFSPPTSPIPVCRREENRPPVSLGPRGLLVSNRAPAAGGNVQRMKWTEETNKNVMRAYFGATEGGANLTAYRSRMLVLFQALEPTINVTTQRLSDQVRAIQRCQLLDVTVLDMLRSEYLQSMPACPTPVVATPLSPIISASANTDNIDLDNGMTTSAGIQYNEEVSQVLECAIREYRSMPPNLGPRLPRLPINRRNLAALSDINRLITTYHNSSENISDTHSILYCAAIATCRLAGAPLLEINPVIQQKPTVPMWQRRIERRINEARKQIGKLICFRSGNNRPRVMRFVHQAFLGTNIDPQSYMSQITERIDYLKQKVYAWASRIRRFKKRMDRYILNRTFEKDQKWVYRSWERSEHSLSGRKLPDIDETVAFWRNIWSVAVTHTEADWIRDVKQACENMSQMDAVTITPQDVADALRPLSNWKSPGLDGLHNFWLKRLYSSHVCLSSQFQSAIDSASLPDFMTTGITHLIFKNGSTTAPSNYRPITCLPSIYKLLTSILRVKISRHIELNSIISDFQNGCGSDCRGTKELLLIDMTIGQQVRRNRKDLSTCWIDYRKAFDSVPHTWLLRVLELYKINNTLRTFLKSCMGQWKTVLSYPTCQQRRGTGEPISIRRGIFQGDSLSPLWFCLALNPLSTLLERSGLGYKLRRGGQVISHLLYMDDLKLFAPGTQLVELLKVTETFSNSIKMEFGVDKCAVMHVKRGRIVQSQSVLSDTFHLRPLLVTDTYRYLGMSQSLNITDADMKQALQERFFGRLKKVFNSLLSGGNKVRACNAWAMPILMYSFGILKWTQTELDTIDRRVRTLMTTYRMHHPRSSVMRLYIPRKCGGRGFLNAKSLHNREVCNLRNYFLRMTKVVHRDVVAVDSGLTPLRLAKENWCSPIVLSTNDRKDVWQSKELHGRFYRALNGPEVDSLASVAWLRFGNLFGETEGFVCAIADEVIMTKNYQKYILRDGTADICRACHRPGESLRHIVSGCSSLSNGEYLHRHNQVARIIHQQLALRYKLVNVEMPYYRYVPEAVLENSHVTLYWDRSIITDRTVVANKPDIVVIDRLERRAMIVDVTVPHDENLVKAEKDKQVKYLDLAHEIVDMWDVDSAIIVPIVVSVNGLMAKSLDQHLSRLALGGWVKSQMQKAVLLDTARIVRRFLSLDP

SEQ ID NO: 28002 - protein, 999 aa, Lymantria monacha
MTTSAGIQYNEEVSQVLECAIREYRSMPLNLRPRLPRLPINRRNLAALSDINRLITTYLNSSENISDTHSILYCAAIATCRLAGAPLLEINPVIQQKPTVPMWQRRIERRINEARKQIGKLICFRSGNNRPRVMRFVHQAFLGTNIDPQNYMSQITERIDYLKQKVYGWASRIRRFKKRMDRYTLNRTFEKDQKWVYRSWERSEHSLSGRKLPDIDETVAFWRNIWSVAVTHTEADWIRDVKQACENMSQMDAVSITPQDVADALRPLSNWKSPGLDGLHNFWLKRLYSSHVCLSSQFQSAINSASLPDFMTTGITHLIFKNGSTTAPSNYRPITCLPSIYKLLTSILRVKISRHIELNSIISDFQNGCGSGCRGTKELLLIDMTIGQQVRRNRKDLSTCWIDYRKAFDSVPHTWLLRVLELYKINNTLRTFLKSCMGQWKTVLSYPTCQQRRGTGEPISIRRGIFQGDSLSPLWFCLALNPLSTLLERSGLGYKLRRGGQVISHLLYMDDLKLFAPGTQLVELLKVTETFSNSIKMGFGVDKCAVMHVKRGRIVQSQSVLSDTFHLRPLLVTDTYRYLGMSQSLNITDADMKQALQERFFGRLKKVFNSLLSGGNKVRACNAWAMPILMYSFGILKWTQTELDTIDRRVRTLMTTYRMHHPRSSVMRLYIPRKCGGRGFLNTKSLHNREVCNLRNYFLRMTKVVHRDVVAVDSGLTPLRLAKENWCSPIVLSTNDRKDVWQSKELHGRFYRALNGPEVDSLASVAWLRFGNLFGETEGFVCAIADEVIMTKNYRKYILRDGTADICRACHRPGESLRHIVSGCSSLSNGEYLHRHNQVARIIHQQLALRYKLVNVEMPYYRYVPEAVLENSHVTLYWDRSIITDRTVVANKPDIVVIDRLERRAMIVDVTVPHDENLVKAEKDKQVKYLNLAHEIVDMWDVDSAIIVPIVVSVNGLMAKNLDQHLSRLALGGWVKSQMQKAVLLDTARIVRRFLSLDP

SEQ ID NO: 28003 - protein, 978 aa, Lymantria monacha
MKWTEETNKNVMRAYFGATEGGANLTAYRSRMLVLFQALEPTINVTTQRLSDQVRAIQRCQLLDVTVLDMLRSDYLQSMPACPTPVVATPLSPIISASANTDNIDLDNGVTTSAGIQYNEVVSQVLECAIREYRSMPPNLRPRLPRLPIYRRNLAALSDINRLITTYLNSSENISDTYSILYCAAIATCRLAGAPLLEINPVIQQKPTVQMWQRRIERRINEARKQIGKLICFRSGNNRPRVMRFVHQAFLGTNIDPQNYMSQITERINYLKQKVYAWASRIRRFKKRMDRYTLNRTFEKDQKWVYRSWERSEHSLSGSKLPDIDETVAFWRNIWSVAVTHTEADWIRDVKQACENMSQMDTVTITPQDVADALRPLSNWKSPGLDGLHNFWLKRLYSSHVCLSSQFQSAINSASLPDFMTTGITHLTFKNGSTTAPSNYRPITCLPSIYKLLTSILRVKISRHIELNSIISDFQNGCGSGCRGTKELLLIDMTIGQQVRRNRKDLSTCWIDYRKAFDLVPHTWLLRVLELYKINNTLRTFLKSCMGQWKTILSYPTCQQRRGTGEPISIRRGIFQGDSLSPLWFCLALNPLSTLLERSGLGYKLRRGGQVISHLLYMDDLKLFAPGTQLVELLKVTETFSNSIKMEFGVDKCAVMHVKRGRIVQSQSVLSDTFHLRPLLVTDPYRYLGMSQSLNITDADMKQALQERFFGRLKKVFNSLLSGGNKVRACNAWAMPILMYSFGILKWTQTELDTIGRRVRTLMTTYRMHHPRSSVMRLYIPRKCGGRGFLNAKSLHNREVCNLRNYFLRMTKVVHHDVVAVDSELTPLRLAKENWCSPIVLSTNDRKDVWQSKDLHGRFYRALNGPEVDSLASVAWLRFGNLFGETEGFVCAIADEVIMTKNYRKYILIDGMADICRACHRPGESLRHIVSGCSSLSNGEYLHRHNQVARIIHQQLALRYKLVNVEVPYYRYVPEVVL

SEQ ID NO: 28004 - protein, 1086 aa, Sesamia nonagrioides
MRWTQSINENVMRSYYGATEGGNNLTAYRVRMLSLFQVLEPAVNVSAQRLSDQVRVIQRNHMLDDTVLDRLRNEMQSSRVIVHQSQTAEIPPQSTNYADEGSNDRATNVSTQCNEELINALEAAIREYRSTSAELRPRLPRLPMHNRNRALMAALDAQLSNYFDTCEDLTDTHSILYCAAVAACRVAHVKFPDDSRATRPKPVVPAWQHRIERRIGGARALIGKLICFREGNTRPRVMRFVRRAFAGTNISPQNYMARVTERIDFLKQKVYAWANRIRRYKRRVERYTQNRTFQNNERWVYRDWERPEQGVTDTCLPDDDVMCSFWRSIWSVPVSHTEGDWARNVERACDLIPEMGAITICPQDVACAVRPLPNWKSPGPDGLHNFWIKWFPRSHARLASQFQTALVSGSLPQFLTTGLTHLLHKSGSTAEPKNYRPITCLPTVYKVLTSILKTKINKHIDSNSIMSASQNGCRSGSRGTKELLLIDMAISQQVRRSRKDLSTCWIDYRKAYDSVPHTWLMRVLELYKVDATLRTFLMSCMRTWRTVLRYPGCRNIQRNSEPIRIERGIFQGDSLSPLWFCLALNPLSTLLEDSGLGYRLRRGGQVISHLLYMDDLKLFAPNNSQLRELLKITETFSSSIRMEFGVDKCAVMHVKRGEIMESVGTQLTGSINLRALSASETYKYLGMSEALGINVTDMKQSLKERFFFVRWVMPVLMYSFGILKWTQTELDALDQRVRTLLTANRLHHPRSSVMRLYIPRKCGGRGFLNAKTLHNREVCSLREYFLETDVGMHRDVVAADKGLTPLSLAKENWRKPVVLDTNDRLEVWKSKELHGRFFRALHGPDVDFQASVAWLRFGDLFGETEGFVFAIMDEVMMTNNYRRFIVKDGTVDICRACHRPGESIRHIISGCSRLANGEYLHRHNLVARIIHQQLALKYKLVESEVPYYRYMPDPVLENGHITLYWDRSIITDRTIVANKPDIVLVDRSERRAMIVDITIPHDENLVKAEKDKQIKYLDLAHEVVDMWEVDSAIIVPIVVTANGLIAKSLDQHLRRLSLGSWIKGLIQKAVLLDTARIVRKFLSLEP

SEQ ID NO: 28005 - protein, 857 aa, Sesamia nonagrioides
MHNRNRALMAALDAQLSDYFDTCEDLTDTHSILYCAAVAACRVAHVKFPSDSRATRPKPVVPAWQHRVERRIGGARALIGKLICFREGNTRPRVMRFVRRAFAGTNISPQNYMARVTERIDFLKQKVYAWANRIRRYKRRVERYTQNRTFQSNERWVYRDWERPEQGVTDTCLPDDDAMCSFWRSIWSVPVSHTEGDWARDVERACDPIPEMGAITICPQDVACAVRPLPNWKSPGPDGLHNFWIKWFPRSHARLASQFQTALVSGSLPQFLTTGITHLLHKSGSTAEPKNYRPITCLPTVYKVLTSILKTKINKHIDSNSIMSASQNGCKSGSRGTKELLLIDMAISQQVRRSRKDLSTCWIDYRKAYDSVPHTWLMRVLELYKVDATLRTFLMSCMKTWRTVLRYPGCRNIQRNSEPIRIERGIFQGDSLSPLWFCLALNPLSTLLEDSGLGYRLRRGGQVISHLLYMDDLKLFAPNNSQLRELLKITETFSSSIRMEFGVDKCAVMHVKRGEIMESVGTQLTDSINLRALSASETYKYLGMSEALGINVTDMKQSLKERFFGRLKKVLNSLLSGGNKVRAFNGWVMPVLMYSFGILKWTQTELDALDQRVRTLLTANRLHHPRSSVMRLYIPRKCGGRGFLNAKTLHNREVCSLRDYFLVNDVGMHRDVVAADKGLTPLSLAKENWRKLVVLDTNDRMEVWKSKELHGRFFRALHGPDVDLQASVAWLRFGDLFGETEGFVFAIMDEVMMTNNYRRFIVKDGTVDICRACHRSGESIRHIISGCSRLANGEYLHRHNLVARIIHQQLALKYNLVESEVPYYRYTPDPVLENAISHCTGIDPSSLTGLLLPISLI

SEQ ID NO: 28006 - protein, 1201 aa, Noctua janthe
MLTRSAARRARLSPPDPSLSSASPPPESRPVVSAVTPAVAVASSSSDEYFSPPTTPPPVLRRGGRRPPDGLGPRGPPASDRVPAPGGSVPRMRWTQSINANVMRAYYGATEGGNNLTAYRVRMLSLFQVLEPAVNVSAQRLSDQVRVIQRNGMLDDTVLDRLRSEMQSSHVIATPPQTVVPPQSTIIPTHDNNVSNDMVTNVSTQCNEEMRCALEGAIREYRFMQPDLRPRVPRLPMHNKNRVLVAVLDSQLSNYFDNCEDLTDAHSVLYCAAVAACRVAHVKFSDDRATRPKPAVPSWQYRIERCIGEARALIGKLICFREGNTRPRVMRFVRRAFSGTDISARDYMSRVTERIDFLKQKVYAWANRIRRYKRRVDRYTQNRTFQRDERWVYRAWERPDQGVADKRLPDDDAMCSFWRSIWSVPVNHTEGEWTREVERACDLVPEMGAITISPQDVVRAVRPLPNWKSPGPDGLHNFWIKWFTRSHARLAILFQSALESGSLPEFLTTGITHLLHKSGSTAEPKNYRPITCLPTVYKVLTSILRAKINKHIDDNSVMSASQNGCRNGSRGTKELLLIDMAISQQVRRSRRDLSTCWIDYKKAYDSVPHTWLMRVLELYKVDATLRTFLMPCMGQWRTVLRYPGCWQIQSNSEPIRIERGIFQGDSLSPLWFCLALNPLSTLLEDSGLGYRLRRGGQVISHLLYMDDLKLFAPNDLQLMELLKVTETFSSAIRMEFGVAKCAVMHVKRGEIVESVGTQLSDSINLRSLSATETYKYLGMSEALGINVADMKQSLKERFFGRLKKVFNSLLSGGNKVRAFNGWVMPVLMYSFGILKWTQTELDALDRRVRTLLTAYRMHHPRSSVMRLYIPRRCGGRGFLNAKTLHNREICSLREYFIETDVGMHRDVVAVDKGLTPLSLAKENWRKPVVLDTNDRMEVWQSKELHGRFFRALHGPDVDLPASVAWLRSGDLFGETEGFVCAIMDEVMMTNNYRRFIVKDGTVDICRACHRAGESIRHIISGCSRLANGEYLHRHNLVARIIHQQLTLKYNLVESEVPYYKYVPDPVLENGSITLYWDRSIITDRTIVANKPDIVVVVDWSERRAMIVDITVPYDENFVKAEKDKQIKYLDLAREVVDMWDVDSAIIVPIVVSAHGLIAKSLDQYLRRLSLGSWIKGLIQEAVLLDRLVLSGGSSLWSPDRR

SEQ ID NO: 28007 - protein, 1149 aa, Sesamia nonagrioides
MLTRSAARRARPPSPDSLLGSASPPPVSSATASAVTTPAAAVASSSSDEYFSPPTTPPPARRRGGRRPPDRLGPRGPSASDRVPAPGGSVQRMRWTQSINENVMRSYHGATEGGNNLTAYRVRMLSLFQVLEPAVNVSAQRLSDQVRVIQRNHMLNDVVLDRLRLESRNSHVTPASSLVAVQLNSVSPRPNYVDEEDDDRAISVSPQCKEKLRSALEDAFCEYRSIPPELRPRLPRLPMHKKNKALVCALDSQLSNYLKDSKDLNDTHSILYCGAVAICRVAHVKFPDSDRATRLKSAVPAWQCRIERRIGETRALIGKLISFREGNTRNRVMRFVRRAFSGTDTSTRDYLFRVTERIDFFKQKIYAWANRIRRYKRRVERYSQNRNFQSDERRVYRAWERSDQGVTDTYLPDDDATCSFWRNIWSVPVSHTEGSWTRVVERACDPVPEMGAITICPRDVAHAVRPLPNWKSPGPDGLHNFWIKWFTRSHARLASQFQTALESGSLPQFLTTGVTHLLHKSGSTAEPKNYRPITCLPTVYKVLTSILKSKINTHIDSNSIMSASQNGCRSGSRGTKELPLIDMAISQQVRRSRKDLSTCWIDYKKAYDSVPHTWLMRVLELYKVDATLRTFLLTCMRTWRTVLRYPGCRNIQRNSEPIRIERGIFQGDSLSPLWFCLALNPLSTLLEDSGLGYRLRRGGQVISHLLYMDDLKLFAHTDSQLKELLKITETFSSSIRMEFGVDKCAVMHVKRGEIMESVGTQLTSSINLRALSASETYKYLGMSEALGINVTDMKQSLKERFFGRLKKVLNSLLSGGNKVRAFNGWVMPVLMYSFGILKWTQTELDALDRRVRTLLTANRLHHPRSSVMRLYIPRKCGGRGFLNAKTLHNREICSLREYFLTTDVGMHRDVVAVDKGLTPLSLAKENWRKPVVLDTNDRMEVWKSKELHGRFFTALHGPDVDLQASVAWLRFGDLFGETEGFVCAIMDEVMMTNNYRRFIVKDGTVDICRACHRPGKSIRHIISGCSRLANGEYLHRHNLVARIIHQQLALKYNLVESEVPYYRYTPDPVLENDHITLYWDRSIMTIVANKPDIVLVDRSERRAMIVDITIPHDENLVKAEKDKQIKYLDLAHEVVDMWEVDSAIIVPIS

SEQ ID NO: 28008 - protein, 1194 aa, Sesamia nonagrioides
MLTRSAARRARPPSPDSLLSSASPPPASSATVSAVTTPAAAVASSSSDEYFSPPTTPPPARRRGGRRPPDRLGPRGPSASDRVPAPGGSVQRMRWTQSINENVMRSYYGATEGGNNLTAYRVRMLSLFQVLEPAVNVSAQRLSDQVRVIQRNHMLDDTVLDRLRNEMQSSRIIAHQSQTAEIPPQPTNYADEGSNDRATNVSTQCNEELINALEAAIREYRFTPAELRPRLPRLPMHNRNRALMAALDAQLSDYFDTCEDLTDTHSILYCAAVAACRVAHVKFPSDSRATRPKPVVPAWQHRIERRIGGARALIGKLICFREGNTRPRVMRFVRRAFAGTNISPQNYMARVTERIDFLKQKVYAWANRIRRYKRRVERYTQNRTFQSNERWVYRDWERPEQGVTDTCLPDDDAMCSFWRSIWSVPVSHTEGDWARDVERACDPIPEMGAITICPQDVACAVRPLPNWKSPGPDGLHNFWIKWFPRSHARLASQFQTALVSGSLPQFLTTGITHLLHKSGSTAEPKNYRPITCLPTVYKVLTSILKTKINKHIDNNSIMSASQNGCKSGSRGTKELLLIDMAISQQVRRSRKDLSTCWLLLLVSVPHTWLMRVLELYKVDATLRTFLMSCMKTWRTVLRYPGCRNIQRNSEPIRIERGIFQGDSLSPLWFCLALNPLSTLLEDSGLGYRLRRGGQVISHLLYMDDLKLFAPNNSQLRELLKITETFSSSIRMEFGVDKCAVMHVKRGEIMESVGTQLTDSINLRALSASETYKYLGMSEALGINVTDMKQSLKERFFGRLKKVLNSLLSGGNKVRAFNGWVMPVLMYSFGILKWTQTELDALDQRVRTLLTANRLHHPRSSVMRLYISRKCGGRGFLNAKTLHNREVCSLRDYFLVTDVGMHRDVVAADKGLTPLSLAKENWRKPVVLDTNDRMEVWKSKELHGRFFRALHGPDVDSQASVAWLRFGDLFGETEGFVFAIMDEVMMTNNYRRFIVKDGTVDICRACHRPGESIRHIISGCSRLANGEYLHRHNLVARIIHQQLALKYNLVESEVPYYRYTPDPVLENGYITLYWDRSIITDRTIVANKPDIVMVDRSERRAMIVDITIPHDENLVKAEKDKQIKYLDLAHEVVDMWEVDSAIIVPIVVTANGLIAKSLDQHLRRLSLGSWIKGLIQKAVLLDTARIVRKFLSLEP

SEQ ID NO: 28009 - protein, 1119 aa, Sesamia nonagrioides
MLTRSAARRARPPSPDSSLSSASPPPVSSPTVNAVMTPAAVVASSSSDEYFSPPTTPPPARRRGGRRPPDRLGPRGPSASDRVPAPGGSVQRMRWTQSINENVMRSYYGATEGGNNLTAYRVRMLSLFQVLEPAVNVSAQRLSDQVRVIQRNHMLDDVVLDRLRLESRNSHVTPASSLVAVQLNSVSPRPNHIDEEDDDRAISVSPQCNEKLRSALEDAFREYRSIPPELRPRLPRLPMHKKNKALVCALDSQLSNYLKDSKDLNDTHSILYCGAVAICRVAHVKFPDNDRATRPKSAVPAWQCRIERRIGETRALIGKLVSFREGNTRPRVMRFVRRAFSGTDTSTRDYLFRVTERIDFFKQKIYAWANRIRRYRRRVERYSQNRNFQSDERRVYRAWERSDQGVTDTCLPDDDATCSFWRNIWSVPVSHTEGSWTRVVERACDPVPEMGAITICPQDVARAVRPLPNWKSPGPDGLHNFWIKWFSGSHARLASQFQTALESGSLPQFLTTGVTHLLHKSGSTAEPRNYRPITCLPTVYKVLTSILKSKINTHIDSNSIMSASQNGCRSGSRGTKELLLIDMAISQQVRRSRKDLSTCWIDYKKAYDSVPHTWLMRVLELYKVDATLRTFLMTCMRTWRTVLRYPGCRNIQRNSEPIRIERGIFQGDSLSPLWFCLALNPLSTLLEDSGLGYRLRRGGQVISHLLYMDDLKLFAHTDSQLKELLKITETFSSSIRMEFGVDKCAVMHVKRGEIMESVGTQLTSSINLRALSASETYKYLGMSEALGINVTDMKQSLKERFFGRLKKVLNSLLSGGNKVRAFNGWVMPVLMYSFGILKWTQTELDALDRRVRTLLTANRLHHPRSSVMRLYIPRKCGGRGFLNAKTLHNREICSLREHFLTTDVGMHRDVVAVDKGLTALSLAKENWRKPVVLDTNDRMEVWKSKELHGRFFKALHGPDVDLQASVAWLRFGDLFGDTEGFVCAITDEVMMTNNYRRFIVKDGTVDICRACHRPGESIRHIISGCSRLANGEYLHRHNLVARIIHQQLALKYNLVESEVPYYRYTPDPVLENDHITLYWDRSIITDRTIIANKPDIVLVDRSERRAMIVDITIHMMRTS

SEQ ID NO: 28010 - protein, 1025 aa, Sesamia nonagrioides
MLSVSTALFRLNLDHVCLDCPCIKKNKALVCALDSQLSNYLKDSKDLNDTHSILYCGAVAICRVAHVKFPDNDRATRPKSAVPAWQCRIERRIGETRALIGKLVSFREGNTRPRVMRFVRRAFSGTDTSTRDYLFRVTERIDFFKQKIYAWANRIRRYRRRVERYSQNRNFQSDERRVYRAWERSDQGVTDTCLPDDDATCSLWRNIWSVPVSHTEGSWTRVVERACDPVPEMGAITICPQDVARAVRPLPNWKSPGPDGLHNFWIKWFSGSHARLASQFQTALESGSLPQFLTTGVTHLLHKSGSTAEPRNYRPITCLPTVYKVLTSILKSKINTHIDSNSIMSASQNGCRSGSRGTKELLLIDMAISQQVRRSRKDLSTCWIDYKKAYDSVPHTWLMRVLELYKVDATLRTFLMTCMRTWRTVLRYPGCRNIQRNSEPIRIERGIFQGDSLSPLWFCLALNPLSTLLEDSGLGYRLRRGGQVISHLLYMDDLKLFAHTDSQLKELLKITETFSSSIRMEFGVDKCAVMHVKRGEIMESVGTQLTSSINLRALSASETYKYLGMSEALGINVTDMKQSLKERFFGRLKKVLNSLLSGGNKVRAFNGWVMPVLMYSFGILKWTQTELDALDRRVRTLLTANRLHHPRSSVMRLYIPRKCGGRGFLNAKTLHNREICSLREYFLTTDVGMHRDVVAVDKGLTSLSLAKENWRKPVVLDTNDRMEVWKSKELHGRFFKALHGPDVDLQASVAWLRFGDLFGETEGFVCAITDEVMMTNNYRRFIVKDGTVDICRACHRPGESIRHIISGCSRLANGEYLHRHNLVARIIHQQLALKYNLVESEVPYYRYTPDPVLENDHITLYWDRSIITDRTIIANKPDIVLVDRSERRAMIVDITIPHDENLVKAEKDKQIKYLDLAHEVVDFYRYDVRHCTDSRDSQWLNSQEPRPTPQEALVRQLDQGLDSESGTAGHGSHRQEVPLSGALTAGSLDPVPDTGGLLFFIFLNVFYIYFCYVEIFKNIIYKCIY

SEQ ID NO: 28011 - protein, 1011 aa, Sesamia nonagrioides
MHKKNKALVCALDSQLSYYLKDSKDLTDTHSILYCGAVAICRVAHVKFPDSDRATRPKSAVPAWQCRIERRIVETRALIGKLTSFREGNTRPRVMRFVRRAFSGTDTSTRDYLSRVTERIDFFKQKIYAWANRIRRYKRRVERYSQNRNFQSDERRVYRAWEQSDQGVTDTCLPDDDATCSFWRNIWSVPVSHTEGSWTRVVERACDPVPEMGAITICPQDVARAVRPLPNWKSPGPDGLHNFWIKWFSRSHARLASQFQTALESGSLPQFLTTGVTHLLHKSGSTAEPKNYRPITCLPTVYKVLTSILKSKINTHIDSNSIMSASQNGCRSGSCGTKELLLIDMAISQQVRRYRKDVSTCWIDYKKAYDSVPHTWLMRVLELYKVDATLRTFLMTCMRTWRTVLRYPGCRNIQRNSEPIRIERGIFQGESLSPLWFCLALNPLSTLLEDSGLGYRLRRGGQVISHLLYMDDLKLFAHTDSPLKELLKITETFSSSIRMEFGVDKCAVMHVKRGEIMESMGTQLTSSINLRALSASETYKYLGMSEALGINVTDMKQSLKERFFGRLKKVFNSLLSGGNKVRAFNGWVMPVLMYSFGILKWTQTELDALDQRVRTLLAANRLHHPRSSVMRLYIPRKCGGRGFLNAKTLHNREVCSLREYFLETDVGMHRDVVAADKGLTPLSLAKENWRKPVVLDTNDRLEVWKSKELHGRFFRALHGPDIDFQASVAWLRFGDLFGETEGFVFAIMDEVMMTNNYRRFIVKDGTVDICRACHRPGESIRHIISGCSRLANGEYLHRHNLVARIIHQQLALKYNLVESEVPYYRYMPDPVLEHGHITLYWDRSIITDRTIVANKPDIVLVDRSERRAMIVDITIPHDENLVKAEKDKQIKYLDLAHEVVDMWGSRGCRHVGGGFSNHCTDSRDSQWLNSQEPRPTPQEALVRQLDQGLDSESGTAGHGSHRQEVPLSGALTAGSLDPVPDTGGLLFCIFLNVFMCLYKYLKISIICMLNK

SEQ ID NO: 28012 - protein, 1193 aa, Sesamia nonagrioides
MLTRSAARRARPPSPDSLLGSASSPPVSSATASAVTTPAAAVASSSSDEYFSPPTTPPPARRRGGRRPPDRLGPRGPSASDRVPAPGGSVQRMRWTQSINENVMRSYYGATEGGNNLTAYRVRMLSLFQVLEPAVNVSAQRLSDQVRVIQRNHMLDDTVLDRLRNEMQSSRIIAHQSQTAEIPPQPTNYADEGSNDRATNVSTQCNEELINALEAAIREYRFTPAELRPRLPRLPMHNRNRALMAALDAQLSDYFDTCEDLTDTHSILYCAAVAACRVAHVKFPSDSRATRPKPVVPAWQHRIERRIGGARALIGKLICFREGNTRPRVMRFVRRAFAGTNISPQNYMARVTERIDFLKQKVYAWANRIRRYKRRVERYTQNRTFQSNERWVYRDWERPEQGVTDTCLPDDDAMCSFWRSIWSVPVSHTEGDWARDVERACDPIPEMGAITICPQDVACAVRPLPNWKSPGPDGLHNFWIKWFPRSHARLASQFQTALVSGSLPQFLTTGITHLLHKSGSTAEPKNYRPITCLPTVYKVLTSILKTKINKHIDSNSIMSASQNGCKSGSRGTKELLLIDMAISQQVRRSRKDLSTCRIDYRKAYDSVPHTWLMRVLELYKVDATLRTFLRTWKTVLRYPGCRNIQRNSEPIRIERGIFQGDSLSPLWFCLALNPLSTLLEDSGLGYRLRRGGQVISHLLYMDDLKLFAPNNSQLRELLKITETFSSSIRMEFGVDKCAVMHVKRGEIMESVGTQLTDSINLRALSASETYKYLGMSEALGINVTDMKQSLKERFFGRLKKVLNSLLSGGNKVRAFNGWVMPVLMYSFGILKWTQTELDALDQRVCTLLTANRLHHPRSSVMRLYNPRKCGGRGFLNAKTLHNREVCSLRDYFLVTDVGMHRDVVAADKGLTPLSLAKENWRKPVVLDTNDRMEVWKSKELHGRFFRALHGPDVDLQASVAWLRFGDLFGETEGFVCAIMDEVMMTNNYRRFIVKDGTVDICRACHRPGESIRHIISGCSRLANGEYLHRHNLVARIIHQQLALKYNLVESEVPYYRYTPDPVLENGYITLYWDRSIITDRTIVANKPDIVMVDRSERRAMIVDITIPHDENLVKAEKDKQIKYLDLAHEVVDMWEVDSAIIVPIVVTANGLIAKSLDQHLRRLSLGSWIKGLIQKAVLLDTARIVRKFLSLEP

SEQ ID NO: 28013 - protein, 1205 aa, Amphipyra tragopoginis
MITRSQVRLQRTRPPSSASSLSSASQPPESSPTVSAVTPAAAVASSSSDEYFSPPTSPPPTRRRGGRRPPDRLGLRGPLASDRVPAPGGSVSRMRWTQTINENAMRAYFGATEGGTNLTAYRSRMLSLFQVLEPTVNVSAQRLSDQVRAIQRGHMLDDTVLDRLRSEIQCSPVISSSSQAPGLISRNISVVSPRCQHADEEDDDRATTVSIQCNEQLRRALEDAMREYRSTRPELRPRLPRLPMHKKNRALMCALDSLLSNYLDGSEDLGDTHSILYCAAVAACRVAHVKFINNERATRPKNAVPAWQCRIERRIAEARALIGKLICFREGNTRPRVMRFVRRAFSGTDVSPREYISRVTERIDFLKQKVYAWANRIRRYRRRVDRYNQNRMFRSDERWVYRTWERPDQSVGAAHLPDDDATNSFWRNIWSVPVTHTEGDWMRDVERMCEPILDMGAILISPQDVAGAVRPLPNWKSPGPDGLHNFWLKWLRSSHARLASQFQSSLETGTLPQFLTTGVTHLLHKSGSTAEPKNYRPITCLPTVYKVLTSILRTKINNHIDNNSIMSASQNGCRNGSRGTKELLLIDMAISQQVRRSRKDLSTCWIDYKKAFDSVPHTWLMRVLELHKVNTTLRTFLTSCMGQWRTVLHYPGCRQIQGIGEPIRIERGIFQGDSLSPLWFCLALNPLSTLLEGSGLGYRLRRGGQVISHILYMDDLKLFAPNNLQLLELLKVTETFSNSIRMEFGVDKCAVMHVKRGRIMESVRTQLSDSIHLRSLSSTETYKYLGMSEALGINETDMKQSLRERFYGRLKKVLNSLLSGGNKVRAFNGWVMPVLMYSFGILKWTQTELDTLDRRVRTLLTANRMHHPRSSVMRLYIPRKCGGRGFLNAKTLHNREVCSLREYFSQTEVGMHRDVVAVDKGLTPLSLAKENWRKPVVLDTNGRKDVWRSKELHGRFYRALHGPDVDFLASVAWLRFGDLFGETEGFVCAIMDEVMMTNNYRKYIVKDGTVDICRACHCPGESIRHIISGCSRLANGEYLHRHNLVARIIHQQLALKYNLVDAEVPYYKYVPDPVLENGHVTLYWDRSIITDRTIVANKPDIVVIDRSERLTMIVDITVPHDENLVKAEKDKEIKYQDLAHEVVAMWDVDSAVIVPIVVTANGLIAKSLDQHLKRLSLGGWIRGLIQKAVLLDTARIVRRFLSLRP

SEQ ID NO: 28014 - protein, 1076 aa, Acronicta aceris
MLSLFQALEPTIDVSTQRLSDQVRVIQRNHMLDDSVLDQLRSEVQSSRAIAHPSQSVAPSATLPQTNLAEVGSDDRVTNVSTQYNEKLRSALEGAFREYRSSPPELRPRLPRLPMNNKNLALVCALDSLLSDYFDSSEDLADTHSILYCAAVAACRVAHVKFPESDRATRPKPMIPAWQSRIEQRIGEARALIGKLICFREGNTRPRVMRFVRRAFSGTNIDPRDYASCVTERIDFLKQKVYAWANRIRRYKRRAERYSLNRTFQGDQRWVYRTWDRPDNGVSDVCRPNDDAMSSFWRNIWSVPVNHTEDDWICDVERACESLPAMDEINISPQDVACAVHSVPNWKAPGPDGLHNFWIKWLRSSHARLASQFQSSLESGTLPQFLTTGITHLLHKSGDTADPKNYRPITCLPTVYKLLTSILRTKICYHIDESSIMSASQNGCRNGSRGTKELLLIDMTISQQVRRLRKNLSTCWIDYKKAYDSVPHTWLMRVLELYKVDVSLRTFLRSCMGQWRTVLHYPGCRQIQRISEPIRIERGIFQGDSLSPLWFCLALNPLSTLLEESRLGYRLRRGGQVISHLLYMDDLKLFASSDLHLMELLKITENFSNSIRMEFGVEKCAVMHVKRGGIVESVGIQLSDSTQLRSLASTETYKYLGMAEALGINVADMKQSLQVRFFGRLTKVLKSLLSGGNKVRAFNGWVMPVLMYSFGVLKWTQTELETLDRKVRTLLTAYRMHHPRSSVMRLYIPRKCGGRGFLNAKNLHNREVCSLREHFLKTEMGMHRDVVAVDNGLTPLSMAKENWRKPVVLSTNDRRNVWQGKELHGRYYRALHEPGVDTLASVSWLRFGDLFGETEGFVCAIMDEVMMTNNYRKFIVKDGTVDICRACHRPGESIRHIISGCSRLANGEYLHRHNLVARIIHQQLALKYNLVESEVPYYKYVPDPVLENGHATLYWDRSIITDRTIIANKPDIVVIDRLERRAMIVDITVPHDENLFKAEKEKEIKYLDLAHEVVDMWGVDAAIIVPIVVSANGLIAKSLDRHLKRLSLGGWIKGLIQKVVLLDTARIVRRFLSLGP

SEQ ID NO: 28015 - protein, 1238 aa, Amphipyra tragopoginis
MLTRSRAKALITQPPPSASSLSSASQPPEPASIVSDVTPAAAVASSSSDEYFSPPTSPPPRRRGRGRPPASLGPRGPPASDRVPAAGGSVQRMRWTQSMNENCMRAYFGATEGGTNLTAYRGRMLSLFQALEPAVNVSAQRLSDQVRVIQRDHRLDDAALDRLRSEMQSGHVVHLQSQTAVQSQVTPVVAPRSIPTDEESDDRATNVSTQSNEQLRSALELAIREYRSTLPDLRPRLPRLPMNNKNKALMCALDSLLSSYFDGSEDLADTHSILYCAAVAACRVAHVKVDNNDRATRPKPAVPEWQCRIERRIGEARALIGKLICFREGNTRPRVMRFVRRAFSGTDTCPRDYMSRVAERIDFLKQKVYAWANRIRRYRRRVERYTQNRMFQRDQRWVYRAWERPDQGVRDEHLPDDDAMNSFWRSIWSVPVSHTEGDWMRDVERVCEPILDMGAISISPQDVASAVRPLPNWKSHGPDGLHNFWLKWLRSSHARLAFQFQSSLETGTLPQFLTTGVTHLLHKSGSTAEPKNYRPITCLPTVYKLLTSILRCKISSHIENNSIMSASQNGCRNGSRGTKELLLIDMAISQQVRRSRKDLSTCWIDYKKAYDSVPHTWLMRVLELYKVNTTLCTFLTSCMGQWRTVLHYPGCRQIQGIGEPIRIERGIFQGDSLSPLWFCLALNPLSTLLEGSGLGYRLRRGGQVISHLLYMDDLKLFAPNNLQLLDLLKVTETFSNSIRMEFGVDKCAVMHVKRGRIMESVETQLSDSIQLRSLSSTETYKYLGMSEALGINEADMKQSLRERFYGRLKKVLKSLLSGGNKVRAFNGWVMPVLMYPFGILKWTQTELDALDRRVRTLLTAYRMHHPRSSVMRLYIPRKCGGRGFLNAKTLCNREVCSLREYFSQADVGMHRDVVAVDKGLTPLSLAKENWRKPAVLDTNGRKDVWRSKELHGRFYRALHGPDVDFLASVAWLRFGDLFGETEGFVCAIMDEVMMTNNYRKYVVKDGTVDICRACHCPGESIRHIVSGCSRLANGEYLHRHNLVARIIHQQLALKYNLVDAEVPYYRYVPDPVLENGHITLYWDRSIITDRTIVANKPDIVVIDRSERRAMIVDITVPHDENLVKAENDKKIKYLDLAHEVVDMWEIDSAVIVPIVVTANGLIAKSLDQHLMRLSLGSWIKGLIQKAVLLDTARIVRKFLSLWSPDRRQLGPCSRCRWATIFYIFKCFFFYFLLKYLKM

SEQ ID NO: 28016 - protein, 865 aa, Ochropleura plecta
MRFVRRAFAETDISPSDYMSRITERIDFLKQKVYAWANRIRRYKRRVERYTLNRTFQSDERWVYRAWERPDQDVSDMRLPDDDAMCSFWRSIWSVPVSHTEGEWTREVERACDPIPEMGAITISPQDVACAVRPLPNWKSPGPDGLHNFWLKWIQRSHARLATLFQTALESGSLPKFLTTGITHLLHKSGSTAEPKNYRPITCLPTIYKVLTSILRAKITKHIDDNSIMSASQNGCRNGSRGTKELLLIDMAISQQVRRSRRDLSTCWIDYKKAYDSVPHTWLMKVLELYKVDATLRTFLSLCMRQWNTVLRYPGCRQIQRNSEPIRIQRGIFQGDSLSPLWFCLALNPLSTLLEDSGLGYRLRRGGQVISHLLYKDDLKLFAPNDLQLLKVTETFSSAISMEFGVDKCAVMHVKRGEIVESVGTQLSDSIHLRSLSANETYKYLGMSEALGINVADMKHSLKERFFGRLRKVFNSLLSGGNKVRAFNGWVMPVLMYSFGILKWTQTELDALDRKVRTLLTTYRMHHPRSSVMRLYIPRSCGGRGFLNAKTLHNREICSLREYFLEIDVGMHRDVVTVDKGFTPLSLAKENWHKPVVLDTNDRKEVWQSKELHGRFFRALHGPDVDQSASVAWLRSGDLFGETEGFVCAIMDEVMMTNNYRRFIVKDGTVDICRACHRPGESIRHIISGCSRLANGEYLHRHNLVARIIHQQLALKYSLVESEVPYYRYEPDPVLENGYITLYWDRSIITDRTVVANKPDIVVVDRSERRAMIIDITVPHDENLVKAEKDKQIKYIDLAREVVDMWDVDSAIIVPIVVSANGLIAKSLDQYLRRLSLGSWIKGLIQKAVLLDTARIVRRFLSLEP

SEQ ID NO: 28017 - protein, 926 aa, Mesoligia furuncula
MHKKNKVLVCALDSQLSNYFNDSKDLTDTHSILYCAAVAACRIAHVQFHNNDRAPRPKPAVPAWQCRIECRIGEARALIGKLICFREGNTRPRVMRFVRRAFSGTDISSRDYLPRVTERIDFLKQKICAWANRIRRYRRRVERYTQNRTFQSDERWVYTARERPDHCVTDTRLTDDDAMCSFWRNIWSVPVSHTEGDWTGKIERTCDLIPEMGVLTISPQDVARAVRPLPNWKSPGPDGLQNFWIKWFQGSHARLASQFQSALESGSLPQFLTTGITHLLHKSGSTADSKNYRPITCLPTFYTVLTSILRAKINKHIDTNSIMSVSQNGCKNGSRGTKELLLIDMIISQQVRRFRKDLSTCWIDYKKAYDSVPHTWLMRVLELYKIDTTLRTFLMSCMGQWRTVLRYPRCRIIQRNSEPIRIERGIFQGDSLSPLCFCLALNPLSTLLEDSGLGYRLRRGGQVISHLLYKDDLKLFAPNNLQLMELLKITETFSSAIRMEFGVDKCAVMHVKRGEIVESVGTQLSDSTNLRALKKVFNSLLSGGNKVRAFNSWVMPVLMYSFGILKWTQTELDALDRKVRTLLTANRMHHPRSSVMRLYIPRKCGGRGFLNAKTLHNREICSLREYFLETDVGMHRDVVAVDKVLTPLSLGKENWRKPVVLDTNDRMEVWQSKELHGRFFRALHGPDVDLLASVAWLRFGDLFGETEGFVCAIMDKVMMTNNYRRFIVKDGAVDICRACHQPGESIRHIISGCSRLANGEYLHRHNLVARIIHQQLALKYSLVPEVPYYRYVPDPVLENGNITLYWDRSIITDRTIVANKPDIVVVDRSERRAMIVDITVPHDENLVKAEKDKQIKYLDLAREVVDMWDVDSAIIVPIIVTANGLIAKSLDQHLKRLSLGSWIKGLIQKAVLDTARIVRRFLSLEP

SEQ ID NO: 28018 - protein, 1027 aa, Vanessa cardui
MRRARATSTSPRRRRQHLYVERGDAGHQRAWEPEANRSRTGSPLPVVVCSACDGHNPLIKMSCAHIVCAHDITKGGTNLTAYRVRMLSLFQALEPAVNVSAQRLSDQVRVILRNNRLSDTVLDRIRSETCNSGVTSGPSTPVVEEPLPAIPQGPEYDDEGGGDMAITTSKYSDHLRSALGHAIREYRNTPAELRPRLPRLPMTKRNRDLVCTLDSLLADYFESSENLEDTHSILFCAAVAACRIAGVTFEDTERATRPKAAAPAWQSRIEKRINETRVLIGKLYCFKEGNTRPRVMRFVGRAFLGTGISPQEYPSHVVERIDFLKQKVYAWASRIRRYRRRVDRYHLNCKFQSDQRWVYRTWERLDQDVSDGCRPDDDATNIFWRNIWSVPVDHSEGDWMLEVRQACEPLEVMGKISIASEDVAAAVRSVSNWKSPGPDGLHSFWLKWLRSSHEYLASQFQSALESGSLPQFLTTGVTHLLHKSGSATDPKNYRPITCLPTVYKLLTAILRDKINNHIQNNSILSVSQNGCRGGSRGTKELLLIDMTISQQVRRSRKTLSTCWIDYKKAYDSVPHTWLLRVLELYKLDTTLCSFLRSCMEQWRTVLRNPGCRTIHGSDEPIRIERGIFQGDSLSPLWFCLALNPLSTLLESSWLGYRLRRGGKVISHLLYMDDLKLFAPSDSQLMELLKVTETFSNSIRMEFGVDKCAVMHVKRGEIMESEGLQLSDSINFKSLSANESSDMKQSLQERFFGRLKKVLKSILSGGNKVRAFNGWVMPVLMYSFGILKWTQKELDALDRRVRVLLTTYRMHHPRSSVMRLYIPRRYGGRGFLNAKTLHNREVYKLREYFLHTDLDMHRDVVIMDKGLTPLSLGKENWRKPVVLSTENRREVWKSKDLHGRFYQTLHGPDVDFMASVSWLRFGNLFGETEGFVCAIMDEVIMTNNYRKYIVRDGTVDICRACHTPGESLRHIISGCSRLANGEYLHRHNQVAKIIHQQLALRYGLVVSEVPYYRYVPDPVLENGHITLY

SEQ ID NO: 28019 - protein, 1078 aa, Amphipyra tragopoginis
MLTRARARQKDARPRSPDSSLCSASQPPESSPSVSAVTPAAAVASSSSDEYFSPPSSPPPVRRRGGARPPACLGPRSQPASNRVPAAGGNVSRMRWTQSINENVMRAYYGATERGINLVAYRDRMLSLFRVLEPAINVSTQRLSDQVRVIQRNRKLDDTVLERLRSEVQNNRAVTPPVQAAVQAQLPAVPPWPSQGDGEGDGVVIEVSSQCSDELRSALEGAILEYRATPPELRPRLPRLPMHKKNRALVCALDSLLSSYFDGSEDLADTHSILYCAAIAACRVALVKFTDNERATRPKPAVPAWQYRIERRIGGARALIGKLICFREGNTRPRVMRFVRRAFSGTDDPRDYMSRITERIDFLKQKVYAWANRIRRYKRRVERYTLNRTFQSDQRRVYRAWERPDTCGSDVRLPDDDAMSSFWRSIWSVPVAHTEGGWMRDIERACEPILEMGAIIISPQDVASAARPLPNWKSPGPDGLHNFWLKWLRSSHACLASQFQSSLESGSLPQFLTTGATHLLYKSGSTAEPKNYRPITCLPTVYKLLTSILRVKISYHIDNNSFLSPSQNGCRSGSRGTKELLLIDMAISQQVRRSRNVLSTCWIDYKKAYDSVPHTWLMRVLELYKINTTLRTFLMSCMRQWRTVLRYPGCREIRGRGEPIRIERGIFQGDSLSPLWFCLALNPLSTLLEGTRLGYRLRREGQVISHLLYMDDLKLFAPTDLRLMELLKVTENFSSSIRMEFGVDKCAVMHLKRGGIVESEGIQLSNSIQLRSLSPTETYKYLGMSEALGISEADMRQSLRERFFGRLNKVLRSLLSGGNKVRAFNGWVMPVLMYSFGKLKWTQTDLDAVDRRVRALLTVHRMHHPRSSVMRLYIPRKCGGRGFLNAKTLHNREVCSLREYFLQAEGDMHRDVVAVDKGLTPLALAKENWRKPAVLSTNDREEVWQSKELHGRFYRALHGPEVDFPASVSWLRFIDLFGETEGFVCAIMDEVMMTKNYRKYIVKDGTVDICRACHRPGESIRHIISGCSRLANGEYLHRHNLVARIIHQQLALKYNLVESEVPYYRYVPDPVLENGHVT

SEQ ID NO: 28020 - protein, 1200 aa, Mythimna ferrago
MLTRAAARRARPPPPASSLSSASPPPDPSPTVSAVTPAVAAASSSSDEYYSPPTTPPPARRRGGRRPPACFGPRGPPASDRVPATGGSVPRMRWTQSTNENVMRAYYGATEGGNNLTAYRVRMLSLFQVLEPAVNVSAQRLSDQVRVIQRNHMLDDTVLDRLRTEMSNHANAPSSQPVAPVMVPPSNHVANPADEESTGMVIQVSTQCTNELRSALECAIREYRNMPSVLRPRLPRLPMHNKNKALVAALDMQLSNYFDNCKDLTDTHSIMYCAAVAACRVAHVKFPNSDVATRPKPAVPAWQCRIERRIGEARALIGKLICFREGNTRPRVMRFVRRAFSGTDISPRDYMPRVTERIDFLKQKVYAWANRIRRYKRRVERYTQNRAFQSNERWVYRAWERPDQGVTDTRLPDDDAMCSFWRNIWSVPVSHTEGSWTGVVERACESITEMGAITISPQDVARAVRPLPNWKSPGPDGLHNFWIKWLQRSHARLASQYQAALESSSLPEFLTTGVTHLLHKSGSTAEPKNYRPITCLPTVYKVLTSILRDKINNHIDNNSIMSASQNGCRKGSRGTKELLLIDMAISQQVRRSRNDLSTCWIDYKKAYDSVPHTWLMRVLELYKVDATLRTFLMSCMRQWRTVLRYPGCRNIQRNSEPVRIERGIFQGDSLSPLWFCLALNPLSTLLENSGLGYRLKRGGQVISHLLYMDDLKLFAPNNLQLMELLKVTETFSSAIRMEFGVDKCAVMHIKRGEIVEFVGTQLSDSIHLRSLSPTETYKYLGMSEALGINATVMKQSLKERFFGRLKKVLNSLLSGGNKVRAFNGWVMPVLMYAFGVLKWTQTELDALDRRVRTLLTAYRMHHPRSSVMRLYIPRKCGGRGFLNAKTLHNREVCSLREYFLAADVGMHRDVVAVDKGLTPLSLANENWRKPVVLDTNVRKEVWQSKELHGRFFRALHGPDVDKLASVAWLRVGDLFGETEGFVCAIMDEVIMTNNYRRFIVKDGTVDICRACHRPGESIRHIISGCSRLANGEYLHRHNLVARIIHQQLALKYSLVESEVPYYRYVPDPVLDNGDITLYWDRSIITDRTIVANKPDIVVVDRSERRAMIVDISVPHDENLVKAEKDKQIKYIDLAREVVDMWEVDSAIIVPIVVSANGLIAKSLDQHLRRLSLGDWIKGLIQKAVLLDTARIVRRFLSLEP

SEQ ID NO: 28021 - protein, 1063 aa, Eilema depressum
MLTRSRTRNNANAPTTSPDSSLSSAAQPLASEPAASSSSSSDEFFSPPTSPPPVRRPGRGRPPASLEPRRPPASNRAPAAGGEVRRMRWTNSINENVMRAFYAATEGGTNLTAYRARMLPLFQVLEPTVNVSAQRLSDQVRAIQRCHLLDDSVLERLRSDSRSNPGASTSSQPLTQHEHFISQVNEESVSHVSEEVVDTGVTHVSTVCMDIIRSALECARREYRSMPFDYRPRLPRLPTHKKNIALVCALDSLLSDYFDNSEDLSDTHSILYCAAVAAFRVANVKFHRTILTTRPKSAVPAWQSRIERRIAETRALIGKLICFRSGNTRPRVMRFVTRAFSGTDIRPREFLSRVTERIDFLKQKIYAWANRIRRYKRRVDRYSQNRTFQRDERWVYRSWERPDSNGTDMHRPDDDATNTFWRSIWSTPVSHTEGDWMRVVERSCESIGTMEPVTISDDDVTNAVRLLPNWRSAGPDGLHNFWLKWFRSSHGRLAMQFQSCLESGSLPAFITTGVTHLLHKSGSTTDPKNYRPITCLPTVYKLLTSILREKISSHLIDNSIMSISQNGCRSGARGTKELLIIDMAICQQARRHRKDLATCWIDYKKAYDSVPHTWLLRVLELYKIDTTLCTFMKTCMGQWRTVLCYPGCRQICEDSGLIKIERGIFQGDSLSPLWFCLALNPLSTILDSSGLGCRLRRDGQVISHLLYMDDLKLFAPNNLHLIELLKSTETFSNSIRMDFGVDKCAVMHVKRGRIVESESVELSDSTKLRALSATDTYKYLGMSQALGISEAGMKQSLQERFFGRLKKVLKSLLSGGNKVRACNGWVMPVLMYSFGILRWTQTELEALDRKVRAHLTAYRMHHPRSSVMRLYIPRKCGGRGFLNAKTLHNREVCNLREYFLHNDADMHRDVVMVDNGLTPLGLAKENWRKPAVLSINDRKDVWKGKELHGRFYRALHGPEIDIPASLSWLRFGDLFGETEGFVFAIMDEVVMTNNYRRYIIKDGTVDICRACHRPGESLRHIISGCSRLANGEYLHRHNQVARIIHQQLALKYNLVESEVGTIL

SEQ ID NO: 28022 - protein, 916 aa, Lymantria dispar
MHRKNRCLVSTVDLLLTSYLNTSDSISDTHSILYCAAVAACCMAGLKFLKNESAIRQKEAKPAWQCRIESRICEARVLIGKLSCFRTGNTRPRVMRYMKRAFFGTNIKPEEYKARVTERIDFLKQKVYAWANRIRRYKKRVNRYSVNRMFESDQKSVYRNWERSCQAVDDERLPDAEATNTFWHSIWSVSVVHSEGDWMRDVKRACENIPQMENVIIDQQDVACAVRSLSNWKSPGPDGLHNFWLKWLPSAHSRLASHFQSALVTGTLPEFMTTGITHLLHKTGSTTEPSNYRPITCLPSVYKLLTSILRNKIAKHINLNSVMSISQNGCRNGGRGTKELLLIDMALSQQVRRNRKDLSTCLIDYKKAFDAVPHTWLLRVLELYKINSTLCTFLKVCMGQWKTVLRYPTCRLNRGSSEPIYIRRGIFQGDSLSPLWFCLAMNPLSTLLEHSGLGCRLRRGGQIISHLFYMDDLKLFAPNSTQLVELLKVTETFSNSISMVFGVDKCAIMHVKQGEVVEVDRGQLIDTPQFRPLRVTDTYKYLGMSQALNINEADMKQVLRERFFGRLKKVLNSLLSGGNKVRAYNAWVMPILRYSFSILKWTQTELDTLDRKVRTLLTSHRMHHPRSSIMRLYMPRKCGGRGFLNAKALHNREVCNLRDYFLKMTSGVHLDVMKVDSGLTPLGLAKENWRRPVVLSTIDRENVWQSKELHGRFYGALHAPEVDLSASVTWLRFGNLLGETEGFVCAIADEVIKTYNYRKYILRDGTADICRACHRPGESLRHVVSGCSRLANGEYLHRHNQVARIIHQQLALRYKLASVEVPYYKYVPEPVLENGQVTLYWNRSIITDRTIVANKPDIVVIDRLERRAMIVDVTIPHDGNLVKAEKDKQIKYQDLAHEIVDMWDVDTAIVVPIQEW

SEQ ID NO: 28023 - protein, 1202 aa, Griposia aprilina
MLTRSARTRARPPPPDSSLSSASPPPVSSPIVSAVTTPVAVVASSSSDEYFSPPTSPTPVRRQGRGRPPRSLGLRGHPAPSRVPAAGGCVQRMKWTQSMNENVMRAYYRSTEGGTNLTAYRDRMLSLFQELEPTINVSAQRLSDQVRVIQRSHRLDDAALDRLRSELNNHIISTPAQTAVQASTIDEIQPRSNHGVEVEDDRVASVSSQCNARLRSALEDAFREYRSTPTELRPRLPRLPMHKKNRALVCALDSQLKNVFESSENLIDTHSILYCAAVAACRLANVRFPNCDGATRPKPAVPAWQCRIKRRIDGARVLIGKLHCFREGNNRPRVMRFVRRAFSGTGISPREYMSHATERIDFLKQKVCAWASRIRRYKRRVDRYTQNRMFQSDERWVYRAWERPEQNVTDECRPDDATTSTFWRSIWSVPVCHVEADWMRDVGRACETVPEMDAVLITPLDVARAVRPLPNWKSPGPDGLHNFWLKWLISSHACLASQYQSSLESGSLPQFLTTGVTHLLHKSGSPTDPKNYRPITCLSTVYKLLTSILRAKINTHIESNSIMSASQNGCRNGSRGTKELLLIDMAISQQVRRSRRDLSTCWIDYKKAYDSVPHTWLMRVLELYKIDTTLRTFLRSCMGQWRTVLRYPGCRQIQANDEPVWIKRGIFQGDSLSPLWFCLALNPLSTLLEDSGLGYRLRKDGQVISHLLYMDDLKLFAPNKLQLMELLKVTETFSSTIRMEFGVDKCAVMHVKRGEVMKPEGIQLSDSIHLRSLSSSESYKYLGMSEALGINVADMKQSLRERFFGRLKKVLISLLSGGNKVRAFNGWVMPVLMYSFGILKWTQTELDALDRRVRTLLTANRMHHPRSSVMRLYIPRKCGGRGFLNAKTLHNREVCSLREYFLKAEVGMHRDVVAVDKGLTPLSMAKENWRKPVVLTTDDRKEVWQSKELHGRFYRALHEPGVDFLASVSWLRFGDLFGETEGFVCAIMDEVILTNNYRRHIMKDGTVDMCRACHRPGESIRHIVSGCSRLANGEYLHRHNQVARIIHQQLALKYKLVDSEVPYYKYVPDPVLENDHITLYWDRSIITDRTIVANKPDIVVIDRLARRTMIIDITIPHDENLVKAEKEKQIKYLDLAHEVVEMWNVSSAVIVPIVVSANGLMAKSLDQHLSRLSLDGWVKGLIQKAVLLDTARIVRRFLSLEP

SEQ ID NO: 28024 - protein, 1066 aa, Xestia c-nigrum
MITRAASRRRARLPSPDSSLSSASPPPDPGSPVSTVAAVASSSSDEYFSPPTSPTPVRRAGRGRPPRSLGLRGQQAPSRVPATGGCVQRMRWTQSMNENAMRAYYGSKNRALVCALDSQLKNVFESSEDLVDTHSILFCGAVAACRLANVKFPNCDLATRPKPAVPVWQRRIERRIDGARVLIGKLYCFREGNTRPRVMRFVRRAFSGTEISPQEYMSRVTERIDFLKQKVYAWASRIRRYKRRVDRYSQNRMFQCDERWVYRAWERPDQNVTDVCHPGDAATSSFWRSIWSVPVCHSEADWMRDVERVCEPIPEMAPVVITSLDIVRAVRPLPNWKSPGPDGLHNFWLKWLCSSHTCLASQFQSSLESGSLPQFLTTGVTHLLHKSGSPTEPQNYRPITCLSTVYKLLTSILRTKINTHIDNNSIMSASQNGCRNGSRGTKELLLIDMAISQQVRRSRKDLSTCWIDYKKAYDSVPHSWLMRVLELYKIDATLCTFLKSCMGQWRTVLRYPGCRQIQGSDESVWIKRGIFQGDSLSPLWFCLALNPLSTLLENSGLGYQLRKDGQVISHLLYMDDLKLFAPNKLRLMELLKVTETFSNAIRMEFGVDKCAVMYVKRGEIMESEGLQLSDSIHLRSLSSSESYKYLGMSEALGINVTDMKQSLRERFFGRLKKVLNSLLSGGNKVRAFNGWVMPVLMYSFGILKWTQTELDALDRRVRTLLTENRMHHPRSSVMRLYIPRKCGGRGFLNAKTLHNREVCSLREYFLKAEVGMHRDVVAVDKGLTPLSMAKENWRKPVILTTDDRKKEWQGKVLHGRFYRALHGPDVDFLASVSWLRFGDLFGETEGFVCAIMDEVMLTNNYRKYIMKDGTVDVCRACHCPGESIRHIISGCSRLANGEYLHRHNQEARIIHQQLALKFKLVESEVPYYKYVPDPVLVKDHITLYWDQSIITDRTIVANKPDIVVIDRSARRVMIIDVTIPHDENLVKAEKEKQIKYLDLAHEVRDMWNMNSVIIVPIVVTANGLIAKSLDEHLSRLSLGGWIKGLIQKAVLLDTARIVRRFLSLQP

SEQ ID NO: 28025 - protein, 1190 aa, Lymantria dispar
MITRSQTKAACIPPPGSSQSSASKQAASVSATEEASSSSSSDEYFSPPTSPRPAPRRGRGRPPFCLGPRGPPASHRAPASGGNVQRMRWTQSINENVMRAYFEATEGGIKLTAYRDRMLLLFQNLEPIINVTAQRLSDQVRAIQRCNLLDAAALDRLRSESIQISRVTPIPTPVSTIDVRQSAPPSAAEGDDMTDSMDTRYNEEVRKALECAIREYRFEPQEIRPRLPRLSMHRKNRLLVSTLDSFLIDYVNNSNSISDTHSILYCAAIAACRIAGLNFLKNESSMRHKEAGLAWQCRIECRISKARVLIGKLSSFRTGNTRPKVMRFVKRAFLGTGIKPEDYSARVTERIDFLKQKVYAWASRIRRYKKRVNRYSVNRMFESDQKSVYRNWERPCQDVDDGQPDTKATNSYWHSIWSMPVVHSEGDWMRDVKQACENIPQMKEVSINQQDVADAVRPLCNWKSPGLDGLHNFWLKWLRSGHARLASHFQSALVTGTLPEFMTTGITHLLHKAGSTTVPSNYRPITCLPSVYKLLTSILRNKISKHIQLNSVMSLSQNGCRNGGRGTKELLLIDTAISQQVRRLRKDLSICWIDYKKAFDSVPHTWLLRVLELYKINSTLCAFLKSCMGQWKTFLRYPACRLSRGGGEPIYIRRGIFQGDSLSPLWFCLALNPLSTLLVHSGLGCRLRRGGQIVFHLLYMDDLKLFAPTHIQMAELLKVTETFSNFIKMEFGVDKCAVMHVKRGEVVENHRSEIFNTPQFRPLCVTDTYKYLGMSQALNINETDMKRALRERFFGRLKKVLNSLLSGGNKVRAYNAWVMPILMYSFGILKWTQTELDTLDRKVRTLLTSHRLHHPRSSIMRLYIPRKCGGRGFLNAKTLHNREVCNLRDYFLKMTSGVHLDVVTIDNGLTPLGLAKENWRRPVVLSTIDRKNVWQSKELHGRYYGALNAPDVDTPVSVTWLRFGNLFGETEGFVCAIADEVIKTNNYRKYILRDGTADICHACHLPGESLRHIVSGCSRLANGEYLHRHNQVARIIHQQLALLQKLVSVEVPYYKYVPELVLENGRVTLYWDRYIITDRTIVANKPDIVVIDRLQRRAMIVDITVPHDGNLVKAEKDKQIKYQDLVHEIVDMWDVDSAIVVPIVISTNGLIAKSLNQHLKRLALGSWIAGLMQKAVLLNTARIMRKFLFL

SEQ ID NO: 28026 - protein, 1190 aa, Lymantria dispar
MITRSQTKAACIPPPGSSQSSASKQAASISATEEASSSSSSDEYFSPPTSPRPAPRRGRGRPPFCLGPRGPPASHRAPASGGNVQRMRWTQSINENVMRAYFEATEGGIKLTAYRDRMLLLFQNLEPVINVTAQRLSDQVRAIQRCNLLDAAALDRLRSESIQISRVTPIPTPVSTIDVRQSAPPSAAEGDDMTDSMDTRYNEEVRKALECAIREYRFEPQEIRPRLPRLPMHRKNRLLVGTLDSFLIDYVNNSNSISDTHSILYCAAIAACRIAGLNFLKNESTMRHKEAKPAWQCRIECRISKARVLIGKLSSFRTGNTRPKVMRFVKRAFLGTGIKPEDYSARVTERIDFLKQKIYAWASRIRRYKKRVNRYSVNRMFESDQKSVYRNWERPCQDVDDGQPDTKATNSYWHSIWSMPVVHSEGDWMRDVKQACENIPQMKEVSINQQDVADAVRPLSNWKSPGLDGLHNFWLKWLRSGHARLASHFQSALVTGTLPEFMTTGITHLLHKAGSTTVPSNYRPITCLPSVYKLLTSILRNKISKHIQLNSVMSLSQNGCRNGGRGTKELLLIDTAISQQVRRLRKDLSICWIDYKKAFDSVPHTWLLRVLELYKINSTLCAFLKSCMGQWKTFLRYPTCRLSRGGGEPIYIRRGIFQGDSLSPLWFCLALNPLSTLLGHSGLGCRLRRGGQIVSHLLYMDDLKLFAPTHIQMAELLKVTETFSNSIKMEFGVDKCAVMHVKRGEVVENHRSEIFNTPQFRPLHVTDTYKYLGMSQALNINETDMKRALRERFFGRLKKVLNSLLSGGNKVRAYNAWVMPILMYSFGILKWTQTELDTLDRKVRTLLTSHRMHHPRSSIMRLYIPRKCGGRGFLNAKTLHNREVCNLRDYFLKMTSGVHLDVVTIDNGLTPLGLAKENWRRPVVLSTIDRKNVWQSKELHGRYYGALNAPDVDTPASVTWLRFGNLFGETEGFVCAIADEVIKTNNYRKYILRDGTADICRACHLPGESLRHIVSGCSRLANGEYLHRHNQVARIIHQQLALLHKLVSVEVPYYKYVPEPVLENGRVTLYWDRSIITDRTIVANKPDIVVIDRLQRRAMIVDITVPHDGNLVKAEKDKQIKYQDLAHEIVDMWDVDSAIVVPIVISTNGLIAKSLNQHLKRLALGSWIAGLMQKAVLLNTARIVRKFLSL

SEQ ID NO: 28027 - protein, 1190 aa, Lymantria dispar
MITRSQTKAACIPPPGSAQSSASKQAASISATEEASSSSSSDEYFFPPTSPRPAPRRGRGRPPFCLGPRGPPASHRAPASGGNVQRMRWTQSINENVMRAYFEATEGGIKLTAYRDRMLLLFQNLEPIINVTAQRLSDQMRAIQRCNLLDAAALDRLRSESIQISRVTPIPTPVSTIDVRQSAPPSAAEGDDMTDSMDTRYNEEVRKALECAIREYRFEPQEIRPRLPRLPMHRKNRLLVGTLDSFLIDYVNNSNSISDTHSILYCAAIAACRIAGLNFLKNESAMRHKEAKPAWQCRIECRISKARVLIGKLSSFRTGNTRPKVMRFVKRAFLGTGIKPEDYSARVTERIDFLKQKIYAWASRIRRYKKRVNRYSVNRMFESDQKSVYRNWERPCQDVDDGQPDTKATNSYWHSIWSMPVVHSEGDWMRDVKQACENIPQMKEVSINQQDVADAVRPLSNWKSPGLDGLHNFWLKWLRSGHARLASHFQSALVTGTLPEFMTTGITHLLHKAGSTTGPSNYRPITCLPSVYKLLTSILRNKISKHIQLNSVMSLSQNGCRNGGRGTKELLLIDTAISQQVRRLRKDLSICWIDYKKAFDSVPHTWLLRVLELYKINSTLCAFLKSCMGQWKTFLRYPACRLSREGGEPIYIRRGIFQGDSLSPLWFCLALNPLSTLLGHSGLGCRLRRGGQIVSHLLYMDDLKLFAPTHIQMAELLKVTETFSNSIKMEFGVDKCAVMHVKRGEVVENHRSEIFNTPQFRPLHVTDTYKYLGMSQALNINETDMKRALRERFFGRLKKVLNSLLSGGNKVRVYNAWVMPILMYSFGILKWTQTELDTLDRKVRTLLTSHRMHHPRSSIMRLYIPRKCGGRGFLNAKTLHNREVCNLRDYFLKMTSGVHLDVVTIDNGLTPLGLAKENWRRPVVLSTIDRKNVWQSKELHGRYYGALNAPDVDTPASVTWLRFGNLFGETEGFVCAIADEVIKTNNYRKYILRDGTADICRACHLPGESLRHIVSGCSRLANGEYLHRHNQVARIIHQQLALLHKLVSVEVPYYKYVPEPVLENGRVTLYWDRSIITDRTIIANKPDIVVIDRLQRRAMIVDITVPHDGNLVKAEKDKQIKYQDLAHEIVDMWDVDSAIVVPIVISTNGLIAKSLNQHLKRLALGSWIAGLMQKAVLLNTARIVRKFLSL

SEQ ID NO: 28028 - protein, 1190 aa, Lymantria dispar
MITRSQTKAACIPPPGSSQSSASKQAASISATEEASSSSSSDEYFSPPTSPRPAPRRGRGRPPFCLGPRGPPASHRALASGGNVQRMRWTQSINENVMRAYFEATEGGIKLTAYRDRMLLLFQNLEPIINVTAQRLSDQVRAIQRCNLLDAAALDRLRSESIQISRVTPIPTPVSTIDVRQSAPPSAAEGDDMTDSMDTRYNEEVRKALECAIREYRFEPQEIRPRLPRLPMHRKNRLLVGTLDSFLIDYVNNSNSISDTHSILYCAAIAACRIAGLNFLKNESTMRHKEAKPAWQCRIECRISKARVLIGKLSSFRTGNTRPKVMRFVKRAFLGTGIKPEDYSARVTERIDFLKQKIYAWASRIRRYKKRVNRYSVNRMFESDQKSVYRNWERPCQDVDDGQPDTKATNSYWHSIWSMPVVHSEGDWMRDVKQACENIPQMKEVSINQQDVADAVRPLSNWKSPGLDGLHNFWLKWLRSGHARLASHFQSALVTGTLPEFMTTGITHLLHKAGSTTVPSNYRPITCLPSVYKLLTSILRNKISKHIQLNSVMSLSQNGCRNGGRGTKELLLIDTAISQQVRRLRKDLSICWIDYKKAFDSVPHTWLLRVLELYKINSTLCAFLKSCMGQWKTFLRYPACRLSRGGGEPIYIRRGIFQGDSLSPLWFCLALNPLSTLLGHSGLGCRLRRGGQIVSHLLYMDDLKLFAPTHIQMAELLKVTETFSNSIKMEFGVDKCAVMHVKRGEVVENHRSEIFNTPQFRPLHVTDTYKYLGMSQALNINETDMKRALRERFFGRLKKVLNSLLSGGNKVRAYNAWVMPILMYSFGILKWTQTELDTLDRKVRTLLTSHRMHHPRSSIMRLYIPRKCGGRGFLNAKTLHNREVCNLRDYFLKMTSGVHLDVVTIDNGLTPLGLAKENWRRPVVLSTIDRKNVWQSKELHGRYYGALNAPDVDTPASVTWLRFGNLFGETEGFVCAIADEVIKTNNYRKYILRDGTADICRACHLPGESLRHIVSGCSRLANGEYLHRHNQVARIIHQQLALLHKLVSVEVPYYKYVPEPVLENGRVTLYWDRSIITDRTIVANKPDIVVIDRLQRRAMIVDITVPHDGNLVKAEKDKQIKYQDLAHEIVDMWDVDSAIVVPIVISTNGLIAKSLNQHLKRLALGSWIAGLMQKAVLLNTARIVRKFLSL

SEQ ID NO: 28029 - protein, 1001 aa, Lymantria dispar
MVVFTDTRYNEEVRNALEHAIQEYRFKPHNIRPRLPRLPMHRKNRRLVNTLDSLLGSYLSTSDNISDTHSILYCAAVAACRMAGLKFLKTESAIRQKKAIPVWQRRIECRIREARVLIGKLSCFRTGNTRPRVMRYVRRAFFGTDIKPEEYKARVTERIDYLKQKVYAWANRIRRYKKRVNRYSMNRMFESDQKSVYRNWERPCQLVDDERLPDAEATNTFWRSIWSVPVVHSEDDWMGDVKRACENIPQMENIIIDQEDVACAVRSLSNWKSPGPDGLHNFWLKWLHSTHARLASHFQSALVTGMLPEFMTTGITHLLHKTGSTTEPSNYRPITCLPSVYKLLTFILRNKIAKHIHLNSVMSISQNGCKNGGRGTKELLLIDMAISQQVRRNRKDLSTCWIDYRKAFDSVPHTWLLRVLELYKVDSTLCTFLKACMGQWKTILRYPTCRLNRGSTEPIYIRRGIFQGDSLSPLWFCLAMNPLSTLLEHSGLGCRLRRGGQTISHLLYMDDLKLFTPNNTQLVELLKITETFSNSISMEFGVDKCAIMHVKQGEVVEVDRDQLFDTLQFRPLHRTETYKYLGMSQALNINEADMKQALRERFLGRLKKVLNSLLSGGNKVRAYNAWVVPLLMHSFGILKWTQTELDTLDRKVRTLLTSHRMHHPRSSIMRLYIPRRCGGRGFLNAKALHNREVCNLRDYFLKKTSGVHLDMMKVDSGLTPLGLAKENWRRPVVLSTTDRENVWQSKELHGRFYGALHASEVDLSASVTWLRFGNLFGETEGFVCAITDEVIKTNNYRKYILRDGTADICRACHRPGESLRHIVSGCSRLANGEYLHRHNQVARIIHQQLALRYKLVSVEMPYYRYVPEPVLENSRVTLYWDRSIITDRTIVANKPDIVVIDRLERRAMIVDITVPHDGNLVKAEKDKQIKYQDLAHEIVDMWDVDSAIVVPIVISTNGIIAKSLDQHLKRLTLGSWIAGLMQKAVLLDTARIVRKFLSLEP

SEQ ID NO: 28030 - protein, 1190 aa, Lymantria dispar
MITRSQTKAACIPPPGSSQSSASKQAASISATEEASSSSSSDEYFSPPTSPRPAPRRGRGRPPFCLGPRGPPASHRAPASGGNVQRMRWTQSINENVMRAYFEATEGGIKLTAYRDRMLLLFQNLEPVINVTAQRLSDQVRAIQRCNLLDAAALDRLRSESIQISRVTPIPTPVSTIDVRQSAPPSAAEGDDMTDSMDTRYNEEVRKALECAIREYRFEPQEIRPRLPRLPMHRKNRLLVGTLDSFLIDYVNNSNSISDTHSILYCAAIAACRIAGLNFFKNESTMRHKEAKPAWQCRIECRISKARVLIGKLSSFRTGNTRPKVMRFVKRAFLGTGIKPEDYSARVTERIDFLKQKIYAWASRIRRYKKRVNRYSVNRMFESDQKSVYRNWERPCQDVDDGQPDTKATNSYWHSIWSMPVVHSEGDWMRDVKQACENIPQMKEVSINQQDVADAVRPLSNWKSPGLDGLHNFWLKWLRSGHARLASHFQSALVTGTLPEFMTTGITHLLHKAGSTTVPSNYRPITCLPSVYKLLTSILRNKISKHIQLNSVMSLSQNGCRNGGRGTKELLLIDTAISQQVRRLRKDLSICWIDYKKAFDSVPHTWLLRVLELYKINSTLCAFLKSCMGQWKTFLRYPTCRLSRGGGEPIYIRRGIFQGDSLSPLWFCLALNPLSTLLGHSGLGCRLRRGGQIVSHLLYMDDLKLFAPTHIQMAELLKVTETFSNSIKMEFGVDKCAVMHVKRGEVVENHRSEIFNTPQFRPLHVTDTYKYLGMSQALNINETDMKRALRERFFGRLKKVLNSLLSGGNKVRAYNAWVMPILMYSFGILKWTQTELDTLDRKVRTLLTSHRMHHPRSSIMRLYIPRKCGGRGFLNAKTLHNREVCNLRDYFLKMTSGVHLDVVTIDNGLTPLGLAKENWRRPVVLSTIDRKNVWQSKELHGRYYGALNAPDVDTPASVTWLRFGNLFGETEGFVCAIADEVIKTNNYRKYILRDGTADICRACHLPGESLRHIVSGCSRLANGEYLHRHNQVARIIHQQLALLHKLVSVEVPYYKYVPEPVLENGRVTLYWDRSIITDRTIVANKPDIVVIDRLQRRAMIVDITVPHDGNLVKAEKDKQIKYQDLAHEIVDMWDVNSAIVVPIVISTNGLIAKSLNQHLKRLALGSWIAGLMQKAVLLNTARIVRKFLSL

SEQ ID NO: 28031 - protein, 1190 aa, Lymantria dispar
MITRSQTKAACIPPPGSSQSSASKQAASISATEEASSSSSSDEYFSPPTSPRPAPRRGRGRPPFCLGPRGPPASHRALASGGNVQRMRWTQSINENVMRAYFEATEGGIKLTAYRDRMLLLFQNLEPIINVTAQRLSDQVRAIQRCNLLDAAALDRLRSESIQISRVTPIPTPVSSIDVRQSAPPSAAEGDDMTDSMDTRYNEEVRKALECAIREYRFEPQEIRPRLPRLPMHRKNRLLVGTLDSFLIDYVNNSNSISDTHSILYCAAIAACRIAGLNFLKNESTMRHKEAKPAWQCRIECRISKARVLIGKLSSFRTGNTRPKVMRFVKRAFLGTGIKPEDYSARVTERIDFLKQKIYAWASRIRRYKKRVNRYSMNRMFESDQKSVYRNWERPCQDVDDGQPDTKATNSYWHSIWSMPVVHSEGDWMRDVKQACENIPQMKEVSINQQDVADAVRPLSNWKSPGLDGLHNFWLKWLRSGHARLASHFQSALVTGTLPEFMTTGITHLLHKAGSTTVPSNYRPITCLPSVYKLLTSILRNKISKHIQLNSVMSLSQNGCRNGGRGTKELLLIDTAISQQVRRLRKDLSICWIDYKKAFDSVPHTWLLRVLELYKINSTLCAFLKSCMGQWKTFLRYPACRLSRGGGEPIYIRRGIFQGDSLSPLWFCLALNPLSTLLGHSGLGCRLRRGGQIVSHLLYMDDLKLFAPTHIQMAELLKVTETFSNSIKMEFGVDKCAVMHVKRGEVVENHRSEIFNNPQFRPLHVTDTYKYLGMSQALNINETDMKRALRERFFGRLKKVLNSLLSGGNKVRAYNAWVMPILMYSFGILKWTQTELDTLDRKVRTLLTSHRMHHPRSSIMRLYIPRKCGGRGFLNAKTLHNREVCNLRDYFLKMTSGVHLDVVTIDNGLTPLGLAKENWHRPVVLSTIDRKNVWQSKELHGRYYGALNAPDVDTPASVTWLRFGNLFGETEGFVCAIADEVIKTNNYRKYILRDGTADICRACHLPGESLRHIVSGCSRLANGEYLHRHNQVARIIHQQLALLHKLVSVEVPYYKYVPEPVLENGRVTLYWDRSIITDRTIVANKPDIVVIDRLQRRAMIVDITIPHDGNLVKAEKDKQIKYQDLAHEIVDMWDVDSAIVVPIVISTNGLIAKSLNQHLKRLALGSWIAGLMQKAVLLNTARIVRKFLSL

SEQ ID NO: 28032 - protein, 1190 aa, Lymantria dispar
MITRSQTKAACIPPPGSSQSSASKQAASISATEEASSSSSSDEYFSPPTSPRPAPRRGRGRPPFCLGPRGPPASHRAPASGGNVQRMRWTQSINENVMRAYFEATEGGIKLTAYRDRMLLLFQNLEPVINVTAQRLSDQVRAIQRCNLLDAAALDRLRSESIQISRVTPIPTPVSTIDVRQSAPPSAAEGDDMTDSMDTRYNEEVRKALECAIREYRFEPQEIRPRLPRLPMHRKNRLLVGTLDSFLIDYVNNSNSISDTHSILYCAAIAACRIAGLNFLKNESTMRHKEAKPAWQCRIECRISKARVLIGKLSSFRTGNTRPKVMRFVKRAFLGTGIKPEDYSARVTERIDFLKQKIYAWASRIRRYKKRVNRYSVNRMFESDQKSVYRNWERPCQDVDDGQPDTKATNSYWHSIWSMPVVHSEGDWMRDVKQACENIPQMKEVSINQQDVADAVRPLSNWKSPGLDGLHNFWLKWLRSGHARLASHFQSALVTGTLPEFMTTGITHLLHKAGSTTVPSNYRPITCLPSVYKLLTSILRNKISKHIQLNSVMSLSQNGCRNGGRGTKELLLIDTAISQQVRRRRKDLSICWIDYKKAFDSVPHTWLLRVLELYKINSTLCAFLKSCMGQWKTFLRYPTCRLSRGGGEPIYIRRGIFQGDSLSPLWFCLALNPLSTLLGHSGLGCRLRRGGQIVSHLLYMDDLKLFAPTHIQMAELLKVTETFSNSIKMEFGVDKCAVMHVKRGEVVENHRSEIFNTPQFRPLHVTDTYKYLGMSQALNINETDMKRALRERFFGRLKKVLNSLLSGGNKVRAYNAWVMPILMYSFGILKWTQTELDTLDRKVRTLLTSHRMHHPRSSIMRLYIPRKCGGRGFLNAKTLHNREVCNLRDYFLKMTSGVHLDVVTIDNGLTPLGLAKENWRRPVVLSTIDRRNVWQSKELHGRYYGALNAPDVDTPASVTWLRFGNLFGETEGFVCAIADEVIKTNNYRKYILRDGTADICRACHLPGESLRHIVSGCSRLANGEYLHRHNQVARIIHQQLALLHKLVSVEVPYYKYVPEPVLENGRVTLYWDRSIITDRTIVANKPDIVMIDRLQRRAMIVDITVPHDGNLVKAEKDKQIKYQDLAHEIVDMWDVDSAIVVPIVISTNGLIAKSLNQHLKRLALGSWIAGLMQKAVLLNTARIVRKFLSL

SEQ ID NO: 28033 - protein, 1166 aa, Lymantria dispar
MITRSQTKAACIPPPGSSQSSASKQAASISATEEASSSSSSDEYFSPPTSPRPAPRRGRGRPPFCLGPRGPPASHRAPASGGNVQRMRWTQSINENVMRAYFEATEGGIKLTAYRDRMLLLFQNLEPIINVTAQRLSDQVRAIQRCNLLDAAALDRLRSESIQISRVTPIPTPVSTIDVRQSAPPSAAEGDDMTDSMDTRYNEEVRKALECAIREYRFEPQEIRPRLPRLPMHRKNRLLVGTLDSFLIDYVNNSNSISDTHSILYCAAIAACRIAGLNFLKNESTMRHKEAKPAWQCRIECRISKARVLIGKLSSFRTGNTRPKVMRFVKRAFLGTGIKPEDYSARVTERIDFLKQKIYAWASRIRRYKKRVNRYSVNRMFESDQKSVYRNWERPCQDVDDGQPDTKATNSYWHSIWSMPVVHSEGDWMRDVKQACENIPQMKEVSINQQDVADAVRPLSNWKSPGLDGLHNFWLKWLRSGHARLASHFQSALVTGTLPEFMTTGITHLLHKAGSTTVPSNYRPITCLPSVYKLLTSILRNKISKHIQLNSVMSLSQNGCRNGGRGTKELLLIDTAISQQVRRLRKDLSICWIDYKKAFDSVPHTWLLRVLELYKINSTLCAFLKSCMGQWKTFLRYPACRLSRGGGEPIYIRRGIFQGDSLSPLWFCLALNPLSTLLGHSGLGCRLRRGGQIVSHLLYMDDLKLFAPTHIQMAELLKVTETFSNSIKMEFGVDKCAVMHVKRGEVVENHRSEIFNTPQFRPLHVTDTYKYLGMSQALNINETDMKRALRERFFGRLKKVLNSLLSGGNKVRAYNAWVMPILMYSFGILKWTQTELDTLDRKVRTLLTSHRMHHPRSSIMRLYIPRKCGGRGFLNAKTLHNREVCNLRDYFLKMTSGVHLDVVTIDNGLTPLGLAKENWRRPVVLSTIDRKNVWQSKELHGRYYGALNAPDVDTPASVTWLRFGNLFGETEGFVCAIADEVIKTNNYRKYILRDGTADICRACHLPGESLRHIVSGCSRLANGEYLHRHNQVARIIHQQLALLHKLVSVEVPYYKYVPEPVLENGRVTLYWDRSIITDRTIVANKPDIVVIDRLQRRAMIVDITVPHDGNLVKAEKDKQIKYQDLAHEIVDMWDMDSAIVVPIVISTNGLIAKSLNQHLKRLALGS

SEQ ID NO: 28034 - protein, 1190 aa, Lymantria dispar
MITRSQTKAACIPPPGSSQSSASKQAASISATEEASSSSSSDEYFSPPTSPTPAPRRGRGRPPFCLGPRGPPASHRAPASGGNVQRMRWTQSINENVMRAYFEATEGGIKLTAYRDRMLLLFQNLEPVINVTAQRLSDQVRAIQRCNLLDAAALDRLRSESIQISRVTPIPTPVSTIDVRQSAPPSAAEGDDMTDSMDTRYNEEVRKALECAIREYRFEPQEIRPRLPRLPMHRKNRLLVGTLDSFLIDYVNNSNSISDTHSILYCAAIAACRIAGLNFLKNESTMRHKEAKPAWQCRIECRISKARVLIGKLSSFRTGNTRPKVMRFVKRAFLGTGIKPEDYSARVTERIDFLKQKIYAWASRIRRYKKRVNRYSVNRMFESDQKSVYRNWERPCQDVDDGQPDTKATNSYWHSIWSMPVVHSEGDWMRDVKQACENIPQMKEVSINQQDVADAVRPLSNWKSPGLDGLHNFWLKWLRSGHARLASHFQSALVTGTLPEFMTTGITHLLHKAGSTTVPSNYRPITFLPSVYKLLTSILRNKISKHIQLNSVMSLSQNGCRNGGRGTKELLLIDTAISQQVRRLRKDLSICWIDYKKAFDSVPHTWLLRVLELYKINSTLCAFLKSCMGQWKTFLRYPTCRLSRGGGEPIYIRRGIFQGDSLSPLWFCLALNPLSTLLGHSGLGCRLRRGGQIVSHLLYMDDLKLFAPTHIQMAELLKVTETFSNSIKMEFGVDKCAVMHVKRGEVVENHRSEIFNTPQFRPLHVTDTYKYLGMSQALNINETDMKRALRERFFGRLKKVLNSLLSGGNKVRAYNAWVMPILMYSFGILKWTQTELDTLDRKVRTLLTSHRMHHPRSSIMRLYIPRKCGGRGFLNAKTLHNREVCNLRDYFLKMTSGVHLDVVTIDNGLTPLGLAKENWRRPVVLSTIDRKNVWQSKELHGRYYGALNAPDVDTPASVTWLRFGNLFGETEGFVCAIADEVIKTNNYRKYILRDGTADICRACHLPGESLRHIVSGCSRLANGEYLHRHNQVARIIHQQLALLHKLVSVEVPYYKYVPEPVLENGRVTLYWDRSIITDRTIVANKPDIVVIDRLQRRAMIVDITVPHDGNLVKAEKDKQIKYQDLAHEIVDMWDVDSAIVVPIVISTNGLIAKSLNQHLKRLALGSWIAGLMQKAVLLNTARIVRKFLSL

SEQ ID NO: 28035 - protein, 1038 aa, Lymantria dispar
MEIYNNNNNNIIIIIINIPTPVSTIDVRQSAPPSAAEGDDMTDSMDTRYNEEVRKALECAIREYRFEPQEIRPRLPRLPMHRKNRLLVGTLDSFLIDYVNNSNSISDTHSILYCAAIAACRIAGLNFLKNESTMRHKEAKPAWQCRIECRISKARVLIGKLSSFRTGNTRPKVMRFVKRAFLGTGIKPEDYSARVTERIDFLKQKIYAWASRIRRYKKRVNRYSVNRMFESDQKSVYRNWERPCQDVDDGQPDTKATNSYWHSIWSMPVVHSEGDWMRDVKQACENIPQMKEVSINQQDVADAVRPLSNWKSPGLDGLHNFWLKWLRSGHARLASHFQSSLVTGTLPEFMTTGITHLLHKAGSTTVPSNYRPITCLPSVYKLLTSILRNKISKHIQLNSVMSLSQNGCRNGGRGTKELLLIDTAISQQVRRLRKDLSICWIDYKKAFDSVPHTWLLRVLELYKINSTLCAFLKSCMGQWKTFLRYPTCRLSRGGGEPIYIRRGIFQGDSLSPLWFCLALNPLSTLLGHSGLGCRLRRGGQIVSHLLYMDDLKLFAPTHIQMAELLKVTETFSNSIKMEFGVDKCAVMHVKRGEVVENHRSEIFNTPQFRPLHVTDTYKYLGMSQALNINETDMKRALRERFFGRLKKVLNSLLSGGNKVRAYNAWVMPILMYSFGILKWTQTELDTLDRKVRTLLTSHRMHHPRSSIMRLYIPRKCGGRGFLNAKTLHNREVCNLRDYFLKMTSGVHLDVVTIDNGLTPLGLAKENWRRPVVLSTIDRKNVWQSKELHGRYYGALNAPDVDTPASVTWLRFGNLFGETEGFVCAIADEVIKTNNYRKYILRDGTADICRACHLPGESLRHIVSGCSRLANGEYLHRHNQVARIIHQQLALLHKLVSVEVPYYKYVPEPVLENGRVTLYWDRSIITDRTIVANKPDIVVIDRLQRRAMIVDITVPHDGNLVKAEKDKQIKYQDLAHEIVDMWDVDSAIVVPIVISTNGLIAKSLNQHLKRLALGSWIAGLMQKAVLLNTARIVRKFLSL

SEQ ID NO: 28036 - protein, 1196 aa, Lymantria monacha
MLTRSQTKAARPPPPGSSQSSASQPRASVPAASVTTAASSSSSSDEYFSPPTTPTPAPRRGRGRPPICLGPRGPPTSHRAPAAGGNVQRMKWTHSINENVMRAYFEATEGGIKLTAYRDRMLLLFQNLEPTINVTAQRLSDQVRAIQRCHLLDVATLDRLRLVSIQTCRVTPISTEISTIDTTQSVPPPYAEGEDATVSMDTQYNEEVRNALECAIREYRFIPHNIRPRLPRLPMHRKNRRLVGTLDSLLTSYLHTSDSISDTHSILYCVAIAACRIAGQKFLENESTIQQKKAKPAWQCRIECRICEARVLIGKLICFRAGNTRPKVMRYVRRAFLGTDIKPDEYNARVTERIDFLKQKVYAWASRIRRCKKRMNRYSVNRMFESDQKSVYRNWERPCLIVDNERLPDAEVTNTFWRSIWSVPVVHSEGDWMGDVKRACENIPQMENVLIDKDDVTCAVRSLSNWKSPGPDGLHNFWLKWLHSAHARLASHFQSALVSGTLPEFMTTGITHLLHKTGSTTEPCNYRPITCLPSVYKLLTSILSNKIAKHVQLNSVMSISQNGCRNGGRGTKELLLIDTAISQQVRRNRKDLSVCWIDYRKAFDSVPHTWLLRVLELYKINSLLCTFLKSCMGQWKTFLKYPMHRLNLGSSEPIYIRRGIFQGDSLSPLWFCLALNPLSILLEHSGLGCRLRRGGQIISHLLYMDDLKMFAPNNPQLVKLLKVTETFSSSIKMEFGVDKCAVMHVKHGGIVEVDRGQLFNTLQFRPLQVTDTYKYLGMSQALNINESDMKRTLRERFFGRLKKVLNSLLSGGNKVRAYNAWVMPILMYSFGILKWTQTELDTLDRKVRTLLTSHRMHHPRSSVMRLYIPRKCGGRGFLNAKTLHNREIYNLRDYFLKMTSGMHLDVVAVDNGLTPLGLAKENWHKPAVLSTKDRESIWQSKELHGRFYGALNASEVDFSASVTWLQFGNLFGETEGFVCAIADEVIKTNNYRKYILRDGTADICRACHLPGESLRHIVSGCSRLANGEYLHRHNQVARIIHQQLALLYRLVSTEVPYYRYIPQPVLENGRATLYWDRSIITDRTIVANKPDIVVIDRLQRRAMIVDVTVPHDGNLVKAEKDKQIKYQDLAHEIVDMWDVDTAIVVPIVISTNGLIAKNLAQHLKRLALGSWIGGLMQKAVLLDTARIVRKFLSLEP

SEQ ID NO: 28037 - protein, 1190 aa, Lymantria dispar
MITRSQTKAACIPPPGSSQSSASKQAASISATEEASSSSSSDEYFSPPTSPRPAPRRGRGRPPFCLGPRGPPASHRAPASGGNVQRMRWTQSINENVMRAYFEATEGGIKLTAYRDRMLLLFQNLEPIINVTAQRLSDQVRAIQRCNLLDAAALDRLRSESIQISRVTPIPTPVSTIDVRQSAPPSAAEGDDMTDSMDTRYNEEVRKALECAIREYRFEPQEIRPRLPRLPMHRKNRLLVGTLDSFLIDYVNNSNSISDTHSILYCAAIAACRIAGLNFLKNESTMRHKEAKPAWQCRIECRISKARVLIGKLSSFRTGNTRPKVMRFVKRAFLGTGIKPEDYSARVTERIDFLKQKVYAWASRIRRYKKRVNRYSVNRMFESDQKSVYRNWERPCQDVDDGQPDTKATNSYWHSIWSMPVVHSEGDWMRDVKQACENIPQMKEVSINQQDVADAVRPLSNWKSPGLDGLHNFWLKWLRSGHARLASHFQSALVTGTLPEFMTTGITHLLHKAGSTTVPSNYRPITCLPSVYKLLTSILRNKISKHIQLNSVMSLSQNGCRNGGRGTKELLLIDTAISQQVRRLRKDLSICWIDYKKAFDSVPHTWLLRVLELYKINSTLCAFLKSCMGQWKTFLRYPACRLSRGGGEPIYIRRGIFQGDSLSPLWFCLALNPLSTLLGHSGLGCRLRRGGQIVSHLLYMDDLKLFAPTHIQMAELLKVTETFSNSIKMEFGVDKCAVMHVKRGEVVENHRSEIFNTPQFRPLRVTDTYKYLGMSQALNINETDMKRALRERFFGRLKKVLNSLLSGGNKVRAYNAWVMPILMYSFGILKWTQTELDTLDRKVRTLLTSHRMHHPRSSIMRLYIPRKCGGRGFLNAKTLHNREVCNLRDYFLKMTSGVHLDVVTIDNGLTPLGLAKENWRRPVVLSTIDRKNVWQSKELHGRYYGALNAPDVDTPASVTWLRFGNLFGETEGFVCAIADEVIKTNNYRKYILRDGTADICRACHLPGESLRHIVSGCSRLANGEYLHRHNQVARIIHQQLALLHKLVSVEVPYYKYVPEPVLENGRVTLYWDRSIITDRTIVANKPDIVVIDRLQRRAMIVDITVPHDGNLVKAEKDKQIKYQDLAHEIVDMWDVDSAIVVPIVISTNGLIAKSLNQHLKRLALGSWIAGLMQKAVLLNTARIVRKFLSL

SEQ ID NO: 28038 - protein, 984 aa, Lymantria monacha
MNAIREYRFIPHNIRPRLPRLPMHRKNRRLVGTLDSLLTSYLHTSDSISDTYSILYCVAVAACRIAGLKFLENESTIQQKKAKPAWHCRIECRICEARVLIGKLICFRAGNTRPKVMRYVKRAFLGTDIKPDEYNARVTERIDFLKQKVYAWANRIRRYKKRMNRYSVNRMFESDQKSVYRNWERPCLIVDDKRLPDAEVTNTFWRSIWSVPVVHSEGDWMGDVKRACENIPQIENVLIDKDDITCAVRSLSNWKSPGPDGLHNFWLKWLHSAHARLASHFQSALVSGTLPEFMTTGITHLLHKTGSTTEPCNYRPITCLPSVYKLLTSILSNKIAKHVQSNSVMSISQNGCRNGGRSTKELLLIDTAISQQVRRNRKDLSVCWIDYRKAFDSVPHTWLLRVLELYKINSLLCTFLKSCMGQWNTFLKYPMHRLNLGSSEPIYIRRGIFQGDSLSPLWFCLALNPLSILLEHSGLGCRLRRGGQIISHLLYMDDLKLFAPNNPQLLKLLKVTETFSSSIKMEFDVDKCAVMHVKHGGIVEVDRGQLFNTLQFRPLHVTDTYKYLGMSQALNINESDMKQALRERFFGRLKKVLNSLLSGGNKVCAYNAWVMPILMYSFGILKWTQTELDALDRKVRTLLTSHRMHHPRSSIMRLYIPRKCGGRGFLNVKTLHNREVYNLRDYFLKMTSGMHLDVVAVDNGLTPLGLAKENWHKPAVLSTKDRESIWQSKELHGRFYGALHASEVDFSASVTWLQFGNLFGETEGFVCAIADEVIKTNNYRKYILRDGTADICRACHLPGESLRHIVSGCSRLANGEYLHRHNQVAWIIHQQLALLYRLVSVEVPYYRYIPQPVLENGRATLYWDQSIITDRTIVANKPDIVVIDRLQRRAMIVDVTVPHDENLVKAEKDKQIKYQDLAHEIVDMWDVDTAIVVPIVISTNGLIAKSLAQHLKWLALGSWIGGLMQKAVLLDTVRIVRKFLSLEP

SEQ ID NO: 28039 - protein, 998 aa, Lymantria dispar
MTDSMDTRYNEEVRKALECAIREYRFEPQEIRPRLPRLPMHRKNRLLVGTLDSFLIDYVNNSNSISDTHSILYCAAIAACRIAGQNFLKNESTMRHKEAKPAWQCRIECRISKARVLIGKLSSFRTGNTRPKVMRFVKRAFLGTGIKPEDYSARVTERIDFLKQKIYAWASRIRRYKKRVNRYSVNRMFESDQKSVYRNWERPCQDVDDGQPDTKATNSYWHSIWSMPVVHSEGDWMRDVKQACENIPQMKEVSINQQDVADAVRPLSNWKSPGLDGLHNFWLKWLRSGHARLASHFQSTLVTGTLPEFMTTGITHLLHKAGSTTVPSNYRPITCLPSVYKLLTSILRNKISKHIQLNSVMSLSQNGCRNGGRGTKELLLIDTAISQQVRRLRKDLSICWIDYKKAFDSVPHTWLLRVLELYKINSTLCAFLKSCMRQWKTFLRYPACRLSRGGGEPIYIRRGIFQGDSLSPLWFCLALNPLSTLLGHSGLGCRLRRGGQIVSHLLYMDDLKLFAPTHIRMAELLKVTETFSNSIKMEFGVDKCAVMHVKRREVVENHRSEIFNNPQFRPLHVTDTYKYLGMSQALNINETDMKRALRERFFGRLKKVLNSLLSGGNKVRAYNAWVMPILMYSFGILKWTQTELDTLDRKVRTLLTSHRMHHPRSSIMRLYIPRKCGGRGFLNAKTLHNREVCNLRDYFLKMTSGVHLDVVTIDNGLTPLGLAKENWRRPVVLSTIDRKNVWQSKELHGRYYGALNAPDVDTPASVTWLRFGNLFGETEGFVCAIADEVIKTNNYRKYILRDGTADICRTCHLPGESLRHIVSGCSRLANGEYLHRHNQVARIIHQQLALLHKLVSVEVPYYKYVPEPVLENGRVTLYWDRSMFTDRTIVANKPDIVVIDRLQRRAMIVDITVPHDGNLVKAEKDKQIKYQDLAHEIVDMWDVDSAIVVPIVISTNGLIAKSLNQHLKRLALGSWIAGLMQKAVLLNTARIVRKFLSL

SEQ ID NO: 28040 - protein, 1190 aa, Lymantria dispar
MITRSQTKAACIPPPGSSQSSASKQAASISATEEASSSSSSDEYFSPPTSPTPAPRRGRGRPPFCLGPRGPPASHRAPASGGNVQRMRWTQSINENVMRAYFEATEGGIKLTAYRDRILLLFQNLEPVINVTAQRLSDQVRAIQRCNLLDAAALDRLRSESIQISRVTPIPTPVSTIDVRQSAPPSAAEGDDMTDSMDTRYNEEVRKALECAIREYRFEPQEIRPRLPRLPMHRKNRLLVGTLDSFLIDYVNNSNSISDTHSILYCAAIAACRIAGLNFLKNESTMRHKEAKPAWQCRIECRISKARVLIGKLSSFRTGNTRPKVMRFVKRAFLGTGIKPEDYSARVTERIDFLKQKIYAWASRIRRYKKRVNRYSVNRMFESDQKSVYRNWERPCQDVDDGQPDTKATNSYWHSIWSMPVVHSEGDWMRDVKQACENIPQMKEVSINQQDVADAVRPLSNWKSPGLDGLHNFWLKWLRSGHARLASHFQSALVTGTLPEFMTTGITHLLHKAGSTTVPSNYRPITCLPSVYKLLTSILRNKISKHIQLNSVMSLSQNGCRNGGRGTKELLLIDTAISQQVRRLRKDLSICWIDYKKAFDSVPHTWLLRVLELYKINSTLCAFLKSCMGQWKTFLRYPTCRLSRGGGEPIYIRRGIFQGDSLSPLWFCLALNPLSTLLGHSGLGCRLRRGGQIVSHLLYMDDLKLFAPTHIQMAELLKVTETFSNSIKMEFGVDKCAVMHVKRGEIVENHRSEIFNTPQFRPLHVTDTYKYLGMSQALNINETDMKRALRERFFGRLKKVLNSLLSGGNKVRAYNAWVMPILMYSFGILKWTQTELDTLDRKVRTLLTSHRMHHPRSSIMRLYIPRKCGGRGFLNAKTLHNREVCNLKDYFLKMTSGVHLDVVTIDNGLTPLGLAKENWRRPVVLSTIDRKNVWQSKELHGRYYGALNAPDVDTPASVTWLRFGNLFGETEGFVCAIADEVIKTNNYRKYILRDGTADICRACHLPGESLRHIVSGCSRLANGEYLHRHNQVARIIHQQLALLHKLVSVEVPYYKYVPEPVLENGRVTLYWDRSIITDRTIVANKPDIVVIDRLQRRAMIVDITVPHDGNLVKAEKDKQIKYQDLAHEIVDMWDVDSAIVVPIVISTNGLIAKSLNQHLKRLALGSWIAGLMQKAVLLNTARIVRKFLSL

SEQ ID NO: 28041 - protein, 905 aa, Lymantria dispar
MRHKEAKPAWQCRIECRISKARVLIGKLSSFRTGNTRPKVMRFVKRAFLGTGIKPEDYSARVTERIDFLKQKIYAWASRIRRYKKRVNRYSMNRMFESDQKSVYRNWERPCQDVDDGQPDTKATNSYWHSIWSMPVVHSEGDWMRDVKQACENIPQMKEVSINQQDVADAVRPLSNWKSPGLDGLHNFWLKWLRSGHARLASHFQSALVTGTLPEFMTTGITHLLHKAGSTTVPSNYRPITCLPSVYKLLTSILRNKISKHIQLNSVMSLSQNGCRNGGRGTKELLLIDTAISQQVRRLRKDLSICWIDYKKAFDSVPHTWLLRVLELYKINSTLCAFLKSCMGQWKTFLRYPACRLSRGGGEPIYIRRGIFQGDSLSPLWFCLALNPLSTLLGHSGLGCRLRRGGQIVSHLLYMDDLKLFAPTHIQMAELLKVTETFSNSIKMEFGVDKCAVMHVKRGEVVENHRSEIFNNPQFRPLHVTDTYKYLGMSQALNINETDMKRALRERFFGRLKKVLNSLLSGGNKVRAYNAWVMPILMYSFGILKWTQTELDTLDRKVRTLLTSHRMHHPRSSIMRLYIPRKCGGRGFLNAKTLHNREVCNLRDYFLKMTSGVHLDVVTIDNGLTPLGLAKENWRRPVVLSTIDRKNVWQSKELHGRYYGALNAPDVDTPASVTWLRFGNLFGETEGFVCAIADEVIKTNNYRKYILRDGTADICRACHLPGESLRHIVSGCSRLANGEYLHRHNQVARIIHQQLALLHKLVSVEVPYYKYVPEPVLENGRVTLYWDRSIITDRTIVANKPDIVVIDRLQRRAMIVDITVPHDGNLVKAEKDKQIKYQDLAHEIVDMWDVDSAIVVPIVISTNGLIAKSLNQHLKRLALGSWIAGLMQKAVLLNTARIVRKFLSL

SEQ ID NO: 28042 - protein, 1190 aa, Lymantria dispar
MITRSQTKAACIPPPGSSQSSASKQAASISATEEASSSSSSDEYFSPPTSPRPAPRRGRGRPPFCLGPRGPPASHRAPASGGNVQRMRWTQSINENVMRAYFEATEGGIKLTAYRDRMLLLFQNLEPVINVTAQRLSDQVRAIQRCNLLDAAALDRLRSESIQISRVTPIPTPVSTIDVRQSAPPSAAEGDDMTDSMDTRYNEEVRKALECAIREYRFEPQEIRPRLPRLPMHRKNRLLVGTLDSFLIDYVNNSNSISDTHSILYCAAIAACRIAGLNFLKNESTMRHKEAKPAWQCRIECRISKARVLIGKLSSFRTGNTRPKVMRFVKRAFLGTGIKPEDYSARVTERIDFLKQKIYAWASRIRRYKKRVNRYSVNRMFESDQKSVYRNWERPCQDVDDGQPDTKATNSYWHSIWSMPVVHSEGDWMRDVKQACENIPQMKEVSINQQDVADAVRPLSNWKSPGLDGLHNFWLKWLRSGHARLASHFQSALVTGTLPEFMTTGITHLLHKAGSTTVPSNYRPITCLPSVYKLLTSILRNKISKHIQLNSVMSLSQNGCRNGGRGTKELLLIDTAISQQVRRRRKDLSICWIDYKKAFDSVPHTWLLRVLELYKINSTLCAFLKSCMGQWKTFLRYPTCRLSRGGGEPIYIRRGIFQGDSLSPLWFCLALNPLSTLLGHSGLGCRLRRGGQIVSHLLYMDDLKLFAPTHIQMAELLKVTETFSNSIKMEFGVDKCAVMHVKRGEVVENHRSEIFNTPQFRPLHVTDTYKYLGMSQALNINETDMKRALRERFFGRLKKVLNSLLSGGNKVRAYNAWVMPILMYSFGILKWTQTELDTLDRKVRTLLTSHRMHHPRSSIMRLYIPRKCGGRGFLNAKTLHNREVCNLRDYFLKMTSGVHLDVVTIDNGLTPLGLAKENWRRPVVLSTIDRRNVWQSKELHGRYYGALNAPDVDTPASVTWLRFGNLFGETEGFVCAIADEVIKTNNYRKYILRDGTADICRACHLPGESLRHIVSGCSRLANGEYLHRHNQVARIIHQQLALLHKLVSVEVPYYKYVPEPVLENGRVTLYWDRSIITDRTIVANKPDIVVIDRLQRRAMIVDITVPHDGNLVKAEKDKQIKYQDLAHEIVDMWDVDSAIVVPIVISTNGLIAKSLNQHLKRLALGSWIAGLMQKAVLLNTARIVRKFLSL

SEQ ID NO: 28043 - protein, 1190 aa, Lymantria dispar
MITRSQTKAACIPPPGSSQSSASKQAASISATEEASSSSSSDEYFSPPTSPRPAPRRGRGRPPFCLGPRGPPASHRAPASGGNVQRMRWTQSINENVMRAYFEATEGGIKLTAYRDRMLLLFQNLEPIINVTAQRLSDQVRAIQRCNLLDAAALDRLRSESIQISRVTPIPTPVSTIDVRQSAPPSAAEGDDMTDSMDTRYNEEVRKALECAIREYRFEPQEIRPRLPRLPMHRKNRLLVGTLDSFLIDYVNNSNSISDTHSILYCAAIAACRIAGLNFLKNESTMRHKEAKPAWQCRIECRISKARVLIGKLSSFRTGNTRPKVMRFVKRAFLGTGIKPEDYSARVTERIDFLKQKIYAWASRIRRYKKRVNRYSVNRMFESDQKSVYRNWERPCQDVDDGQPDTKATNSYWHSIWSMPVVHSEGDWMRDVKQACENIPQMKEVSINQQDVADAVRPLSNWKSPGLDGLHNFWLKWLRSGHARLASHFQSALVTGTLPEFMTTGITHLLHKAGSTTVPSNYRPITCLPSVYKLLTSILRNKISKHIQLNSVMSLSQNGCRNGGRGTKELLLIDTAISQQVRRLRKDLSICWIDYKKAFDSVPHTWLLRVLELYKINSTLCAFLKSCMGQWKTFLRYPACRLSRGGGEPIYIRRGIFQGDSLSPLWFCLALNPLSTLLGHSGLGCRLRRGGQIVSHLLYMDDLKLFAPTHIQMAELLKVTETFSNSIKMEFGVDKCAVMHVKRGEVVENHRSEIFNTPQFRPLHVTDTYKYLGMSQALNINETDMKRALRERFFGRLKKVLNSLLSGGNKVRAYNAWVMPILMYSFGILKWTQTELDTLDRKVRTLLTSHRMHHPRSSIMRLYIPRKCGGRGFLNAKTLHNREVCNLRDYFLKMTSGVHLDVVTIDNGLTPLGLAKENWRRPVVLSTIDRKNVWQSKELHGRYYGALNAPDVDTPASVTWLRFGNLFGETEGFVCAIADEVIKTNNYRKYILRDGTADICRACHLPGESLRHIVSGCSRLANGEYLHRHNQVARIIHQQLALLHKLVSVEVPYYKYVPEPVLENGRVTLYWDRSIITDRTIVANKPDIVVIDRLQRRAMIVDITVPHDGNLVKAEKDKQIKYQDLAHEIVDMWDVDSAIVVPIVISTNGLIAKSLNQHLKRLALGSWIAGLMQKAVLLNTARIVRKFLSL

SEQ ID NO: 28044 - protein, 905 aa, Lymantria dispar
MRHKEAKPAWQCKIECRISKARVLIGKLSSFRTGNTRPKVMRFVKRAFLGTGIKPEDYSARVTERIVFLKQKIYAWASRIRRYKKRVNRYSVNRMFESDQKSVYRNWERPCQDVDDGQTDTKATNSYWHSIWSMPVVHSEGDWMRDVKQACENIPQMKEVSINQQDVADAVRPLSNWKSPGLDGLHNFWLKWLRSGHARLASHFQSALVTGTLPEFMTTDITHLLHKAGSTTVPSNYRPITCLPSVYKLLTSILRNKISKHIQLNSVMSLSQNGCRNGGRGTKELLLIDTAISQQVRRLRKDLSICWIDYKKAFDSVPHTWLLRVLELYKINSTLCAFLKSCMGQWKTFLRYPACRLSRGGGEPIYIRRGIFQGDSLSPLWFCLALNPLSTLLGHSGLGCRLRRGGQIVSHLLYMDDLKLFAPTHIQMAELLKVTETFSNSIKMEFGVDKCAVMHVKRGEVVENHRSEIFNNPQFRPLHVTDTYKYLGMSQALNINETDMKRALRERFFGRLKKVLNSLLSGGNKVRAYNAWVMPILMYSFGILKWTQTELDTLDRKVRTLLTSHRMHHPRSSIMRLYIPRKCGGRGFLNAKTLHNREVCNLRDYFLKMTSGVHLDVVTIDNGLTPLGLAKENWRRPVVLSTIDRKNVWQSKELHGRYYGALNAPDVDTPASVTWLRFGNLFGETEGFVCAIADEVIKTNNYRKYILRDGTADICRTCHLPGESLRHIVSGCSRLANGEYLHRHNQVARIIHQQLALLHKLVSVEVPYYKYVPEPVLENGRVTLYWDRSIITDRTIVANKPDIVVIDRLQRRAMIVDITVPHDGNLVKAEKDKQIKYQDLAHEIVDMWDVDSAIVVPIVISTNGLIAKSLNQHLKRLALGSWIAGLMQKAVLLNTARIVRKFLSL

SEQ ID NO: 28045 - protein, 1104 aa, Lymantria dispar
MRWTQSINENVMRAYFEATEGGIKLTAYRDRMLLLFQNLEPVINVTAQRLSDQVRAIQRCNLLDAAALDRLRSESIQISRVTPIPTPVSTIDVRQSAPPSAAEGDDMTDSMDTRYNEEVRKALECAIREYRFEPQEIRPRLPRLPMHRKNRLLVGTLDSFLIDYVNNSNSISDTHSILYCAAIAACRIAGLNFLKNESTMRHKEAKPAWQCRIECRISKARVLIGKLSSFRTGNTRPKVMRFVKRAFLGTGIKPEDYSARVTERIDFLKQKIYAWASRIRRYKKRVNRYSVNRMFENDQKSVYRNWERPCQDVDDGQPDTKATNSYWHSIWSMPVVHSEGDWMRDVKQACENIPQMKEVSINQQDVADAVRPLSNWKSPGLDGLHNFWLKWLRSGHARLASHFQSALVTGTLPEFMTTGITHLLHKAGSTTVPSNYRPITCLPSVYKLLTSILRNKISKHIQLNSVMSLSQNGCRNGGRGTKELLLIDTAISQQVRRLRKDLSICWIDYKKAFDSVPHTWLLRVLELYKINSTLCAFLKSCMGQWKTFLRYPTCRLSRGGGEPIYIRRGIFQGDSLSPLWFCLALNPLSTLLGHSGLGCRLRRGGQIVSHLLYMDDLKLFAPTHIQMAELLKVTETFSNSIKMEFGVDKCAVMHVKRGEVVENHRSEIFNTPQFRPLHVTDTYKYLGMSQALNINETDMKRALRERFFGRLKKVLNSLLSGGNKVRAYNAWVMPILMYSFGILKWTQTELDTLDRKVRTLLTSHRMHHPRSSIMRLYIPRKCGGRGFLNAKTLHNREVCNLRDYFLKMTSGVHLDVVTIDNGLTPLGLAKENWRRPVVLSTIDRKNVWQSKELHGRYYGALNAPDVDTPASVTWLRFGNLFGETEGFVCAIADEVIKTNNYRKYILRDGTADICRACHLPGESLRHIVSGCSRLANGEYLHRHNQVARIIHQQLALLHKLVSVEVPYYKYVPEPVLENGRVTLYWDRSIITDRTIVANKPDIVVIDRLQRRAMIVDITVPHDGNLVKAEKDKQIKYQDLAHEIVDMWDVDSAIVVPIVISTNGLIAKSLNQHLKRLALGSWIAGLMQKAVLLNTARIVRKFLSL

SEQ ID NO: 28046 - protein, 1194 aa, Autographa pulchrina
MLTRQKARAAARPPPPDSSPSSASQLPDHVPTPAPAVASSSSDEYYSPPTSPTPVRRQGRRRPPSSLAPAGQPASNRAPAPGGDVRRMKWTQNINENVMRAYYGATEGGTNLTAYRARMLSLFQALEPGVSVSAQRLSDQVRVIQRNHRLDDSTLDRLRSEIQHSPAASTSLPVAAPVSGAPPTVPSNGEEDDGAITVSTQCSELIRSTLEDAIRDYRKSPPDQRPRLPRLPMHNRNKAIMGALDSLLPFYFESSEDLRDTHSILYCAALTACRVANVAICHSNIATRPKPAVPAWQCRIEQRVAEARTLIAKLIAFKQGNSRPRVMRFVRRAFAGTDISPSEYTARVTERIDLFKQRVYAWASRIRRYKRRVERFHLNRMFQKDQRWVHRAWERPVSAMDGGCLPDGDATNSFWRSIWSVPVSHSEGDWMREVEQVCEPIQEMGAITISPQDVANAVRPMVNWKTPGPDGLQNFWLKWLPSSHSCLASQFQSAVESASLPQFLTTGSTHLLHKTGSATDPKNYRPITCLPTVYKLLTSILRAKINEHVVSFSIMSASQNGCRSGSRGTKELLLIDTAICQQVRRSKKDLSTCWIDYKKAYDSVPHTWLMRVLELYKINTTLRAFLMSCMGQWSTVLHYPGCRDIQQGGEPIRIERGIFQGDSLSPLWFCLALNPLSTLLENSGLGYSLRRGSRVISHLLYMDDLKLFATGGLQLMKLLKITEGFSNSISMEFGVDKCAVMHVKRGGIVESQGIQLSDSINLRSLSATETYKYLGMSEALGINAADVKQSLQARFFGRLNKVLRSVLSGGNKVRAFNGWVMPVLMYSFGVLKWTQTELDALDRRVRTLLTANRMHHPRSSVMRLYIPRKCGGRGFLNAKTLHNREVYNLREYFLQADVGMHRDVVVVDKGFTPLSLGKENWHKPVVLSVKDRENVWQSKELHGRYYRTLHGSDVDFLASVAWLRFGDLFGETEGFVCAIMDEVIMTNNYRKYIIKDGTVDICRACHCPGESLRHIISGCSRLANGEYLHRHNQVARIIHQQLALRYKLVESEVPYYRYVPDPVLENGRVTLYWDRSIITDRTIVANKPDIVVIDRSERRAIIVDITIPHDENLVKAEKEKQLKYLDLAHEVVDMWEVDSAIIVPIVVTANGIIAKSLDQHLKRLSLGAWVKGLIQKAVLLDTARIVRRFLSLES

SEQ ID NO: 28047 - protein, 868 aa, Autographa pulchrina
MRFVRRAFAGTDISPSEYTARVTERIDLFKQKVYAWANRIRRYKRRVERFHLNRMFQKDQRWVHRAWERPVSAVDGGCLPDGDATNSFWRSIWSVPVSHSEGDWMREVEQVCEPIQEMGAITISPQDVANAVRPMANWKTPGPDGLQNFWLKWLPSSHSCLASQFQSAVESASLPQFLTTGSTHLLHKTGSATDPKNYRPITCLPTVYKLLTSILRAKINKHVDSFSIMSASQNGCRSGSRGTKELLLIDTAICQQVRRSKKDLSTCWIDYKKAYDSVPHTWLMRVLELYKINTTLRAFLMSCMGQWSTVLHYPGCRDIQQGGEPIRIERGIFQGDSLSPLWFCLALNPLSTLLENSGLGYSLRRGSQVISHLLYMDDLKLFATSGLQLMKLLKITESFSNSISMEFGVDKCAVMHVKRGGIVESQGIQLSDSINLRSLSATETYKYLGMSEALGINVADVKQSLQARFFGRLNKVLKSVLSGGNKVRAFNGWVMPVLMYSFGVLKWTQTELDALDRRVRTLLTANRMHHPRSSVMRLYIPRKCGGRGFLNAKTLHNREVCNLREYFLEVDVGMHRDVVVVDKGLTPLSLGKENWHKPVVLSVKDRKDVWQSKELHGRYYRTLHGPDVDFLASVAWLRFGDLFGETEGFVCAIMDEVIMTNNYRKYIIKDGTVDICRACHCPGESLRHIISGCSRLANGEYLHRHNQVARIIHQQLALRYKLVESEVPYYRYVPDPVLESGRVTLYWDRSIITDRTIIANKPDIVVIDRSERRAIIVDITIPHDENLVKAEKEKQLKYLDLAHEVVDMWEVDSAIIVPIVVTANGIIAKSLDQHLKRLSLGAWVKGLIQKAVLLDTARIVRRFLSLES

SEQ ID NO: 28048 - protein, 1194 aa, Autographa gamma
MLTRQKARAAARPPPPDSSPSSASQLPDHVPAPAPAVASSSSDEYYSPPTSPTPVRRQGRRRPPSSLAPSGQPASSRAPAPGGVVRRMKWTLGINENVMRAYYGATEGGTNLTAYRARMLSLFQALEPGVSVSAQRLSDQVRVIQRNHMLDDSTLDRLRSEIQHSPAASTSPPVAAPVFGAPLTAPSDGEEDDGAITVSTQCNELIRSTLEDAIRDYRRSPPDQRPRLPRLPMHNRNKAIMGALDSLLPVYFESSEDLRDTHSILYCAALTACRVANIAMCHSNIATRPKPAVPAWQCRIEQRVAEARTLIAKLKAFKQGNSRPRVMRFVRRAYAGTDISPSEYTARVTERIDLFRQKVCAWANRIRRYKRRAERFHLNRMFQKDQRWVHRLWERPVSAMDGGCLPDGDATNSFWRSIWSAPVSHSEGDWIREVEQVCEPIQEMGAITISPQDVANAVRPMANWKTPGPDGLQNFWLKWLRSSHSCLASQFQSAVESASLPQFLTTGSTHLLHKTGSATDPKNYRPITCLPTVYKLLTSILRAKINEHIVSFSIMSASQNGCRSGSRGTKELLLIDTAICQQVRRSKKDLSTCWIDYKKAYDSVPHTWLMRVLELYKINATLRAFLMSCMGQWSTVLHYPGCRDIQQGGEPIRIERGIFQGDSLSPLWFCLALNPLSTLLENSGLGYSLRRGSRVISHLLYMDDLKLFATSGLQLMKLLKITESFSNSISMEFGVDKCAVMHVKRGGIVESQGIQLSDSINLRSLSATETYKYLGMSEALGINAADVKQSLQARFFGRLNKVLKSVLSGGNKVRAFNGWVMPVLMYSFGVLKWTQTELDALDRRVRTLLTANRMHHPRSSVMRLYIPRKCGGRGFLNAKTLHNREVCNLREYFLQVDVGMHRDVVVVDKGFTPLSLGKENWHKPVVLSVRDREDVWQSKELHGRYYRTLHGPDVDFLASVAWLRFGDLFGETEGFVCAIMDEVIMTNNYRKYIIKDGTVDICRACHCPGESLRHIISGCSRLANGEYLHRHNQVARIIHQQLALRYKLVESEVPYYRYVPDPVLENGRVTLYWDRSIITDRTIVANKPDIVVIDRSERRAIIVDVTIPHDGNLVKAEKEKQLKYLDLAHEVVDMWEVDAAMIVPIVVTANGIIAKSLDQHLKRLSLGTWVKGLIQKAVLLDTARIVRRFLSLES

SEQ ID NO: 28049 - protein, 915 aa, Autographa gamma
MCHSNIATRPKPAVPAWQCRIEQRVAEARTLIAKLKAFKQGNSRPRVMRFVRRAYAGTDISPSEYTARVTERIDLFRQKVCAWANRIRRYKRRAERFHLNRMFQKDQRWVHRLWERPVKAMDGGCLPDGDATNSFWRSIWSAPVSHSEGDWIREVEQVCEPIQEMGAITISPQDVSNAVRPMANWKTPGPDGLQNFWLKWLRSSHSCLASQFQSAVESASLPQFLTTGSTHLLHKTGSATDPKNYRPITCLPTVYKLLTSILRAKINEHIVSFSIMSASQNGCRSGSRGTKELLLIDTAICQQVRRSKKDLSTCWIDYKKAYDSVPHTWLMRVLELYKINATLRAFLMSCMGQWSTVLHYPGCRDIQQGGEPIRIERGIFQGDSLSPLWFCLALNPLSTLLENSGLGYSLWRGSRVISHLLYMDDLKLFATNGLQLMKLLKITESFSNSISMEFGVDKCAVMHVKRGGIVESQGIQLSDSINLRSLSATETYKYLGMSEALGINAADVKQSLQARFFGRLNKVLKSVLSGGNKVRAFNGWVMPVLMYSFGVLKWTQTELDALDRRVRTLLTANRMHHPRSSVMRLYIPRKCGGRGFLNAKTLHNREVCNLREYFLQVDVGMHRDVVVVDKGFTPLSLGKENWHKPVVLSVKDREDVWQSKELHGRYYRTLHGPDVDFLASVAWLRFGDLFGETEGFVCAIMDEVIMTNNYRKYIIKDGTVDKCRACHCPGESLRHIISGCSRLANGEYLHRHNQVARIIHQQLALRYKLVESEVPYYRYVPDPVLENGRVTLYWDRSIITDRTIVANKPDIVVIDRSERRAIIVDVTIPHDGNLVKAEKEKQLKYLDLAHEVVDMWEVDAAMIVPIVVTANGIIAKSLDQHLKRLSLGTWVKGLIQKAVLLDTARIVRRFLSLES

SEQ ID NO: 28050 - protein, 868 aa, Autographa pulchrina
MRFVRRAFAGTDISPSEYTARVTERIDLFKQRVYAWASRIRRYKRRVERFHLNRMFQKDQRWVHRAWERPVSAMDGGCLPDGDATNSFWRNIWSVPVSHSEGDWMREVEQVCEPIQEMGAITISPQDVANAVRPMVNWKTPGPDGLQNFWLKWLPSSHSCLASQFQSAVESASLPQFLTTGSTHLLHKTGSATDPKNYRPITCLPTVYKLLTSILRAKINEHVDSFSIMSASQNGCRSGSRGTKELLLIDTAICQQVRRSKKDLSTCWIDYKKAYDSVPHTWLMRVLELYKINTTLRTFLMSCMGQWSTVLHYPGCRDIQQGGEPIRIERGIFQGDSLSPLWFCLALNPLSTLLENSGLGYSLRRGSRVISHLLYMDDLKLFATGGLQLMKLLKITEGFSNSISMEFGVDKCAVMHVKLGGIVESQGIQLSDFINLRSLSATETYKYLGMSEALGINVADVKQSLQARFFGRLNKVLKSVLSGGNKVRAFNGWVMPVLMYSFGVLKWTQTELDALDRRVRTLLTANRMHHPRSSVMRLYIPRKCGGRGFLNAKTLHNREVCNLREYFLQVDVGMHRDVVVVDKGFTPLSLGKENWHKPVVLSVKDRKDVWQNKELHGRYYRTLHGSDVDFLASVAWLRFGDLFGETEGFVCAIMDEVIMTNNYRKYIIKDGTVDICRACHCPGESLRHIISGCSRLANGEYLHRHNQVARIIHQQLALRYKLVESEVPYYRYVPDPVLENGRVTLYWDRSIITDRTIVANKPDIVVIDRSERRAIIVDITIPHDENLVKAEKEKQLKYLDLAHEVVDMWEVDSAIIVPIVVTVNGIIAKSLDQHLKRLALGAWVKGLIQKAVLLDTARIVRRFLSLES

SEQ ID NO: 28051 - protein, 1107 aa, Autographa pulchrina
MKWTQSINENVMRAYYGATEGGTNLTAYRARMLSLFQALEPGVSVSAQRLSDQVRVIQRNHRLDDSTLDRLRSEIQHSPAASTSLPVATPVSGAPPTAPSDGEEDDGAITVSTQCSELIRSTLEDAIRDYRKSPPDQRPRLPRLPMHNRNKAIMGALDSLLPVYFESSEDLRDTHSILCCAALTACRVANVAICHSNIATRPKPAVPAWQYRIEQRVAEARTLIAKLIAFKQGNSRPRVMRFVRRAFAGTDISSSEYTARVTERIDLFKQRVYAWASRIRRYKRRVERFHLNRMFQKDQRWVHRAWERPVSAMDGGCLPDGDATNSFWRNIWSVPVSHSEGDWMREVEQVCEPIQEMGAITISPQDVANAVRPMVNWKTPGPDGLQNFWLKWLPSSHSCLASQFQSAVESASLPQFLTTGSTHLLHKTGSATDPKNYRPITCLPTVYKLLTSILRAKINEHVDSFSIMSASQNGCRSGSRGTKELLLIDTAICQQVRRSKKDLSTCWIDYKKAYDSVPHTWLMRVLELYKINTTLRTFLMSCMGQWSTVLHYPGCRDIQQGGEPIRIERGIFQGDSLSPLWFCLALNPLSTLLENSGLGYSLRRGSRVISHLLYMDDLKLFATGGLQLMKLLKITEGFSNSISMEFGVDKCAVMHVKRGGIVESQGIQLSDFINLRSLSATETYKYLGMSEALGINVADVKQSLQARFFGRLNKVLKSVLSGGNKVRAFNGWVMPVLMYSFGVLKWTQTELDALDRRVRTLLTANRMHHPRSSVMRLYIPRKCGGRGFLNAKTLHNREVCNLREYFLQVDVGMHRDVVVVDKGFTPLSLGKENWHKPVVLSVKDRKDVWQNKELHGRYYRTLHGSDVDFLASVAWLRFGDLFGETEGFVCAIMDEVIMTNNYRKYIIKDGTVDICRACHCPGESLRHIISGCSRLANGEYLHRHNQVARIIHQQLALRYKLVESEVPYYRYVPDPVLENGRVTLYWDRSIITDRTIVANKPDIVVIDRSERRAIIVDITIPHDENLVKAEKEKQLKYLDLAHEVVDMWEVDSAIIVPIVVTANGIIAKSLDQHLKRLALGAWVKGLIQKAVLLDTARIVRRFLSLES

SEQ ID NO: 28052 - protein, 1091 aa, Autographa gamma
MQCNPASYANDVLKKHNNIIKALEPGVSVSAQRLSDQVRVIQRNHMLDDSTLDRLRSEIQHSPAASTSPPVAAPVFGAPLTAPSDGEEDDGAITVSTQCNELIRSTLEDAIRDYRRSPPDQRPRLPRLPMHNRNKAIMGALDSLLPVYFESSEDLRDTHSILYCAALTACRVANIAMCHSNIAARPKPAVPAWQCRIEQRVAEARTLIAKLKAFKQGNSRPRVMRFVRRAYAGTDISPSEYTARVTERIDLFRQKVCAWANRIRRYKRRAERFHLNRMFQKDQRWVHRLWERPVSAMDGGCLPDGDATNSFWRSIWSAPVSHSEGDWIREVEQVCEPIQEMGAITISPQDVANAVRPMANWKTPGPDGLQNVWLKWLRSSHSCLASQFQSAVESASLPQFLTTGSTHLLHKTGSATDPKNYRPITCLPTVYKLLTSILRAKINEHIVSFSIMSASQNGCRSGSRGTKELLLIDTAICQQVRRSKKDLSTCWIDYKKAYDSVPHTWLMRVLELYKINATLRAFLMSCMGQWSTVLHYPGCRDIQQGGEPIRIERGIFQGDSLSPLWFCLALNPLSTLLENSGLGYSLRRGSRVISHLLYMDDLKLFATSGLQLMKLLKITESFSNSISMEFGVDKCAVMHVKRGGIVESQGIQLSDSINLRSLSATETYKYLGMSEALGINAADVKQSLQARFFGRLNKVLKSVLSGGNKVRAFNGWVMPVLMYSFGVLKWTQTELDALDRRVRTLLTANRMHHPRSSVMRLYIPRKCGGRGFLNAKTLHNREVCNLREYFLQVDVGMHRDVVVVDKGFTPLSLGKENWHKPVVLSVKDREDVWQSKELHGRYYRTLHGPDVDFLASVAWLRFGDLFGETEGFVCAIMDEVIMTNNYRKYIIKDGTVDICRACHCPGESLRHIISGCSRLANGEYLHRHNQVARIIHQQLALRYKLVESEVPYYRYVPDPVLENGRVTLYWDRSIITDRTIVANKPDIVVIDRSERRAIIVDVTIPHDGNLVKAEKEKQLKYLDLAHEVVDMWEVDAAMIVPIVVTANGIIAKSLDQHLKRLSLGTWVKGLIQKAVLLDTARIVRRFLSLES

SEQ ID NO: 28053 - protein, 962 aa, Autographa pulchrina
MHNRNKAIMGALDSLLPVYFESSEDLRDTHSILYCAALTACRVANVAICHSNIATRPKPAVPAWQCRIEQRVAEARTLIAKLIAFKQGNSRPRVMRFVRRAFAGTDISPSEYTARVTERIDLFKQKVYAWANRIRRYKRRVERFHLNRMFQKDQRWVHRAWERPVSAVDGGCLPDGDATNSFWRSIWSVPVSHSEGDWMREVEQVCEPIQEMGAITISPQDVANAVRPMANWKTPGPDGLQNFWLKWFPSSHSCLASQFQSAVESASLPQFLTTGSTHLLHKTGSATDPKNYRPITCLPTVYKLLTSILRAKINKHVDSFSIMSASQNGCRSGSRGTKELLLIDTAICQQVRSSKKDLSTCWIDYKKAYDSVPHTWLMRVLELYKINTTLRAFLMSCMGQWSTVLHYPGCRDIQQGGEPIRIERGIFQGDSLSPLWFCLALNPLSTLLENSGLGYSLRRGSQVISHLLYMDDLKLFATSGLQLMKLLKITESFSNSISMEFGVDKCAVMHVKRGGIVESQGIQLSDSINLRSLSATETYKYLGMSEALGINVADVKQSLQARFFGRLNKVLKSVLSGGNKVRAFNGWVMPVLMYSFGVLKWTQTELDALDRRVRTLLTANRMHHPRSSVMRLYIPRKCGGRGFLNAKTLHNREVCNLREYFLEVDVGMHRDVVVVDKGLTPLSLGKENWHKPVVLSVKDRKDVWQSKELHGRYYRTLHGPDVDFLASVAWLRFGDLFGETEGFVCAIMDEVIMTNNYRKYIIKDGTVDICRACHCPGESLRHIISGCSRLANGEYLHRHNQVARIIHQQLALRYKLVESEVPYYRYVPDPVLESGRVTLYWDRSIITDRTIIANKPDIVVIDRSERRAIIVDITIPHDENLVKAEKEKQLKYLDLAHEVVDMWEVDSAIIVPIVVTANGIIAKSLDQHLKRLSLGAWVKGLIQKAVLLDTARIVRRFLSLES

SEQ ID NO: 28054 - protein, 1194 aa, Autographa pulchrina
MLTRQKARAAARPPPPDSSPSSASQLPDQVPAPAPAIASSSSDEYYSPPTSPTPVRRQGRRRPPSSLAPAGQPASNRAPAPGGDVRRMKWTQSINENVMRAYYGATEGGTNLTAYRARMLSLFQALEPGVNVSAQRLSDQVRVIQRNHRLDDSTLDRLRSEIQHSPAASTSLPVVAPVPGAPPTAPDDGEEDDGAITVSTQCSELIRSTLEDAIRDYLKSPPDQRPRLPRLPMHNRNKAIMGALDSLLPVYFESSEDLRDTHSILYCAALTACRVANVAICHSNIATRPKPAVPAWQCRIEQRVAEARTLIAKLIAFKQGNSRPRVMRFVRRAFAGTDISPSEYTARVTERIDLFKQKVYAWANRIRRYKRRVERFHLNRMFQKDQRWVHRAWERPVSAVDGGCLPDGDATNSFWRSIWSVPVSHSEGDWMREVEQVCEPIQEMGAITISPQDVANAVRPMANWKTPGPDGLQNFWLKWFPSSHSCLASQFQSAVESASLPQFLTTGSTHLLHKTGSATDPKNYRPITCLPTVYKLLTSILRAKINKHVDSFSIMSASQNGCRSGSRGTKELLLIDTAICQQVRRSKKDLSTCWIDYKKAYDSVPHTWLMRVLELYKINTTLRAFLMSCMGQWSTVLHYPGCRDIQQGGEPIRIERGIFQGDSLSPLWFCLALNPLSTLLENSGLGYSLRRGSQVISHLLYMDDLKLFATSGLQLMKLLKITESFSNSISMEFGVDKCAVMHVKRGGIVESQGIQLSDSINLRSLSATETYKYLGMSEALGINVADVKQSLQARFFGRLNKVLKSVLSGGNKVRAFNGWVMPVLMYSFGVLKWTQTELDALDRRVRTLLTANRMHHPRSSVMRLYIPRKCGGRGFLNAKTLHNREVCNLREYFLEVDVGMHRDVVVVDKGLTPLSLGKENWHKPVVLSVKDRKDVWQSKELHGRYYRTLHGPDVDFLASVAWLRFGDLFGETEGFVCAIMDEVIMTNNYRKYIIKDGTVDICRACHCPGESLRHIISGCSRLANGEYLHRHNQVARIIHQQLALRYKLVESEVPYYRYVPDPVLESGRVTLYWDRSIITDRTIIANKPDIVVIDRSERRAIIVDITIPHDENLVKAEKEKQLKYLDLAHEVVDMWEVDSAIIVPIVVTANGIIAKSLDQHLKRLSLGAWVKGLIQKAVLLDTARIVRRFLSLES

SEQ ID NO: 28055 - protein, 868 aa, Autographa pulchrina
MRFVRRAFAGTDISPSEYTARVTERIDLFKQKVYAWANRIRRYKRRVERFHLNRMFQKDQRWVHRAWERPVSAVDGGCLPDGDATNSFWRSIWSVPVSHSEGDWMREVEQVCEPIQEMGAITISPQDVANAVRPMANWKTPGPDGLQNFWLKWFPSSHSCLASQFQSAVESASLPQFLTTGSTHLLHKTGSATDPKNYRPITCLPTVYKLLTSILRAKINKHVDSFSIMSASQNGCRSGSRGTKELLLIDTAICQQVRRSKKDLSTCWIDYKKAYDSVPHTWLMRVLELYKINTTLRAFLMSCMGQWSTVLHYPGCRDIQQGGEPIRIERGIFQGDSLSPLWFCLALNPLSTLLENSGLGYSLRRGSQVISHLLYMDDLKLFATSGLQLMKLLKITESFSNSISMEFGVDKCAVMHVKRGGIVESQGIQLSDSINLRSLSATETYKYLGMSEALGINVADVKQSLQARFFGRLNKVLKSVLSGGNKVRAFNGWVMPVLMYSFGVLKWTQTELDALDRRVRTLLTANRMHHPRSSVMRLYIPRKCGGRGFLNAKTLHNREVCNLREYFLEVDVGMHRDVVVVDKGLTPLSLGKENWHKPVVLSVKDRKDVWQSKELHGRYYRTLHGPDVDFLASVAWLRFGDLFGETEGFVCAIMDEVIMTNNYRKYIIKDGTVDICRACHCPGESLRHIISGCSRLANGEYLHRHNQVARIIHQQLALRYKLVESEVPYYRYVPDPVLESGRVTLYWDRSIITDRTIIANKPDIVVIDRSERRAIIVDITIPHDENLVKAEKEKQLKYLDLAHEVVDMWEVDSAIIVPIVVTANGIIAKSLDQHLKRLSLGAWVKGLIQKAVLLDTARIVRRFLSLES

SEQ ID NO: 28056 - protein, 1194 aa, Autographa pulchrina
MLTRQKARAAARPPPPDSSPSSASQLPDQVPAPAPAIASSSSDEYYSPPTSPTPVRRQGRRRPPSSLAPAGQPASNRAPAPGGDVRRMKWTQSINENVMRAYYGATEGGTNLTAYRARMLSLFQALEPGVNVSAQRLSDQVRVIQRNHRLDDSTLDRLRSEIQHSPAASTSLPVVAPVLGAPPTAPDDGEEDDGAITVSTQCSELIRSTLEDAIRDYLKSPPDQRPRLPRLPMHNRNKAIMGALDSLLPVYFESSEDLRDTHSILYCAALTACRVANVAICHSNIATRPKPAVPAWQCRIEQRVAEARTLIAKLIAFKQGNSRPRVMRFVRRAFAGTDISPSEYTARVTERIDLFKQKVYAWANRIRRYKRRVERFHLNRMFQKDQRWVHRAWERPVSAVDGGCLPDGDTTNSFWRSIWSVPVSHSEGDWMREVEQVCEPIQEMGAITISPQDVANAVRPMANWKTPGPDGLQNFWLKWFPSSHSCLASQFQSAVESASLPQFLTTGSTHLLHKTGSATDPKNYRPITCLPTVYKLLTSILRAKINKHVDSFSIMSASQNGCRSGSRGTKELLLIDTAICQQVRRSKKDLSTCWIDYKKAYDSVPHTWLMRVLELYKINTTLRAFLMSCMGQWSTVLHYPGCRDIQQGGEPIRIERGIFQGDSLSPLWFCLALNPLSTLLENSGLGYSLRRGSQVISHLLYMDDLKLFATSGLQLMKLLKITESFSNSISMEFGVDKCAVMHVKRGGIVESQGIQLSDSINLRSLSATETYKYLGMSEALGINVADVKQSLQARFFGRLNKVLKSVLSGGNKVRAFNGWVMPVLMYSFGVLKWTQTELDALDRRVRTLLTANRMHHPRSSVMRLYIPRKCGGRGFLNAKTLHNREVCNLREYFLEVDVGMHRDVVVVDKGLTPLSLGKENLHKPVVLSVKDRKDVWQSKELHGRYYRTLHGPDVDFLASVAWLRFGDLFGETEGFVCAIMDEVIMTNNYRKYIIKDGTVDICRACHCPGESLRHIISGCSRLANGEYLHRHNQVARIIHQQLALRYKLVESEVPYYRYVPDPVLESGRVTLYWDRSIITDRTIIANKPDIVVIDRSERRAIIVDITIPHDENLVKAEKAKQLKYLDLAHEVVDMWEVDSAMIVPIVVTANGIIAKSLDQHLKRLSLGAWVKGLIQKAVLLDTARIVRRFLSLES

SEQ ID NO: 28057 - protein, 1194 aa, Autographa pulchrina
MLTRQKARAAARPPPPDSSPSSASQLPDQVPAPAPAIASSSSDEYYSPPTSPTPVRRQGRRRPPSSLAPAGQPASNRAPAPGGDVRRMKWTQSINENVMRAYYGATEGGTNLTAYRARMLSLFQALEPGVNVSAQRLSDQVRVIQRNHRLDDSTLDRLRSEIQHSPAASTSLPVVAPVPGAPPTAPDDGEEDDGAITVSTQCSELIRSTLEDAIRDYLKSPPDQRPRLPRLPMHNRNKAIMGALDSLLPVYFESSEDLRDTHSILYCAALTACRVANVAICHSNIATRPKPAVPAWQCRIEQRVAEARTLIAKLIAFKQGNSRPRVMRFVRRAFAGTDISPSEYTARVTERIDLFKQKVYAWANRIRRYKRRVERFHLNRMFQKDQRWVHRAWERPVSAVDGGCLPDGDATNSFWRGIWSVPVSHSEGDWMREVEQVCEPIQEMGAITISPQDVANAVRPMANWKTPGPDGLQNFWLKWFPSSHSCLASQFQSAVESASLPQFLTTGSTHLLHKTGSATDPKNYRPITCLPTVYKLLTSILRAKINKHVDSFSIMSASQNGCRSGSRGTKELLLIDTAICQQVRRSKKDLSTCWIDYKKAYDSVPHTWLMRVLELYKINTTLRAFLMSCMGQWSTVLHYPGCRDIQQGGEPIRIERGIFQGDSLSPLWFCLALNPLSTLLENSGLGYSLRRGSQVISHLLYMDDLKLFATSGLQLMKLLKITESFSNSISMEFGVDKCAVMHVKRGGIVESQGIQLSDSINLRSLSATETYKYLGMSEALGINVADVKQSLQARFFGRLNKVLKSVLSGGNKVRAFNGWVMPVLMYSFGVLKWTQTELDALDRRVRTLLTANRMHHPRSSVMRLYIPRKCGGRGFLNAKTLHNREVCNLREYFLEVDVGMHRDVVVVDKGLTPLSLGKENWHKPVVLSVKDRKDVWQSKELHGRYYRTLHGPDVDFLASVAWLRFGDLFGETEGFVCAIMDEVIMTNNYRKYIIKDGTVDICRACHCPGESLRHIISGCSRLANGEYLHRHNQVARIIHQQLALRYKLVESEVPYYRYVPDPVLESGRVTLYWDRSIITDRTIIANKPDIVVIDRSERRAIIVDITIPHDENLVKAEKEKQLKYLDLAHEVVDMWEVDSAIIVPIVVTANGIIAKSLDQHLKRLSLGAWVKGLIQKAVLLDTARIVRRFLSLES

SEQ ID NO: 28058 - protein, 1046 aa, Autographa gamma
MLDDSTLDRLRSEIQHSPAASTSLPVMAPVFGAPLTAPSDGEEDDGAITVSTQCNELIRSTLEDAIRDYRRSPPDQRPRLPRLPMHNRNKAIMGALDSLLPVYFESSEDLRDTHSILYCAALTACRVANIAMCHSNIATRPKPAVPAWQCRIEQRVAEARTLIAKLKAFKQGNSRPRVMRFVRRAYAGTDISPSEYTARVTERIDLFRQKVCAWANRIRRYKRRAERFHLNRMFQKDQRWVHRLWERPVSAMDGGCLPDGDATNSFWRSIWSAPVSHSEGDWIREVEQVCEPIQEMGAITISPQDVANAVRPMANWKTPGPDGLQNFWLKWLRSSHSCLASQFQSAVESASLPQFLTTGSTHLLHKTGSATDPKNYRPITCLPTVYKLLTSILRAKINEHIVSFSVMSASQNGCRSGSRGTKELLLIDTAICQQVRRSKKDLSTCWIDYKKAYDSVPHTWLMRVLELYKINATLRAFLMSCMGQWSTVLHYPGCRDIQQGGEPIRIERGIFQGDSLSPLWFCLALNPLSTLLENSGLGYSLRRGSRVISHLLYMDDLKLFATSGLQLMKLLKITENFSNSISMEFGVDKCAVMHVKRGGIVESQGIQLSDSINLRSLSATETYKYLGMSEALGINAADVKQSLQARFFGRLNKVLKSVLSGGNKVRAFNGWVMPVLMYSFGVLKWTQTELDALDRRVRTLLTANRMHHPRSSVMRLYIPRKCGGRGFLNAKTLHNREVCNLREYFLQVDVGMHRDVVVVDKGFTPLSLGKKNWHKPVVLSVKDREDVWQNKELHGRHYRTLHGPDVDFLASVAWPRFGDLFGETEGFVCAIMDEVIMTNNYQKYIIKDGTVDICRACHCPGESLRHIISGCSRLANGEYLHRHNQVARIIHQQLALRYKLVESEVPYYRYVPDPVLENGRVTLYWDRSIITDRTIVANKPDIVVIDRSERRAIIVDVTIPHDGNLVKAEKEKQLKYLDLAHEVVDMWEVDAAMIVPIVVTANGIIAKSLDQHLKRLSLGTWVKGLIQKAVLLDTARIVRRFLSLES

SEQ ID NO: 28059 - protein, 1194 aa, Autographa pulchrina
MLTRQKARAAARPPPPDSSPSSASQLPDQVPAPAPAIASSSSDEYYSPPTSPTPVRRQGRRRPPSSLAPAGQPASNRAPAPGGDVRRMKWTQSINENVMRAYYGATEGGTNLTAYRARMLSLFQALEPGVNVSAQRLSDQVRVIQRNHRLDDSTLDRLRSEIQHSPAASTSLPVVAPVPGAPPTAPDDGEEDDGAITVSTQCSELIRSTLEDAIRDYLKSPPDQRPRLPRLPMHNRNKAIMGALDSLLPVYFESSEDLRDTHSILYCAALAACRVANVAICHSNIATRPKPAVPAWQCRIEQRVAEARTLIAKLIAFKQGNSRPRVMRFVRRAFAGTDISPSEYTARVTERIDLFKQKVYAWANRIRRYKRRVERFHLNRMFQKDQRWVHRAWERPVSAVDGGCLPDGNATNSFWRSIWSVPVSHSEGDWMRGVEQVCEPIQEMGAITISPQDVANAVRPMANWKTPGPDGLQNFWLKWFPSSHSCLASQFQSAVESASLPQFLTTGSTHLLHKTGSATDPKNYRPITCLPTVYKLLTSILRAKINKHVDSFSIMSASQNGCRSGSRGTKELLLIDTAICQQVRRSKKDLSTCWIDYKKAYDSVPHTWLMRVLELYKINTTLRAFLMSCMGQWSTVLHYPGCRDIQQGGEPIRIERGIFQGDSLSPLWFCLALNPLSTLLENSGLGYSLRRGSQVISHLLYMDDLKLFATSGLQLMKLLKITESFSNSISMEFGVDKCAVMHVKRGGIVESQGIQLSDSINLRSLSATETYKYLGMSEALGINVADVKQSLQARFFGRLNKVLKSVLSGGNKVRAFNGWVMPVLMYSFGVLKWTQTELDALDRRVRTLLTANRMHHPRSSVMRLYIPRKCGGRGFLNAKTLHNREVCNLREYFLEVDVGMHRDVVVVDKGLTPLSLGKENWHKPVVLSVKDRKDVWQSKELHGRYYRTLHGPDVDFLASVAWLRFGDLFGETEGFVCAIMDEVIMTNNYRKYIIKDGTVDICRACHCPGESLRHIISGCSRLANGEYLHRHNQVARIIHQQLALRYKLVESEVPYYRYVPDPVLESGRVTLYWDRSIITDRTIIANKPDIVVIDRSERRAIIVDITIPHDENLVKAEKEKQLKYLDLAHEVVDMWEVDSAIIVPIVVTANGIIAKSLDQHLKRLSLGAWVKGLIQKAVLLDTARIVRRVLSLES

SEQ ID NO: 28060 - protein, 1090 aa, Autographa pulchrina
MLTRQKARAAARPPPPDSSPSSASQLPDHVLTPAPAVASSSSDEYYSPPTSPTPVRRQGRRRPPSSLAPAGQPASNRAPAPGGDVRRMKWTQNINENVMRAYYGATEGGTNLTAYRARMLSLFQALEPGVSVSAQRLSDQVRVIQRNHRLDDSTLDRLRSEIQHSPAASTSLPVAAPVSGAPPTAPSDGEEDDGAITVSTQCSELIRSTLEDAIRDYRKSPPDQRPRLPRLPMHNRNKAIMGALDSLLPFYFESSEDLRDTHSILYCAAPTACRVANVAICHSNIATRPKPAVPAWQCRIEQRVAEARTLIAKLIAFKQGNSRPRVMRFVRRAFAGTDISPSEYTARVTERIDLFKQRVYAWASRIRRYKRRVERFHLNRMFQKDQRWVHRAWERPVSAMDGGCLPDGDATNSFWRSIWSVPVSHSEGDWMREVEQVCEPIQEMGAITISPQDVANAVRPMVNWKTPGPDGLQNFWLKWLPSSHSCLASQFQSAVESASLPQFLTTGSTHLLHKTGSATDPKNYRPITCLPTVYKLLTSILRAKINEHVVSFSIMSASQNGCRSGSRGTKELLLIDTAICQQVRRSKKDLSTCWIDYKKAYDSVPHTWLMRVLELYKINTTLRAFLMSCMGQWSTVLHYPGCRDIQQGGEPIRIERGIFQGDSLSPLWFCLALNPLSTLLENSGLGYSLRRGSRVISHLLYMDDLKLFATGGLQLMKLLKITEGFSNSISMEFGVDKCAVMHVKRGGIVESQGIQLSDSINLRSLSATETYKYLGMSEALGINAADVKQSLQARFFGRLNKVLRSVLSGGNKVRAFNGWVMPVLMYSFGVLKWTQTELDALDRRVRTLLTANRMHHPRSSVMRLYIPRKCGGRGFLNAKTLHNREVYNLREYFLQADVGMHRDVVVVDKGFTPLSLGKENWHKPVVLSVKDRENVWQSKELHGRYYRTLHGSDVDFLASVAWLRFGDLFGETEGFVCAIMDEVIMTNNYRKYIIKDGTVDICRACHCPGESLRHIISGCSRLANGEYLHRHNQVARIIYQQLALRYKLVESEVPYYRYVPDPVLENGRVTLYWDRSIITDRTIVANKPVV

SEQ ID NO: 28061 - protein, 962 aa, Autographa pulchrina
MHNRNKAIMGALDSLLPFYFESSEDLRDTHSILYCAALTACRVANVAICHSNIATRPKPAVPAWQCRIEQRVAEARTLIAKLIAFKQGNSRPRVMRFVRRAFAGTDISPSEYTARVTERIDLFKQKVYAWANRIRRYKRRVERFHLNRMFQKDQRWVHRAWERPVSAVDGGCLPDGDATNSFWRSIWSVPVSHSEGDWMREVEQVCEPIQEMGAITISPQDVANAVRPMANWKTPGPDGLQNFWLKWFPSSHSCLASQFQSAVESASLPQFLTTGSTHLLHKTGSATDPKNYRPITCLPTVYKLLTSILRAKINKHVDSFSIMSASQNGCRSGSRGTKELLLIDTAICQQVRRSKKDLSTCWIDYKKAYDSVPHTWLMRVLELYKINTTLRAFLMSCMGQWSTVLHYPGCRDIQQGGEQIRIERGIFQGDSLSPLWFCLALNPLSTLLENSGLGYSLRRGSQVISHLLYMDDLKLFATSGLQLMKLLKITESFSNSISMEFGIDKCAVMHVKRGGIVEPQGIQLSDSINLRSLSATETYKYLGMSEALGINVADVKQSLQARFFGRLNKVLKSVLSGGNKVRAFNGWVMPVLMYSFGVLKWTQTELDALDRRVRTLLTANRMHHPRSSVMRLYIPRKCGGRGFLNAKTLHNREVCNLREYFLQVDVGMHRDVVVVDKGLTPLSLGKENWHKPIVLSVKDREVVWQSKELHGRYYRTLHGSDVDFLASVAWLRFGDLFGETEGFVCAIMDEVIMTNNYRKYIIKDGTVDMCRACHCPGESLRHIISGCSRLANGEYLHRHNQVARIIHQQLALRYKLVESEMPYYRYVPDPVLENGRVTLYWDRSIITDRTIVANKPDIVVIDRSERRAIIVDITIPHDENLVKAEKEKQLKYLDLAHEVVDMWEVDSAIIVPIVVTANGIIAKSLDQHLKRLSLGAWVKGLIQKAVLLDTARIVRRFLSLEP

SEQ ID NO: 28062 - protein, 868 aa, Autographa pulchrina
MRFVRRTFAGTDISPSEYSARVTERIDLFKQRVYAWASRIRRYKRRVERFHLNRMFQKDQRWVHRAWERPVSAMDGGCLPDGDATNSFWRSIWSVPVSHSEGDWMREVEQVCEPIQEMGAITISPQDVANAVRPMVNWKTPGPDGLQNFWLKWLPSSHSCLASQFQSAVESASLPQFLTTGSTHLLHKTGSATDPKNYRPITCLPTVYKLLTSILRAKINEHVVSFSIMSASQNGCRSGSRGPKELLLIDTAICQQVRRSKKDLSTCWIDYKKAYDSVPHTWLMRVLELYKINTTLRAFLMSCMGQWSTVLHYPGCRDIQQGGEPIRIERGIFQGDSLSPLWFCLALNPLSTLLENSGLGYSLRRGSRVISHLLYMDDLKLFATGELQLMKLLKITEGFSNSISMEFGVDKCAVMHVKRGGIVESQGIQLSDSINLRSLSATETYKYLGMSEALGINAADVKQSLQARFFGRLNKVLRSVLSGGNKVRAFNGWVMPVLMYSFGVLKWTQTELDALDRRVRTLLTANRMHHPRSSVMRLYIPRKCGGRGFLNAKTLHNREVYNLREYFLQADVGMHRDVVVVDKGFTPLSLGKENWHKPVVLSVKDRENVWQSKELHGRYYRTLHGSDVDFLASVAWLRFGDLFGETEGFVCAIMDEVIMTNNYRKYIIKDGTVDICRACHCPGESLRHIISGCSRLANGEYLHRHNQVARIIHQQLALRYKLVESEVPYYRYVPDPVLENGRVTLYWDRSIITDRTIVANKPDIVVIDRSERRAIIVDITIPHDENLVKAEKEKQLKYLDLAHEVVDMWEVDSAIIVPIVVTANGIIAKSLDQHLKRLSLGAWVKGLIQKAVLLDTARIVRRFLSLES

SEQ ID NO: 28063 - protein, 1194 aa, Autographa pulchrina
MLTRLKARAAARPPPPDSSPSSASQLPDHVPTPAPAVASSSSDEYYSPPTSPTPVRRQGRRRPPSSLAPAGQPASNRAPAPGGDVRRMKWTQSINENVMRAYYGATEGGTNLTAYRARMLSLFQALEPGVSVSAQRLSDQVRVIQRNHRLDDSTLDRLRSEIQHSPAASTSLPVATPVSGAPPTEPSDGEEDDGAITVSTQCSELIRSTLEDAIRDYRKSPPDQRPRLPRLPMHNRNKAIMGALDSLLPVYFESSEDLRDTHSILYCAALTACRVANVAICHSNIATRPKPAVPAWQYRIEQRVAEARTLIAKLIAFKQGNSRPRVMRFVRRAFAGTDISPSEYTARVTERIDLFKQRVYAWASRIRRYKRRVERFHLNRMFQKDQRWVHRAWERPVSAMDGGCLPDGDATNSFWRNIWSVPVSHSEGDWMREVEQVCEPIQEMGAITISPQDVANAVRPMVNWKTPGPDGLQNFWLKWLPSSHSCLASQFQSAVESASLPQFLTTGSTHLLHKTGSATDPKNYRPITCLPTVYKLLTSILRAKINEHVDSFSIMSASQNGCRSGSRGTKELLLIDTAICQQVRRSKKDLSTCWIDYKKAYDSVPHTWLMRVLELYKINTTLRTFLMSCMGQWSTVLHYPGCRDIQQGGEPIRIERGIFQGDSLSPLWFCLALNPLSTLLENSGLGYSLRRGSRVISHLLYMDDLKLFATGGLQLMKLLKITEGFSNSISMEFGVDKCAVMHVKRGGIVESQGIQLSDFINLRSLSATETYKYLGMSEALGINVADVKQSLQARFFGRLNKVLKSVLSGGNKVRAFNGWVMPVLMYSFGVLKWTQTELDALDRRVRTLLTANRMHHPRSSVMRLYIPRKCGGRGFLNAKTLHNREVCNLREYFLQVDVGMHRDVVVVDKGFTPLSLGKENWHKPVVLSVKDRKDVWQNKELHGRYYRTLHGSDVDFLASVAWLRFGDLFGETEGFVCAIMDEVIMTNNYRKYIIKDGTVDICRACHCPGESLRHIISGCSRLANGEYLHRHNQVARIIHQQLALRYKLVESEVPYYRYVPDPVLENGRVTLYWDRSIITDRTIVANKPDIVVIDRSERRAIIVDITIPHDENLVKAEKEKQLKYLDLAHEVVDMWEVDSAIIVPIVVTVNGIIAKSLDQHLKRLALGAWVKGLIQKAVLLDTARIVRRFLSLES

SEQ ID NO: 28064 - protein, 1194 aa, Autographa pulchrina
MLTRQKARAAARPPPPDSSPSSASQLPDQVPAPAPAIASSSSDEYYSPPTSPTPVRRQGRRRPPSSLAPAGQPASNRAPAPGGDVRRMKWTQSINENVMRAYYGATEGGTNLTAYRARMLSLFQALEPGVNVSAQRLSDQVRVIQRNHRLDDSTLDRLRSEIQHSPAASTSLPVVAPVLGAPPTAPDDGEEDDGAITVSTQCSELIRSTLEDAIRDYLKSPPDQRPRLPRLPMHNRNKAIMGALDSLLPVYFESSEDLRDTHSILYCAALTACRVANVAICHSNIATRPKPAVPAWQCRIEQRVAEARTLIAKLIAFKQGNSRPRVMRFVRRAFAGTDISPSEYTARVTERIDLFKQKVYAWANRIRRYKRRVERFHLNRMFQKDQRWVHRAWERPVSAVDGGCLPDGDTTNSFWRSIWSVPVSHSEGDWMREVEQVCEPIQEMGAITISPQDVANAVRPMANWKTPGPDGLQNFWLKWFPSSHSCLASQFQSAVESASLPQFLTTGSTHLLHKTGSATDPKNYRPITCLPTVYKLLTSILRAKINKHVDSFSIMSASQNGCRSGSRGTKELLLIDTAICQQVRRSKKDLSTCWIDYKKAYDSVPHTWLMRVLELYKINTTLRAFLMSCMGQWSTVLHYPGCRDIQQGGEPIRIERGIFQGDSLSPLWFCLALNPLSTLLENSGLGYSLRRGSQVISHLLYMDDLKLFATSGLQLMKLLKITESFSNSISMEFGVDKCAVMHVKRGGIVESQGIQLSDSINLRSLSATETYKYLGMSEALGINVADVKQSLQARFFGRLNKVLKSVLSGGNKVRAFNGWVMPVLMYSFGVLKWTQTELDALDRRVRTLLTANRMHHPRSSVMRLYIPRKCGGRGFLNAKTLHNREVCNLREYFLEVDVGMHRDVVVVDKGLTPLSLGKENWHKPVVLSVKDRKDVWQSKELHGRYYRTLHGPDVDFLASVAWLRFGDLFGETEGFVCAIMDEVIMTNNYRKYIIKDGTVDICRACHCPGESLRHIISGCSRLANGEYLHRHNQVARIIHQQLALRYKLVESEVPYYRYVPDPVLESGRVTLYWDRSIITDRTIIANKPDIVVIDRSERRAIIVDITIPHDENLVKAEKEKQLKYLDLAHEVVDMWEVDSAMIVPIVVTANGIIAKSLDQHLKRLSLGAWVKGLIQKAVLLDTARIVRRFLSLES

SEQ ID NO: 28065 - protein, 1194 aa, Autographa pulchrina
MLTRQRARAAARPPPPDSSPSSASQLPDHVPTPAPAVASSSSDEYYSPPTSPTPVRRQGRRRPPSSLAPAGQPASNRAPAPGGDVRRMKWTQNINENVMRAYYGATEGGTNLTAYRARMLSLFQALEPGVSVSAQRLSDQVRVIQRNHRLDDSTLDRLRSEIQHSPAASTSLPVAAPVSGAPPTAPSDGEEDDGAITVSTQCSELIRSTLEDAIRDYRKSPPDQRPRLPRLPMHNRNKAIMGALDSLLPFYFESSEDLRDTHSILYCAALTACRVANVAICHSNIATRPKPAVPAWQCRIEQRVAEARTLIAKLIAFKQGNSRPRVMRFVRRAFAGTDISPSEYSARVTERIDLFKQRVYAWASRIRRYKRRVERFHLNRMFQKDQRWVHRAWERPVSAMDGGCLPDGDATNSFWRSIWSVPVSHSEGDWMREVEQVCEPIQEMGAITISPQDVANAVRPMVNWKTPGPDGLQNFWLKWLPSSHSCLASQFQSAVESASLPQFLTTGSTHLLHKTGSATDPKNYRPITCLPTVYKLLTSILRAKINEHVVSFSIMSASQNGCRSGSRGTKELLLIDTAICQQVRRSKKDLSTCWIDYKKAYDSVPHTWLMRVLELYKINTTLRAFLMSCMGQWSTVLHYPGCRDIQQGGEPIRIERGIFQGDSLSPLWFCLALNPLSTLLENSGLGYSLRRGSRVISHLLYMDDLKLFATGELQLMKLLKITEGFSNSISMEFGVDKCAVMHVKRGGIVESQGIQLSDSINLRSLSATETYKYLGMSEALGINAADVKQSLQARFFGRLNKVLRSVLSGGNKVRAFNGWVMPVLMYSFGVLKWTQTELDALDRRVRTLLTANRMHHPRSSVMRLYIPRKCGGRGFLNAKTLHNREVYNLREYFLQADVGMHRDVVVVDKGFTPLSLGKENWHKPVVLSVKDRENVWQSKELHGRYYRTLHGSDVDFLASVAWLRFGDLFGETEGFVCAIMDEVIMTNNYRKYIIKDGTVDICRACHCPGESLRHIISGCSRLANGEYLHRHNQVARIIHQQLALRYKLVESEVPYYRYVPDPVLENGRVTLYWDRSIITDRTIVANKPDIVVIDRSERRAIIVDITIPHDENLVKAEKEKQLKYLDLAHEVVDMWEVDSAIIVPIVVTANGIIAKSLDQHLKRLSLGAWVKGLIQKAVLLDTARIVRRFLSLES

SEQ ID NO: 28066 - protein, 1194 aa, Autographa pulchrina
MLTRQKARAAARPPPPDSSPSSASQLPDQVPAPAPAIASSSSDEYYSPPTSPTPVRRQGRRRPPSSLAPAGQPASNRAPAPGGDVRRMKWTQSINENVMRAYYGATEGGTNLTAYRARMLSLFQALEPGVNVSAQRLSDQVRVIQRNHRLDDSTLDRLRSEIQHSPAASTSLPVVAPVPGAPPTAPDDGEEDDGAITVSTQCSELIRSTLEDAIRDYLKSPPDQRPRLPRLPMHNRNKAIMGALDSLLPVYFESSEDLRDTHSILYCAALTACRVANVAICHSNIATRPKPAVPAWQCRIEQRVAEARTLIAKLIAFKQGNSRPRVMRFVRRAFAGTDISPSEYTARVTERIDLFKQKVYAWANRIRRYKRRVERFHLNRMFQKDQRWVHRAWERPVSAVDGGCLPDGDATNSFWRSIWSVPVSHSESDWMREVEQVCEPIQEMGAITISPQDVANAVRPMANWKTPGPDGLQNFWLKWFPSSHSCLASQFQSAVESASLPQFLTTGSTHLLHKTGSATDPNNYRPITCLPTIYKLLTSILRAKINKHVDSFSIMSASQNGCRSGSRGTKELLLIDTAICQQVRRSKKDLSTCWIDYKKAYDSVPHTWLMRVLELYKINTTLRAFLMSCMGQWSTVLHYPGCRDIQQGGEPIRIERGIFQGDSLSPLWFCLALNPLSTLLENSGLGYSLRRGSQVISHLLYMDDLKLFATSGLQLMKLLKITESFSNSISMEFGVDKCAVMHVKRGGIVESQGIQLSDSINLRSLSATETYKYLGMSEALGINVADVKQSLQARFFGRLNKVLKSVLSGGNKVRAFNGWVMPVLMYSFGVLKWTQTELDALDRRVRTLLTANRMHHPRSSVMRLYIPRKCGGRGFLNAKTLHNREVCNLREYFLEVDVGMHRDVVVVDKGLTPLSLGKENWHKPVVLSVKDRKDVWQSKELHGRYYRTLHGPDVDFLASVAWLRFGDLFGETEGFVCAIMDEVIMTNNYRKYIIKDGTVDICRACHCPGESLRHIISGCSRLANGEYLHRHNQVARIIHQQLALRYKLVESEVPYYRYVPDPVLESGRVTLYWDRSIITDRTIIANKPDIVVIDRSERRAIIVDITIPHDENLVKAEKEKQLKYLDLAHEVVDMWEVDSAIIVPIVVTANGIIAKSLDQHLKRLSLGAWVKGLIQKAVLLDTARIVRRFLSLES

SEQ ID NO: 28067 - protein, 962 aa, Autographa pulchrina
MHNRNKAIMGALDSLLPFYFESSEDLRDTHSILYCAALTACRVANVAICHSNIATRPKPAVPAWQCRIEQRVAEARTLIAKLIAFKQGNSRPRVMRFVRRAFAGTDISPSEYSARVTERIDLFKQRVYAWASRIRRYKRRVERFHLNRMFQKDQRWVHRAWERPVSAMDGGCLPDGDATNSFWRSIWSVPVSHSEGDWMREVEQVCEPIQEMGAITISPQDVANAVRPMVNWKTPGPDGLQNFWLKWLPSSHSCLASQFQSAVESASLPQFLTTGSTHLLHKTGSATDPKNYRPITCLPTAYKLLTSILRAKINEHVVSFSIMSASQNGCRSGSRGTKELLLIDTAICQQVRRSKKDLSTCWIDYKKAYDSVPHTWLMRVLELYKINTTLRAFLMSCMGQWSTVLHYPGCRDIQQGGEPIRIERGIFQGDSLSPLWFCLALNPLSTLLENSGLGYSLRRGSRVISHLLYMDDLKLFATGELQLMKLLKITEGFSNSISMEFGVDKCAVMHVKRGGIVESQGIQLSDSINLRSLSATETYKYLGMSEALGINAADVKQSLQARFFGRLNKVLRSVLSGGNKVRAFNGWVMPVLMYSFGVLKWTQTELDALDRRVRTLLTANRMHHPRSSVMRLYIPRKCGGRGFLNAKTLHNREVYNLREYFLQADVGMHRDVVVVDKGFTPLSLGKENWHKPVVLSVKDRENVWQSKELHGRYYRTLHGSDVDFLASVAWLRFGDLFGETEGFVCAIMDEVIMTNNYRKYIIKDGTVDICRACHCPGESLRHIISGCSRLANGEYLHRHNQVARIIHQQLALRYKLVESEVPYYRYVPDPVLENGRVTLYWDRSIITDRTIVANKPDIVVIDRSERRAIIVDITIPHDENLVKAEKEKQLKYLDLAHEVVDMWEVDSAIIVPIVVTANGIIAKSLDQHLKRLSLGAWVKGLIQKAVLLDTARIVRRFLSLES

SEQ ID NO: 28068 - protein, 1194 aa, Autographa gamma
MLTRQKARAAARPPPPDSSPSSASQLPDHVPAPAPAVASSSSDEYYSPPTSPTPVRRQGRRRPPSSLAPSGQPASNRAPAPGGVVRRMKWTLGINENVMRAYYGATEGGTNLTAYRARMLSLFQALEPGVSVSAQRLSDQVRVIQRNHMLDDSTLDRLRSEIQHSPAASTSLPVTAPVSCAPLTAPIDGEEDDGAITVSTQCTELIRSTLEDAIRVYRRSPPDQRPRLPRLPMHNRNKAIMGALDSLLPVYFESSEDLRDTHSILYCAALTACRVANIAMCHSNIATRPKPAVPAWQCRIEQRVAEARTLIAKLKAFKQGNSRPRVMRFVRRAYAGTDISPSEYTARVTERIDLFRQKVCAWANRIRRYKRRAERFHLNRMFQKDQRWVHRLWERPVSAMDGGCLPDGDATNSFWRSIWSAPVSHSEGDWIREVEQVCEPIQEMGAITISPQDVANAVRPMANWKTPGPDGLQNFWLKWLRSSHSCLASQFQSAVESASLPQFLTTGSTHLLHKTGSATDPKNYRPITCLPTVYKLLTSILRAKINEHIVSFSIMSASQNGCRSGSRGTKELLLIDTAICQQVRRSKKDLSTCWIDYKKAYDSVPHTWLMRVLELYKINATLRAFLMSCMGQWSTVLHYPGCRDIQQGGEPIRIERGIFQGDSLSPLWFCLALNPLSTLLENSGLGYSLRRGSRVISHLLYMDDLKLFATNGLQLMKLLKITESFSNSISMEFGVDKCAVMHVKRGGIVESQGIQLSDSINLRSLSATETYKYLGMSEALGINAADVKQSLQARFFGRLNKVLKSVLSGGNKVRAFNGWVMPVLMYSFGVLKWTQTELDALDRRVRTLLTANRMHHPRSSVMRLYIPRKCGGRGFLNAKTLHNREVCNLREYFLQVDVGMHRDVVLVDKGFTPLSLGKENWHKPVVLSVKDREDVWQSKELHGRYYRTLHGPDVDFLASVAWLRFGDLFGETEGFVCAIMDEVIMTNNYRKYIIKDGTVDICRACHCPGESLRHIISGCSRLANGEYLHRHNQVARIIHQQLALRYKLVESEVPYYRYVPDPVLENGRVTLYWDRSIITDRTIVANKPDIVVIDRSERRAIIVDVTIPHDGNLVKAEKEKQLKYLDLAHEVVDMWEVDAAMIVPIVVTANGIIAKSLDQHLKRLSLGTWVKGLIQKAVLLDTARIVRRFLSLES

SEQ ID NO: 28069 - protein, 1194 aa, Autographa pulchrina
MLTRQKARAAARPPPPDLSPSSASQLPDQVPAPAPAIASSSSDEYYSPPTSPTPVRRQGRRRPPSSLAPAGQPASNRAPAPGGDVRRMKWTQSINENVMRAYYGATEGGTNLTAYRARMLSLFQALEPGVNVSAQRLSDQVRVIQRNHRLDDSTLDRLRSEIQHSPAASTSLPVVAPVPGAPPTAPDDGEEDDGAITVSTQCSELIRSTLEDAIRDYLKSPPDQRPRLPRLPMHNRNKAIMGALDSLLPVYFESSEDLRDTHSILYCAALTACRVANVAICHSNIATRPKPAVPAWQCRIEQRVAEARTLIAKLIAFKQGNSRPRVMRFVRRAFAGTDISPSEYTARVTERIDLFKQKVYAWANRIRRYKRRVERFHLNRMFQKDQRWVHRAWERPVSAVDGGCLPDGDATNSFWRSIWSVPVSHSEGDWMREVEQVCEPIQEMGAITISPQDVANAVRPMANWKTPGPDGLQNFWLKWFPSSHSCLASQFQSAVESASLPQFLTTGSTHLLHKTGSATDPKNYRPITCLPTVYKLLTSILRAKINKHVDSFSIMSASQNGCRSGSRGTKELLLIDTAICQQVRRSKKDLSTCWIDYKKAYDSVPHTWLMRVLELYKINTTLRAFLMSCMGQWSTVLHYPGCRDIQQGGEPIRIERGIFQGDSLSPLWFCLALNPLSTLLENSGLGYSLRRGSQVISHLLYMDDLKLFATSGLQLMKLLKITESFSNSISMEFGVDKCAVMHVKRGGIVESQGIQLSDSINLRSLSATETYKYLGMSEALGINVADVKQSLQARFFGRLNKVLKSVLSGGNKVRAFNGWVMPVLMYSFGVLKWTQTELDALDRRVRTLLTANRMHHPRSSVMRLYIPRKCGGRGFLNAKTLHNREVCNLREYFLEVDVGMHRDVVVVDKGLTPLSLGKENWHKPVVLSVKDRKDVWQSKELHGRYYRTLHGPDVDFLASVTWLRFGDLFGETEGFVCAIMDEVIMTNNYRKYIIKDGTVDICRACHCPGESLRHIISGCSRLANGEYLHRHNQVARIIHQQLALRYKLVESEVPYYRYVPDPVLESGRVTLYWDRSIITDRTIIANKPDIVVIDRSERRAIIVDITIPHDENLVKAEKEKQLKYLDLAHEVVDMWKVDSAIIVPIVVTANGIIAKSLDQHLKRLSLGAWVKGLIQKAVLLDTARIVRRFLSLES

SEQ ID NO: 28070 - protein, 1194 aa, Autographa gamma
MLTRQKARAAARPPPPDSSPSSASQLPDHVPAPAPAVASSSSDEYYSPPTSPTPVRRQGRRRPPSSLAPSGQPASSRAPAPGGVVRRMKWTLGINENVMRAYYGATEGGTNLTAYRARMLSLFQALEPGVSVSAQRLSDQVRVIQRNHMLDDSTLDRLRSEIQHSPAASTSLPVTAPVSGAPLTAPIDGEEDDGAITVSTQCNELIRSTLEDAIRDYRRSPPDQRPRLPRLPMHNRNKAIMGALDSLLPVYFESSEDLRDTHSILYCAALTACRVANIAMCHSNIATRPKPAVPAWQCRIEQRVAEARTLIAKLKAFKQGNSRPRVMRFVRRAYAGTDISPSEYTARVTERIDLFMQKVCAWANRIRRYKRRAERFHLNRMFQKDQRWVHRLWERPVSAMDGGCLPDGDATNSFWRSIWSAPVSHSEGDWIREVEQVCEPIQEMGAITISPQDVANAVRPMANWKTPGPDGLQNFWLKWLRSSHSCLASQFQSAVESASLPQFLTTGSTHLLHKTGSATDPKNYRPITCLPTVYKLLTSILRAKINEHIVSFSIMSASQNGCRSGSRGTKELLLIDTAICQQVRRSKKDLSTCWIDYKKAYDSVPHTWLMRVLELYKINATLRAFLMSCMGQWSTVLHYPGCRDIQQGGEPIRIERGIFQGDSLSPLWFCLALNPLSTLLENSGLGYSLRRGSRVISHLLYMDDLKLFATNGLQLMKLLKITESFSNSISMEFGVDKCAVMHVKRGGIVESQGIQLSDSINLRSLSATETYKYLGMSEALGINAADVKQSLQARFFGRLNKVLKSVLSGGNKVRAFNGWVMPVLMYSFGVLKWTQTELDALDRRVRTLLTANRMHHPRSSVMRLYIPRKCGGRGFLNAKTLHNREVCNLREYFLQVDVGMHRDVVVVDKGFTPLSLGKENWHKPVVLSVKDREDVWQSKELHGRYYRTLHGPDVDFLASVAWLRFGDLFGETEGFVCAIMDEVIMTNNYRKYIIKDGTVDICRACHCPGESLRHIISGCSRLANGEYLHRHNQVARIIHQQLALRYKLVESEVPYYRYVPDPVLENGRVTLYWDRSIITDRTIVANKPDIVVIDRSERRAIIVDVTIPHDGNLVKAEKEKQLKYLDLAHEVVDMWEVDAAMIVPIVVTANGIIAKSLDQHLKRLSLGTWVKGLIQKAVLLDTARIVRRFLSLES

SEQ ID NO: 28071 - protein, 1189 aa, Autographa pulchrina
MLTRQKARAAARPPPPDSSPSSASQLPDQVPAPAPAIASSSSDEYYSPPTSPTPVRRQGRRRPPSSLAPAGQPASNRAPAPGGDVRRMKWTQSINENVMRAYYGATEGGTNLTAYRARMLSLFQALEPGVNVSAQRLSDQVRVIQRNHRLDDSTLDRLRSEIQHSPAASTSLPVVAPGPGAPPTTPDDGAITVSTQCSELIRSTLEDAIRDYLKSPPDQRPRLPRLPMHNRNKAIMGALDSLLPVYFESSEDLRDTHSILYCAALTACRVANVAICHSNIATRPKPAVPAWQCRIEQRVAEARTLIAKLIAFKQGNSRPRVMRFVRRAFAGTDISPSEYTARVTERIDLFKQKVYAWANRIRRYKRRVERFHLNRMFQKDQRWVHRAWERPVSAVDGGCLPDGDATNSFWRSIWSVPVSHSEGDWMREVEQVCEPIQEMGAITISPQDVANAVRPMANWKTPGPDGLQNFWLKWFPSSHSCLASQFQSAVESASLPQFLTTGSTHLLHKTGSATDPKNYRPITCLPTVYKLLTSILRAKINKHVDSFSIMSASQNGCRSGSRGTKELLLIDTAICQQVRRSKKDLSTCWIDYKKAYDSVPHTWLMRVLELYKINTTLRAFLMSCMGQWSTVLHYPGCRDIQQGGEPIRIERGIFQGDSLSPLWFCLALNPLSTLLENSGLGYSLRRGSQVISHLLYMDDLKLFATSGLQLMKLLKITESFSNSISMEFGVDKCAVMHVKRGGIVESQGIQLSDSINLRSLSATETYKYLGMSEALGINVADVKQSLQARFFGRLNKVLKSVLSGGNKVRAFNGWVMPVLMYSFGVLKWTQTELDALDRRVRSLLTANRMHHPRSSVMRLYIPRKCGGRGFLNAKTLHNREVCNLREYFLEVDVGMHRDVVVVDKGLTPLSLGKENWHKPVVLSVKDRKDVWQSKELHGCYYRTLHGPDVDFLASVAWLRFGDLFGETEGFVCAIMDEVIMTNNYRKYIIKDGTVDICRACHCPGESLRHIISGCSRLANGEYLHRHNQVARIIHQQLALRYKLVESEVPYYRYVPDPVLESGRVTLYWDRSIITDRTIIANKPDIVVIDRSERRAIIVDITIPHDENLVKAEKEKQLKYLDLAHEVVDMWEVDSAIIVPIVVTANGIIAKSLDQHLKRLSLGAWVKGLIQKAVLLDTARIVRRFLSLES

SEQ ID NO: 28072 - protein, 1194 aa, Autographa pulchrina
MLTRQKARAAARPPPPDSSPSSASQLPDQVPAPAPAIASSSSDEYYSPPTSPTPMRRQGRRRPPSSLAPAGQPASNRAPAPGGDVRRMKWTQSINENVMRAYYGATEGGTNLTAYRARMLSLFQALEPGVNVSAQRLSDQVRIIQRNHRLDDSTLDRLRSEIQHSPAASTSLPVVAPVPGAPPTAPDDGEEDDGAITVSTQCSELIRSTLEDAIRDYLKSPPDQRPRLPRLPMHNRNKAIMGALDSLLPVYFESSEDLRDTHSILYCAALTACRVANVAICHSNIATRPKPAVPAWQCRIEQRVAEARTLIAKLIAFKQGNSRPRVMRFVRHAFAGTDISPSEYTARVTERIDLFKQKVYAWANRIRRYKRRVERFHLNRMFQKDQRWVHRAWERPVSAVDGGCLPDGDATNSFWRSIWSVPVSHSEGDWMREVEQVCEPIQEMGAITISPQDVANAVRPMANWKTPGPDGLQNFWLKWFPSSHSCLASQFQSAVESASLPQFLTTGSTHLLHKTGSATDPKNYRPITCLPTVYKLLTSILRAKINKHVDSFSIMSASQNGCRSGSRGTKELLLIDTAICQQVRRSKKDLSTCWIDYKKAYDSVPHTWLMRVLELYKINTTLRAFLMSCMGRWSTVLHYPGCRDIQQGGEPIRIERGIFQGDSLSPLWFCLALNPLSTLLENSGLGYSLRRGSQVISHLLYMDDLKLFATSGLQLMKLLKITESFSNSISMEFGVDKCAVMHVKRGGIVESQGIQLSDSINLRSLSATETYKYLGMSEALGINVADVKQSLQARFFGRLNKVLKSVLSGGNKVRAFNGWVMPVLMYSFGVLKWTQTELDALDRRVRTLLTANRMHHPRSSVMRLYIPRKCGGRGFLNAKTLHNREVCNLREYFLEVDVGMHRDVVVVDKGLTPLSLGKENWHKPVVLSVKDRKDVWQSKELHGRYYRTLHGPDVDFLASVAWLRFGDLFGETEGFVCAIMDEVIMTNNYRKYIIKDGTVDICRACHCPGESLRHIISGCSRLANGEYLHRHNQVARIIHQQLALRYKLVESEVPYYRYVPDPVLESGRVTLYWDRSIITDRTIIANKPDIVVIDRSERRAIIVDITIPHDENLVKAEKEKQLKYLDLAHEVVDMWEVDSAIIVPIVVTANGIIAKSLDQHLKRLSLGTWVKGLIQKAVLLDTARIVRRFLSLES

SEQ ID NO: 28073 - protein, 1194 aa, Autographa gamma
MLTRQKARAAARPPPPDSSPSSASQLPDHVPAPAPAVASSSSDEYYSPPTSPTPVRRQGRRRPPSSLAPSGQPASNRAPAPGGVVRRMKWTLGINENVMRAYYGATEGGTNLTAYRARMLSLFQALEPGVSVSAQRLSDQVRVIQRNHMLDDSTLDRLRSEIQHSPAASTSLPVTAPVSGAPLTAPIDGEEDDGAITVSTQCNELIRSTLEDAIRDYRRSPPDLRPRLPRLPMHNRNKAIMGALDSLLPVYFESSEDLRDTHSILYCAALTACRVANIAMCHSNIATRPKPAVPAWQCRIEQRVAEARTLIAKLKAFKQGNSRPRVMRFVRRAYAGTDISPSEYTARVTERIDLFRQKVCAWANRIRRYKRRAERFHLNRMFQKDQRWVHRLWERPVSAMDGECLPDGDATNSFWRSIWSAPVSHSEGDWIREVEQVCEPIQEMGAITISPQDVANAVRPMANWKTPGPDGLQNFWLKWLRSSHSCLASQFQSAVELASLPQFLTTGSTHLLHKIGSATDPKNYRPITCLPTVYKLLTSILRAKINEHIVSFSIMSASQNGCRSGSRGTKELLLIDTAICQQVRRSKKDLSTCWIDYKKAYDSVPHTWLMRVLELYKINATLRAFLMSCMGQWSTVLHYPGCRDIQQGGEPIRIERGIFQGDSLSPLWFCLALNPLSTLLENSGLGYSLRRGSQVISHLLYMDDLKLFATNGLQLMKLLKITESFSNSISMEFGVDKCAVMHVKRGGIVESQGIQLSDSINLRSLSATETYKYLGMSEALGINAADVKQSLQARFFGRLNKVLKSVLSGGNKVRAFNGWVMPVLMYSFGVLKWTQTELDALDRRVRTLLTANRMHHPRSSVMRLYIPRNCGGRGFLNAKTLHNREVCNLREYFLQVDVGMHRDVVVVDKGFTPLSLGKENWHKPVVLSVKDREDVWQSKELHGRYYRTLHGPDVDFLASVAWLRFGDLFGETEGFVCAIMDEVIMTNNYRKYIIKDGTVDICRACHCPGESLRHIISGCSRLANGEYLHRHNQVARIIHQQLALRYKLVESEVPYYRYVPDPVLENGRVTLYWDRSIITDRTIVANKPDIVVIDRSERRAIIVDVTIPHDENLVKAEKEKQLKYLDLAHEVVDMWEVDAAMIVPIVVTANGIIAKSLDQHLKRLSLGTWVKGLIQKAVLLDTARIVRRFLSLES

SEQ ID NO: 28074 - protein, 1194 aa, Autographa gamma
MLTRQKARAAARPPPPDSSPSSASQLPDHVPAPAPAVASSSSDEYYSPPTSPTPVRRQGRRRPPSSLAPSGQPASNRAPAPGGVVRRMKWTLGINENVMRAYYGATEGGTNLTAYRARMLSLFQALEPGVSVSAQRLSDQVRVIQRNHMLDDSTLDRLRSEIQHSPAASTSPPVAAPVFGAPLTAPSDGEEDDGAITVSTQCNELIRSTLEDAIRDYRRSPPDQRPRLPRLPMHNRNKAIMGALDSLLPVYFESSEDLRDTHSILYCAALTACRVANIAMCHSNIATRPKPAVPAWQCRIEQRVAEARTLIAKLKAFKQGNSRPRVMRFVRRAYAGTDISPSEYTARVTERIDLFRQKVCAWANRIRRYKRRAERFHLNRMFQKDQRWVHRLWERPVSAMDGGCLPDGDATNSFWRSIWSAPVTHSEGDWIREVEQVCEPIQEMGAITISPQDVANAVRPMANWKTPGPDGLQNFWLKWLRSSHSCLASQFQSAVESASLPQFLTTGSTHLLHKTGSATDPKNYRPITCLPTVYKLLTSILRAKINEHIVSFSIMSASQNGCRSGSRGTKELLLIDTAICQQVRRSKKDLSTCWIDYKKAYDSVPHTWLMRVLELYKINATLRAFLMSCMGQWSTVLHYPGCRDIQQGGEPIRIERGIFQGDSLSPLWFCLALNPLSTLLENSGLGYSLRRGSRVISHLLYMDDLKLFATGGLQLMKLLKITESFSNSISMGFGVDKCAVMHVKRGGIVESQGIQLSDSINLRSLSATETYKYLGMSEALGINAADVKQSLQARFFGRLNKVLKSVLSGGNKVRAFNGWVMPVLMYSFGVLKWTQTELDALDRRVRTLLTANRMHHPRSSVMRLYIPRKCGGRGFLNAKTLHNREVCNLREYFLQVDVGMHRDVVVVDKGFTPLSLGKENWHKPVVLSVRDREDVWQSKELHGRYYRTLHGPDVDFLASVAWLRFGDLFGETEGFVCAIMDEVIMTNNYRKYIIKDGTVDICRACHCPGESLRHIISGCSRLANGEYLHRHNQVARIIHQQLALRYKLVESEVPYYRYVPDPVLENGRVTLYWDRSIITDRTIVANKPDIVVIDRSERRAIIVDVTIPHDENLVKAEKEKQLKYLDLAHEVVDMWEVDAAMIVPIVVTANGIIAKSLDQHLKRLSLGTWVKGLIQKAVLLDTARIVRRFLSLES

SEQ ID NO: 28075 - protein, 1076 aa, Autographa pulchrina
MLSLFQALEPGVSVSAQRLSDQVRVIQRNHRLDDSTLDRLRSEIQHSPAASTSLPVATPVSGAPPTEPSDGEEDDGAITVSTQCSELIRSTLEDAIRDYRKSPPDQRPRLPRLPMHNRNKAIMGALDSLLPVYFESSEDLRDTHSILYCAALTACRVANVAICHSNIATRPKPAVPAWQYRIEQRVAEARTLIAKLIAFKQGNSRPRVMRFVRRAFAGTDISPSEYTARFTERIDLFKQRVYAWASRIRRYKRRVERFHLNRMFQKDQRWVHRAWERPVSAMDGGCLPDGDATNSFWRNIWSVPVSHSEGDWMREVEQVCEPIQEMGAITISPQDVANAVRPMVNWKTPGPDGLQNFWLKWLPSSHSCLASQFQSAVESASLPQFLTTGSTHLLHKTGSATDPKNYRPITCLPTVYKLLTSILRAKINEHVDSFSIMSASQNGCRSGSRGTKELLLIDTAICQQVRRSKKDLSTCWIDYKKAYDSVPHTWLMRVLELYKINTTLRTFLMSCMGQWSTVLHYPGCRDIQQGGEPIRIERGIFQGDSLSPLWFCLALNPLSTLLENSGLGYSLRRGSRVISHLLYMDDLKLFATGGLQLMKLLKITEGFSNSISMEFGVDKCAVMHVKRGGIVESQGIQLSDFINLRSLSATETYKYLGMSEALGINVADVKQSLQARFFGRLNKVLKSVLSGGNKVRAFNGWVMPVLMYSFGVLKWTQTELDALDRRVRTLLTANRMHHPRSSVMRLYIPRKCGGRGFLNAKTLHNREVCNLREYFLQVDVGMHRDVVVVDKGFTPLSLGKENWHKPVVLSVKDRKDVWQNKELHGRYYRTLHGSDVDFLASVAWLRFGDLFGETEGFVCAIMDEVIMTNNYRKYIIKDGTVDICRACHCPGESLRHIISGCSRLANGEYLHRHNQVARIIHQQLALRYKLVESEVPYYRYVPDPVLENGRVTLYWDRSIITDRTIVANKPDIVVIDRSERRAIIVDITIPHDENLVKAEKEKQLKYLDLAHEVVDMWEVDSAIIVPIVVTVNGIIAKSLDQHLKRLALGAWVKGLIQKAVLLDTARIVRRFLSLES

SEQ ID NO: 28076 - protein, 1194 aa, Autographa gamma
MLTRQKARAAARPPPPDSSPSSASQLPDHVPAPAPAVASSSSDEYYSPPTSPTPVRRQGRRRPPSSLAPSGQPASNRAPAPGGVVRRMKWTLGINENVMRAYYGATEGGTNLTAYRARMLSLFQALEPGVSVSAQRLSDQVRVIQRNHMLDDSTLDRLRSEIQHSPAASTSLPVTAPVSGAPLTAPSDGEEEDGAITVSTQCNELIRSTLEDAIRDYRRSPPDQRPRLPRLPMHNRNKAIMGALDSLLPVYFESSEDLRDTHSILYCAALTACRVANIAMCHSNIATRPKPAVPAWQCRIEQRVAEARTLIAKLKAFKQGNSRPRVMRFVRRAYAGTDISPSEYTARVTERIDLFRQKVCAWANRIRRYKRRAERFHLNRMFQKDQRWVHRLWERPVSAMDGGCLPDGDATNSFWRSIWSAPVSHSEGDWIREVEQVCEPIQEMGAITISPQDVANAVRPMANWKTPGPDGLQNFWLKWLRSSHSCLASQFQSAVESASLPQFLTTGSTHLLHKTGSATDPKNYRPITCLPTVYKLLTSILRAKINEHIVSFSIMSASQNGCRSGSRGTKELLLIDTAICQQVRRSKKDLSTCWIDYKKAYDSVPHTWLMRVLELYKINATLRAFLMSCMGQWSTVLHYPGCRDIQQGGEPIRIERGIFQGDSLSPLWFCLALNPLSTLLENSGLGYSLRRGSRVISHLLYMDDLKLFATNGLQLMKLLKITESFSNSISMEFGVDKCAVMHVKRGGIVESQGIQLSDSINLRSLSATETYKYLGMSEALGINAADVKQSLQARFFGRLNKVLKSVLSGGNKVRAFNGWVMPVLMYSFGVLKWTQTELDALDRRVRTLLTANRMHHPRSSVMRLYIPRKCGGRGFLNAKTLHNREVCNLREYFLQVDVGMHRDVVVVDKGFTPLSLGKENWHKPVVLSVKDREDVWQSKELHGRYYRTLHGPDVDFLASVAWLRFGDLFGETEGFVCAIMDEVIMTNNYRKYIIKDGTVDICRACHCPGESLRHIISGCSRLANGEYLHRHNQVARIIHQQLALRYKLVESEVPYYRYVPDPVLENGRVTLYWDRSIITDRTIVANKPDIVVIDRSERRAIIVDVTIPHDGNLVKAEKEKQLKYLDLAHEVVDMWEVDAAMIVPIVVTANGIIAKSLDQHLKRLSLGTWVKGLIQKAVLLDTARIVRRFLSLES

SEQ ID NO: 28077 - protein, 1194 aa, Autographa pulchrina
MLTRQKARAAARPPPPDSSPSSASQLPDQVPAPAPAIASSSSDEYYSPPTSPTPVRRQGRRRPPSSLAPAGQPASNRAPAPGGDVRRMKWTQSINENVMRAYYGATEGGTNLTAYRARMLSLFQALEPGVNVSAQRLSDQVRVIQRNHRLDDSTLDRLRSEIQHSPAASTSLPVVAPVPGAPPTAPDDGEEDYGAITVSTQCSELIRSTLEDAIRDYLKSPPDQRPRLPRLPMHNRNKAIMGALDSLLPVYFESSEDLRDTHSILYCAALTACRVANVAICHSNIATRPKPAVPAWQCRIEQRVAEARTLIAKLIAFKQGNSRPRVMRFVRRAFAGTDISPSEYTARVTERIDLFKQKVYAWANRIRRYKRRVERFHLNRMFQKDQRWVHRAWERPVSAVDGGCLPDGDATNSFWRSIWSVPVSHSEGDWMREVEQVCEPIQEMGAITISPQDVANAVRPMANWKTPGPDGLQNFWLKWFPSSHSCLASQFQSAVESASLPQFLTTGSTHLLHKTGSATDPKNYRPITCLPTVYKLLTSILRAKINKHVDSFSIMSASQNGCRSGSRGTKELLLIDTAICQQVRRSKKDLSTCWIDYKKAYDSVPHTWLMRVLELYKINTTLRAFLMSCMGQWSTVLHYPGCRDIQQGGEPIRIERGIFQGDSLSPLWFCLALNPLSTLLENSGLGYSLRRGSQVISHLLYMDDLKLFATSGLQLMKLLKITESFSNSISMEFGVDKCAVMHVKRGGIVESQGIQLSDSINLRSLSATETYKYLGMSEALGINVADVKQSLQARFFGRLNKVLKSVLSGGNKVRAFNGWVMPVLMYSFGVLKWTQTELDALDRRVRTLLTANRMHHPRSSVMRLYIPRKCGGRGFLNAKTLHNREVCNLREYFLEVDVGMHRDVVVVDKGLTPLSLGKENWHKPVVLSVKDRKDVWQSKELHGRYYRTLHGPDVDFLASVAWLRFGDLFGETEGFVCAIMDEVIMTNNYRKYIIKDGTVDICRACHCPGESLRHIISGCSRLANGEYLHRHNQVARIIHQQLALRYKLVESEVPYYRYVPDPVLESGRVTLYWDRSIITDRTIIANKPDIVVIDRSERRAIIVDITIPHDENLVKAEKEKQLKYLDLAHEVVDMWEVDSAIIVPIVVTANGIIAKSLDQHLKRLSLGTWVKGLIQKAVLLDTARIVRRFLSLES

SEQ ID NO: 28078 - protein, 1190 aa, Autographa gamma
MLTRQKARAAARPPPPDSSPSSASQLPDHVPAPAPAVASSSSDEYYSPPTSPTPVRRQGRRRPPCSLAPSGQPASNRAPAPGGVVRRMKWTLGINENVMRAYYGATEGGTNLTAYRARMLSLFQALEPGVSVSAQRLSDQVRVIQRNHMLDDSTLDRLRSEIQHSPAASTSLPVTAPVSGAPLTAPSDGEEDDGAITVSTQCNELIRSTLEDAIRDYRRSPPDQRPRLPRLPMHNRNKAIMGALDSLLPVYFESSEDLRDTHSILYCAALTACRVANIAMCHSNIATRPKPAVPAWQCRIEQRVAEARTLIAKLKAFKQGNSRPRVMRFVRRAYAGTDISPSEYTAHVTERIDLFRQKVCAWANRIRRYKRRAERFHLNRMFQKDQRWVHRLWERPVSAMDGGCLPDGDATNSFWRSIWSAPVSHSEGDWIREVEQVCEPIQEMGAITISPQDVANAVRPMANWKTPGPDGLQNFWLKWLRSSHSCLASQFQSAVESASLPQFLTTGSTHLLHKTGSATDPKNYRPITCLPTVYKLLTSILRAKINEHIVSFSIMSASQNGCRSGSRGTKELLLIDTAICQQVRRSKKDLSTCWIDYKKAYDSVPHTWLMRVLELYKINAFLMSCMGQWSTVLHYPGCRDIQQGGEPIRIERGIFQGDSLSPLWFCLALNPLSTLLENSGLGYSLRRGSRVISHLLYMDDLKLFATSGLQLMKLLKITESFSNSISMEFGVDKCAVMHVKRGGIVESQGIQLSDSINLRSLSATETYKYLGMSEALGVNAADVKQSLQARFFGRLNKVLKSVLSGGNKVRAFNGWVMPVLMYSFGVLKWTQTELDALDRRVRTLLTANRMHHPRSSVMRLYIPRKCGGRGFLNAKTLHNREVCNLREYFLQVDVGMHRDVVVVDKGFTPLSLGKENWHKPVVLSVKDREDVWQSKELHGRYYRTLHGPDVDFLASVAWLRFGDLFGETEGFVCAIMDEVIMTNNYRKYIIKDGTVDICRACHCPGESLRHIISGCSRLANGEYLHRHNQVARIIHQQLALRYKLVESEMPYYRYVPDPVLENGRVTLYWDRSIITDRTIVANKPDIVVIDRSERRAIIVDVTIPHDENLVKAEKEKQLKYLDLAHEVVDMWEVDSAMIVPIVVTANGIIAKSLDQHLKRLSLGTWVKGLIQKAVLLDTARIVRRFLSLES

SEQ ID NO: 28079 - protein, 1194 aa, Autographa gamma
MLTRQKARAAARPPPPDSSPSSASQLPDHVPAPAPAVASSSSDEYYSPPTSPTPVRRQGRRRPPSSLAPSGQPASSRAPAPGGVVRRMKWTLGINENVMRAYYGATEGGTNLTAYRARMLSLFQALEPGVSVSAQRLSDQVRVIQRNHMLDDSTLDRLRSEIQHSPAASTSLPVTAPVSGAPLTAPIDGEEDDGAITVSTQCNELIRSTLEDAIRDYRRSPPDQRPRLPRLPMHNRNKAIMGALDSLLPVYFESSEDLRDTHSILYCAALTACRVANIAMCHSNIATRPKPAVPAWQCRIEQRVAEARTLIAKLKAFKQGNSRPRVMRFVRRAYAGTDISPSEYTARVTERIDLFRQKVCAWANRIRRYKRRAERFHLNRMFQKDQRWVHRLWERPVSAMDGGCLPDGDATNSFWRRIWSAPVSHSEGDWIREVEQVCEPIQEMGAITISPQDVANAVRPMANWKTPGPDGLQNFWLKWLRSSHSCLASQFQSAVESASLPQFLTTGSTHLLHKTGSATDPKNYRPITCLPTVYKLLTSILRAKINEHIVSFSIMSASQNGCRSGSRGTKELLLIDTAICQQVRRSKKDLSTCWIDYKKAYDSVPHTWLMRVLELYKINATLRAFLMSCMGQWSTVLHYPGCRDIQQGGEPIRIERGIFQGDSLSPLWFCLALNPLSTLLENSGLGYSLRRGSRVISHLLYMDDLKLFATNGLQLMKLLKITESFSNSISMEFGVGKCAVMHVKRGGIVESQGIQLSDSINLRSLSATETYKYLGMSEALGINAADVKQSLQARFFGRLNKVLKSVLSGGNKVRAFNGWVMPVLMYSFGVLKWTQTELDALDRRVRTLLTANRMHHPRSSVMRLYIPRKCGGRGFLNAKTLHNREVCNLREYFLQVDVGMHRDVVVVDKGFTPLSLGKENWHKPVVLSVKDREDVWQSKELHGRYYRTLHGPDVDFLASVAWLRFGDLFGETEGFVCAIMDEVIMTNNYRKYIIKDGTVDICRACHCPGESLRHIISGCSRLANGEYLHRHNQVARIIHQQLALRYKLVESEVPYYRYVPDPVLENGRVTLYWDRSIITDRTIVANKPDIVVIDRSERRAIIVDVTIPHDGNLVKAEKEKQLKYLDLAHEVVDMWEVDAAMIVPIVVTANGIIAKSLDQHLKRLSLGTWVKGLIQKAVLLDTARIVRRFLSLES

SEQ ID NO: 28080 - protein, 1194 aa, Autographa pulchrina
MLTRQRARAAARPPPPDSSPSSASQLPDHVPTPAPAVASSSSDEYYSPPTSPTPVRRQGRRRPPSSLAPAGQPASNRAPAPGGDVRRMKWTQNINENVMRAYYGATEGGTNLTAYRARMLSLFQALEPGVSVSAQRLSDQVRVIQRNHRLDDSTLDRLRSEIQHSPAASTSLPVAAPVSGAPPTAPSDGEEDDGAITVSTQCSELIRSTLEDAIRDYRKSPPDQRPRLPRLPMHNRNKAIMGALDSLLPFYFESSEDLRDTHSILYCAALTACRVANVAICHSNIATRPKPAVPAWQCRIEQRVAEARTLIAKLIAFKQGNSRPRVMRFVRRAFAGTDISPSEYSARVTERIDLFKQRVYAWASRIRRYKRRVERFHLNRMFQKDQRWVHRAWERPVSAMDGGCLPDGDATNSFWRSIWSVPVSHSEGDWMREVEQVCEPIQEMGAITISPQDVANAVRPMVNWKTPGPDGLQNFWLKWLPSSHSCLASQFQSAVESASLPQFLTTGSTHLLHKTGSATDPKNYRPITCLPTVYKLLTSILRAKINEHVVSFSIMSASQNGCRSGSRGTKELLLIDTAICQQVRRSKKDLSTCWIDYKKAYDSVPHTWLMRVLELYKINTTLRAFLMSCMGQWSTVLHYPGCRDIQQGGEPIRIERGIFQGDSLSPLWFCLALNPLSTLLENSGLGYSLRRGSRVISHLLYMDDLKLFATGELQLMKLLKITEGFSNSISMEFGVDKCAVMHVKRGGIVESQGIQLSDSINLRSLSATETYKYLGMSEALGINAADVKQSLQARFFGRLNKVLRSVLSGGNKVRAFNGWVMPVLMYSFGVLKWTQTELDALDRRVRTLLTANRMHHPRSSVMRLYIPRKCGGRGFLNAKTLHNREVCNLREYFLQADVGMHRDVVVVDKGFTPLSLGKENWHKPVVLSVKDRENVWQSKELHGRYYRTLHGSDVDFLASVAWLRFGDLFGETEGFVCAIMDEVIMTNNYRKYIIKDGTVDICRACHCPGESLRHIISGCSRLANGEYLHRHNQVARIIHQQLALRYKLVESEVPYYRYVPDPVLENGRVTLYWDRSIITDRTIVANKPDIVVIDRSERRAIIVDITIPHDENLVKAEKEKQLKYLDLAHEVVDMWEVDSAIIVPIVVTANGIIAKSLDQHLKRLSLGAWVKGLIQKAVLLDTARIVRRFLSLES

SEQ ID NO: 28081 - protein, 868 aa, Autographa pulchrina
MRFVRRAFAGTDISPSEYTARVTERIDLFKQRVYAWASRIRRYKRRVERFHLNRMFQKDQRWVHRAWERPVSAMDGGCLPDGDATNSFWRSIWSVPVSHSEGDWMREVEQVCEPIEEMGAITISPQDVANAVRPMVNWKTPGPDGLQNFWLKWLPSSHSCLASQFQSAVESASLPQFLTTGSTHLLHKTGSATDPKNYRPITCLPTVYKLLTSILRAKINEHVDSFSIMSASQNGCRSGSRGTKELLLIDTAICQQVRRSKKDLSTCWIDYKKAYDSVPHTWLMRVLELYKINTTLRAFLMSCMGQWSTVLHYPGCRDIQQGGEPIRIERGIFQGDSLSPLWFCLALNPLSTLLENSGLGYSLRRGSRVISHLLYMDDLKLFATGGLQLMKLLKITEGFSNSISMEFGVDKCAVMHVKRGGIVESQGIQLSDSINLRSLSATETYKYLGLSEALGINAADVKQSLQARFFGRLNKVLKSVLSGGNKVRAFNGWVMPVLMYSFGVLKWTQTELDALDRRVRTLLTANRMHHPRSSVMRLYIPRKCGGRGFLNAKTLHNREVCNLREYFLQVDVGMHRDVVVVDKGFTPLSLGKENWHKPVVLSVKDRENVWQSKELHGRYYRTLHGSDVDLLASVAWLRFGDLFGETEGFVCAIMDEVIMTNNYRKYIIKDGTVDICRACHCPGESLRHIISGCSRLANGEYLHRHNQVARIIHQQLALRYKLVESEVPYYRYVPDPVLENGRVTLYWDRSIITDRTIVANKPDIVVIDRSERRAIIVDITIPHDENLVKAEKEKQLKYLDLAHEVVDMWEVDSAIIVPIVVTANGIIAKSLDQHLKRLSLGVWVKGLIQKAVLLDTARIVRRFLSLES

SEQ ID NO: 28082 - protein, 962 aa, Autographa pulchrina
MHNRNKAIMGALDSLLPVYFESSEDLRDTHSILYCAALTACRVANVAICHSNIATRPKPAVPAWQCRIEQRVAEARTLIAKLIAFKQGNSRPRVMRFVRRAFAGTDISPSEYTARVTERIDLFKQRVYAWASRIRRYKRRVERFHLNRMFQKDQRWVHRAWERPVSAMDGGCLPDGDATNSFWRSIWSVPVSHSEGDWMREVEQVCEPIEEMGAITISPQDVANAVRPMVNWKTPGPDGLQNFWLKWLPSSHSCLASQFQSAVESASLPQFLTTGSTHLLHKTGSATDPKNYRPITCLPTVYKLLTSILRAKINEHVDSFSIMSASQNGCRSGSRGTKELLLIDTAICQQVRRSKKDLSTCWIDYKKAYDSVPHTWLMRVLELYKINTTLRAFLMSCMGQWSTVLHYPGCRDIQQGGEPIRIERGIFQGDSLSPLWFCLALNPLSTLLENSGLGYSLRRGSRVISHLLYMDDLKLFATGGLQLMKLLKITEGFSNSISMEFGVDKCAVMHVKRGGIVESQGIQLSDSINLRSLSATETYKYLGMSEALGINAADVKQSLQARFFGRLNKVLKSVLSGGNKVRAFNGWVMPVLMYSFGVLKWTQTELDALDRRVRTLLTANRMHHPRSSVMRLYIPRKCGGRGFLNAKTLHNREVCNLREYFLQVDVGMHRDVVVVDKGFTPLSLGKENWHKPVVLSVKDRENVWQSKELHGRYYRTLHGSDVDLLASVAWLRFGDLFGETEGFVCAIMDEVIMTNNYRKYIIKDGTVDICRACHCPGESLRHIISGCSRLANGEYLHRQNQVARIIHQQLALRYKLVESEVPYYRYVPDPVFENGRVTLYWDRSIITDRTIVANKPDIVVIDRSERRAIIVDITIPHDENLVKAEKEKQLKYLDLAHEVVDMWEVDSAIIVPIVVTANGIIAKSLDQHLKRLSLGAWVKGLIQKAVLLDTARIVRRFLSLES

SEQ ID NO: 28083 - protein, 1107 aa, Autographa pulchrina
MKWTQNINENVMRAYYGATEGGTNLTAYRARMLSLFQALEPGVSVSAQRLSDQVRVIQRNHRLDDSTLDRLRSEIQHSPAASTSLPVAAPVSGAPPTAPSDGEEDDGAITVSTQCSELIRSTLEDAIRDYRKSPPDQRPRLPRLPMHNRNKAIMGALDSLLPFYFESSEDLRDTHSILYCAALTACRVANVAICHSNIATRPKPAVPAWQCRIEQRVAEARTLIAKLIAFKQGNSRPRVMRFVRRAFAGTDISPSEYTARVTERIDLFKQRVYAWASRIRRYKRRVERFHLNRMFQKDQRWVHRAWERPVSAMDGGCLPDGDATNSFWRSIWSVPVSHSEGDWMREVEQVCEPIQEMGAITISPQDVANAVRPMVNWKTPGPDGLQNFWLKWLPSSHSCLASQFQSAVESASLPQFLTTGSTHLLHKTGSATDPKNYRPITCLPTVYKLLTSILRAKINEHVVSFSIMSASQNGCRSGSRGTKELLLIDTAICQQVRRSKKDLSTCWIDYKKAYDSVPHTWLMRVLELYKINATLRAFLVSCMGQWSTVLHYPGCRDIQEGGEPIRIERGIFQGDSLSPLWFCLALNPLSTLLENSGLGYSLRRGSWVISHLLYMDDLKLFATGGLQLMKLLKITEGFSNSISMEFGVDKCAVMHVKRGGIVESQGIQLSDSIKLRSLSATETYKYLGMSEALGINAADVKQSLQARFFGRLNKVLRSVLSGGNKVRAFNGWVMPVLMYSFGVLKWTQTELDALDRRVRTLLTANRMHHPRSSVMRLYIPRKCGGRGFLNAKTLHNREVYNLREYFLQADVGMHRDVVVVDKGFTPLSLGKENWHKPVVLSVKDRENVWQSKELHGRYYRTLHGSDVDFLASVAWLRFGDLFGETEGFVCAIMDEVIMTNNYRKYIIKDGTVDICRACHCPGESLRHIISGCSRLANGEYLHRHNQVARIIHQQLALRYKLVESEVPYYRYVPDPVLENGRVTLYWDRSIITDRTIVANKPDIVVIDRSERRAIIVDITIPHDENLVKAEKEKQLKYLDLAHEVVDMWEVDSAIIVPIVVTANGIIAKSLDQHLKRLSLGAWVKGLIQKAVLLDTARIVRRFLSLES

SEQ ID NO: 28084 - protein, 1194 aa, Autographa pulchrina
MLTRQKARAAARPPPPDSSPSSASQLPDHVPTPAPAVASSSSDEYYSPPTSPTPVRRQGRRRPPSSLAPAGQPASNRAPAPGGDVRRMKWTQNINENVMRAYYGATERGTNLTAYRARMLSLFQALEPGVSVSAQRLSDQVRVIQRNHRLDDSTLDRLRSEIQHSPAASTSLPVAAPVSGAPPTAPSDGEEEDGAITVSTQCSELIRSTLEDAIRDYRKSPPDQRPRLPRLPMHNRNKAIMGALDSLLPFYFESSEDLRDTHSILYCAALTACRVANVAICHSNIATRPKPAVPAWQCRIEQRVAEARTLIAKLIAFKQGNSRPRVMRFVRRAFAGTDISPSEYTARVTERIDLFKQRVYAWASRIRRYKRRVERFHLNRMFQKDQRWVHRAWERPVSAMDGGCLPDGDATNSFWRSIWSVPVSHSEGDWMREVEQVCEPIQEMGAITISPQDVANAVRPMVNWKTPGPDGLQNFWLKWLPSSHSCLASQFQSAVESASLPQFLTTGSTHLLHKTGSATDPKNYRPITCLPTVYKLLTSILRAKINEHVVSFSIMSASQNGCRSGSRGTKELLLIDTAICQQVRRSKKDLSTCWIDYKKAYDSVPHTWLMRVLELYKINATLRAFLVSCMGQWSTVLHYPGCRDIQGGGEPIRIERGIFQGDSLSPLWFCLALNPLSTLLENSGLGYSLRRGSRVISHLLYMDDLKLFATGGLQLMKLLKITEGFSNSISMEFGVDKCAVMHVKRGGIVESQGIQLSDSINLRSLSATETYKYLGMSEALGINAADVKQSLQARFFGRLNKVLRSVLSGGNKVRAFNGWVMPVLMYSFGVLKWTQTELDALDRRVRTLLTANRMHHPRSSVMRLYIPRKCGGRGFLNAKTLHNREVYNLREYFLQADVGMHRDVVVVDKGFTPLSLGKENWHKPVVLSVKDRENVWQSKELHGRYYRTLHGSDVDFLASVAWLRFGDLFGETEGFVCAIMDEVIMTNNYRKYIIKDGTVDICRACHCPGESLRHIISGCSRLANGEYLHRHNQVARIIHQQLALRYKLVESEVPYYRYVPDPVLENGRVTLYWDRSIITDRTIVANKPDIVVIDRSERRAIIVDITIPHDENLVKAEKEKQLKYLDLAHEVVDMWEVDSAIIVPIVVTANGIIAKSLDQHLKRLSLGAWVKGLIQKAVLLDTARIVRRFLSLES

SEQ ID NO: 28085 - protein, 1002 aa, Autographa gamma
MLSLFQALEPGVSVSAQRLSDQVRVIQRNHMLDDSTLDRLRSEIQHSPAASTSLPVMAPGFGAPLTAPCDGEEDDEAITVSTQCNELIRSTLEVAIRDYRRSPPDQRPRLPRLPMHNRNKAIMGALDSLLPVYFESSEDLRDTHSILYCAALTACRVANIAMCHSNIATRPKPAVPAWQCRIEQRVAEARTLIAKLKAFKQGNSRPRVMRFVRRAYAGTDISPSEYTARVTERIDLFRQKVCAWANRIRRYKRRAERFHLNRMFQKDQRWVHRLWERPVSAMDGGCLPDGDATNSFWRSIWSAPVSHSEGDWIREVEQVCEPIQEMGAITISPQDVANAVRPMANWKTPGPDGLQNFWLKWLRSSHSCLASQFQSAVESASLPQFLTTGSTHLLHKTGSATDPKNYRPITCLPTVYKLLTSILRAKINEHIVSFSIMSASQNGCRSGSRGTKELLLIDTAICQQVRRSKKDLLTCWIDYKKAYDSVPHTWLMRVLELYKINATLRAFLMSCMGQWSTVLHYPGCRDIQQGGEPIRIERGIFQGDSLSPLWFCLALNPLSTLLENSGLGYSLRRGSQVISHLLYMDDLKLFSTSGLQLMKLLKITESFSNSISMEFGVDKCAVMHVKRGGIVESQGIQLSDSINLRSLSATETYKYLGMSEALGINAADVKQSLQARFFGRLNKVLKIVLSGGNRVRAFNGWVMPVLMYSFGVLKWTQTELDALDRRVRTLLTANRMHHPRSSVMRLYIPRKCGGRGFLNAKTLHNREVCNLREYFLQVDVGMHRDVVVVDKGFTPLSLGKENWHKPVVLSVKDREDIWQSKELHGRYYRTLHGPDVDFLASVAWLRFGDLFGETEGFVCAIMDEVIMTNNYRKYIIKDGTVDICRACHCPGESLRHIISGCSRLANGEYLHRHNQVARIIHQQLALRYKLVESEVPYYRYVPDPVLENGRVTLYWDRSIITDRTIVANKPDIVVIDRSERRAIIVDVTIPHDGNLVKAEKEK

SEQ ID NO: 28086 - protein, 1220 aa, Autographa pulchrina
MMIMNDELVDRYTQSNSKSQFLHLKLIIIIIIARAAARPPPPDSSPSSASQLPDQVPAPAPAIASSSSDEYYSPPTSPTPVRRQGRRRPPSSLAPAGQPASNRAPAPGGDVRRMKWTQSINENVMRAYYGATEGGTNLTAYRARMLSLFQALEPGVNVSAQRLSDQVRVIQRNHRLDDSTLDRLRSEIQHSPAASTSLPVVAPVPGAPPTAPDDGEEDDGAITVSTQCSELIRSTLEDAIRDYLKSPPDQRPRLPRLPMHNRNKAIMGALDSLLPVYFESSEDLRDTHSILYCAALTACRVANVAICHSNIATRPKPAVPAWQCRIEQRVAEARTLIAKLIAFKQGNSRPRVMRFVRRAFAGTDISPSEYTARVTERIDLFKQKVYAWANRIRRYKRRVERFHLNHMFQKDQRWVHRAWERPVSAVDGGCLPDGDATNSFWRSIWSVPVSHSEGDWMREVEQVCEPIQEMGAITISPQDVANAVRPMANWKTPGPDGLQNFWLKWFPSSHSCLASQFQSAVESASLPQFLTTGSTHLLHKTGSATDPKNYRPITCLPTVYKLLTSILRAKINKHVDSFSIMSASQNGCRSGSRGTKELLLIDTAICQQVRRSKKDLSTCWIDYKKAYDSVPHTWLMRVLELYKINTTLRAFLMSCMGQWSTVLHYPGCRDIQQGGEPIRIERGIFQGDSLSPLWFCLALNPLSTLLENSGLGYSLRRGSQVISHLLYMDDLKLFATSGLQLMKLLKITESFSNSISMEFGVDKCAVMHVKRGGIVESQGIQLSDSINLRSLSATETYKYLGMSEALGINVADVKQSLQARFFGRLNKVLKSVLSGGNKVRAFNGWVMPVLMYSFGVLKWTQTELDALDRRVRTLLTANRMHHPRSSVMRLYIPRKCGGRGFLNAKTLHNREVCNLREYFLEVDVGMHRDVVVVDKGLTPLSLGKENWHKPVVLSVKDRKDVWQSKELHGRYYRTLHGPDVDFLASVAWLRFGDLFGETEGFVCAIMDEVIMTNNYRKYIIKDGTVDICRACHCPGESLRHIISGCSRLANGEYLHRHNQVARIIHQQLALRYKLVESEVPYYRYVPDPVLESGRVTLYWDRSIITDRTIIANKPDIVVIDRSERRAIIVDITIPHDENLVKAEKEKQLKYLDLAHEVVDMWEVDSAIIVPIVVTANGIIAKSLDQHLKRLSLGAWVKGLIQKAVLLDTARIVRRFLSLES

SEQ ID NO: 28087 - protein, 1194 aa, Autographa pulchrina
MLTRQKARAAARPPPPDSSPSSASQLPDQVPAPAPAIASSSSDEYYSPPTSPTPVRRQGRRRPPSSLAPAGQPASNRAPAPGGDVRRMKWTQSINENVMRAYYGATEGGTNLTAYRARMLSLFQALEPGVNVSAQRLSDQVRVIQRNHRLDDSTLDRLRSEIQHSPAASTSLPVVAPVPGAPPTAPDDGEEDDGAITVSTQCSELIRSTLEDAIRDYLKSPSDQRPRLPRLPMHNRNKAIMGALDSLLPVYFESSEDLRDTHSILYCAALTACRVANVAICHSNIATRLKPAVPAWQCRIEQRVAEARTLIAKLIAFKQGNSRPRVMRFVRRAFAGTDISPSEYTARVTERIDLFKQKVYAWANRIRRYKRRVERFHLNRMFQKDQRWVHRAWERPVSAVDGGCLPDGDATNSFWRSIWSVPVSHSEGDWMREVEQVCEPIQEMGAITISPQDVANAVRPMANWKTPGPDGLQNFWLKWFPSSHSCLASQFQSAVESASLPQFLTTGSTHLLHKTGSATDPKNYRPITCLPTVYKLLTSILRAKINKHVDSFSIMSASQNGCRSGSRGTKELLLIDTAICQQVRRSKKDLSTCWIDYKKAYDSVPHTWLMRVLELYKINTTLRAFLMSCMGQWSTVLHYPGCRDIQQGGEPIRIERGIFQGDSLSPLWFCLALNPLSTLLENSGLGYSLRRGSQVISHLLYMDDLKLFATSGLQLMKLLKITESFSNSISMEFGVDKCAVMHVKRGGIVESQGIQLSDSINLRSLSATETYKYLGMSEALGINVADVKQSLQARFFGRLNKVLKSVLSGGNKVRAFNGWVMPVLMYSFGVLKWTQTELDALDRRVRTLLTANRMHHPRSSVMRLYIPRKCGGRGFLNAKTLHNREVCNLREYFLEVDVGMHRDVVVVDKGLTPLSLGKENWHKSVVLSVKDRKDVWQSKELHGRYYRTLHRPDVDFLASVAWLRFGDLFGETEGFVCAIMDEVIMTNNYRKYIIKDGTVDICRACHCPGESLRHIISGCSRLANGEYLHRHNQVARIIHQQLALRYKLVESEVPYYRYVPDPVLESGRVTLYWDRSIITDRTIIANKPDIVVIDRSERRAIIVDITIPHDENLVKAEKEKQLKYLDLAHEVVDMWEVDSAIIVPIVVTANGIIAKSLDQHLKRLSLGAWVKGLIQKAVLLDTARIVRRFLSLES

SEQ ID NO: 28088 - protein, 1194 aa, Autographa gamma
MLTRQKARAAARPPPPDSSPSSASQLPDHVPAPAPAVASSSSDEYYSPPTSPTPVRRQGRRRPPCSLAPSGQPASNRAPAPGGVVRRMKWTLGINENVMRAYYGATEGGTNLTAYRARMLSLFQALEPGVSVSAQRLSDQVRVIQRNHMLDDSTLDRLRSEIQHSPAASTSPPVAAPVFGAPLTAPSDGEEDDGAITVSTQCNELIRSTLEDAIRDYRRSPPDQRPRLPRLPMHNRNKAIMGALDSLLPVYFESSEDLRDTHSILYCAALTACRVANIAMCHSNIATRPKPAVPAWQCRIEQRVAEARTLIAKLKAFKQGNSRPRVMRFVRRAYAGTDISPSEYTARVTERIDLFRQKVCAWANRIRRYKRRAERFHLNRMFQKDQRWVHRLWERPVSAMDGGCLPDGDATNSFWRSIWSAPVSHSEGDWIREVEQVCEPIQEMGAITISPQDVANAVRPMANWKTPGPDGLQNFWLKWLRSSHSCLASQFQSAVESASLPQFLTTGSTHLLHKTGSATDPKNYRPITCLPTVYKLLTSILRAKINEHIVSFSIMSASQNGCRSGSRGTKELLLIDTAICQQVRRSKKDLSTCWIDYKKAYDSVPHTWLMRVLELYKINATLRAFLMSCMGQWSTVLHYPGCRDIQQGGEPIRIERGIFQGDSLSPLWFCLALNPLSTLLENSGLGYSLRRGSRVISHLLYMDDLKLFATNGLQLMKLLKITESFSNSISMEFGVDKCAVMHVKRGGIVESQGIQLSDSINLRSLSATETYKYLGMSEALGVNAADVKQSLQARFFGRLNKVLKSVLSGGNKVRAFNGWVMPVLMYSFGVLKWTQTELDALDRRVRTLLTANRMHHPRSSVMRLYIPRKCGGRGFLNAKTLHNREVCNLREYFLQVDVGMHRDVVVVDKGFTPLSLGKENWHKPVVLSVKDREDVWQSKELHGRYYRTLHGPDVDFLASVAWLRFGDLFGETEGFVCAIMDEVIMTNNYRKYIIKDGTVDICRACHCPGESLRHIISGCSRLANGEYLHRHNQVARIIHQQLALRYKLVESEVPYYRYVPDPVLENGRVTLYWDRSIITDRTIIANKPDIVVIDRSERRAIIVDVTIPHDGNLVKAEKEKQLKYLDLAHEVVDMWEVDAAMIVPIVVTANGIIAKSLDQHLKRLSLGTWVKGLIQKAVLLDTARIVRRFLSLES

SEQ ID NO: 28089 - protein, 1194 aa, Autographa pulchrina
MLTRQKARAAARPPPPDSSPSSASQLPDQVPAPAPAIASSSSDEYYSPPTSPTPVRRQGRRRPPSSLAPAGQPASNRAPAPGGDVRRMKWTQSINENVMRAYYGATEGGTNLTAYRARMLSLFQALEPGVNVSAQRLSDQVRVIQRNHRLDDSTLDRLRSEIQHSHAASTSLPVVAPVPGAPPTAPDDGEEEDGAITVSTQCSELIRSTLEDAIRDYLKSPPDQRPRLPRLPMHNRNKAIMGALDSLLPVYFESSEDLRDTHSILYCAALTACRVANVASCHSNIATRPKPAVPAWQCRIEQRVAEARTLIAKLIAFKQGNSRPRVMRFVRRAFAGTDISPSEYTARVTERIDLFKQKVYAWANRIRRYKRRVERFHLNRMFQKDQRWVHRAWERPVSAVDGGCLPDGDATNSFWRSIWSVPVSHSEGDWMREVEQVCEPIQEMGAITISPQDVANAVRPMANWKTPGPDGLQNFWLKWFPSSHSCLASQFQSAVESASLPQFLTTGSTHLLHKTGSATDPKNYRPITCLPTVYKLLTSILRAKINKHVDSFSIMSASQNGCRSGSRGTKELLLIDTAICQQVRRSKKDLSTCWIDYKKAYDSVPHTWLMRVLELYKINTTLRAFLMSCMGQWSTVLHYPGCRDIQQGGEPIRIERGIFQGDSLSPLWFCLALNPLSTLLENSGLGYSLRRGSQVISHLLYMDDLKLFATSGLQLMKLLKITESFSNSISMEFGVDKCAVMHVKRGGIVESQGIQLSDSINLRSLSATETYKYLGMSEALGINVADVKQSLQARFFGRLNKVLKSVLSGGNKMRAFNGWVMPVLMYSFGVLKWTQTELDALDRRVRTLLTANRMHHPRSSVMRLYIPRKCGGRGFLNAKTLHNREVCNLREYFLEVDVGMHRDVVVVDKGLTPLSLGKENWHKPVVLSVKDRKDVWQSKELHGRYYRTLHGPDVDFLASVAWLRFGDLFGETEGFVCAIMDEVIMTNNYRKYIIKDGTVDICRACHCPGESLRHIISGCSRLANGEYLHRHNQVARIIHQQLALRYKLVESEVPYYRYVPDPVLESGRVTLYWDRSIITDRTIIANKPDIVVIDRSERRAIIVDITIPHDENLVKAEKEKQLKYLDLAHEVVDMWEVDSAIIVPIVVTANGIIAKSLDQHLKRLSLGAWVKGLIQKAVLLDTARIVRRFLSLES

SEQ ID NO: 28090 - protein, 1046 aa, Abrostola tripartita
MIYIYIWPCDMEADDRATTVSTQYNDILRSTLEDTIREYRVSPPGLRPRLPRLPMHNKNKAMISALDSLLSSYFEGSEDLCDTHSILYCAAATACRVANVKCFDSSTATRPKPAVPAWQCRIESRITEARTLISKLTAFREGNIRPRVMRFVRRAFAGVDINPPEYATRATERIDFYKQKVYAWASRIRKYKRRVDRFSQNRIFNQDQRWVYRNWERSAQGVSDGHLPDDDVTNAFWRSIWSVPVNHTEGSWMLDVEQSCESIPEMGTITISPQDVASAVRPMSNWKSPGPDGLHNFWIKWLRSSHGCLASQFQSAIEVGSLPQFLTTGSTHLLHKTGSTTDPKNFRPITCLPTIYKLLTSILRAKITKHIDDNNIMSASQNGCKNGSRGTKELLLIDMTICQQVRRSKKDLSTCWIDYKKAYDSVPHTWLMRVLELYKIDTTLRTFLLSCMRQWRTVLHYPGCRDIQQDGEPIRIERGIFQGDSLSPLWFCLALNPLSTLLENSGLGYSLRRRSQVISHLLYMDDLKLFAPSRFQLIKLLKITEAFSNSIRMEFGVDKCAVMHVKRGGIIESQGIQLSDSINLRSLSATETYKYLGMSEALGINVVDMKQSLKERFFGRLNKVLKSLLSGGNKVRAFNGWVMPTLMYSFGILKWTQTELDALDRRVRTLLTSNRMHHPRSSVMRLYIPRKCGGRGFLNAKTLHNREVCSLREYFLRAEVGMHREVVAVDKGLTPLFLAKENWCKPVVLSVNDRRDVWQSKELHGRFYKALHGPNVDLLSSVSWLRFGDLFGETEGFVCAIMDEVIMTNNYRKYILKDGTVDICRACHRPGESLRHIMSGCSRLANGEYLHRHNQVARIIHQQLALKYKLVDSEMPYYRYVPDPVLENDHITLYWDRSIITDRTIVANKPDIVVIDRLERRAMIVDITIPHDENLVKAERDKQIKYLDLAHEVVDMWEVDSAIIVPIVVSANGLMAKSLDQHLKRLTLGGWVKGLMQKAVLLDTARIVRRFLSLEPLCSLDPVPAAGWALFFIFLNIVFLYRYLKM

SEQ ID NO: 28091 - protein, 868 aa, Autographa pulchrina
MRFVRRAFAGTDISPSEYTARVTERIDLFKQRVYAWASRIRRYKRRVERFHLNRMFQKDQRWVHRAWERPVSAMDGGCLPDGDATNSFWRSIWSVPVSHSEGDWMREVEQVCEPIEEMGAITISPQDVANAVRPMVNWKTPGPDGLQNFWLKWLPSSHSCLASQFQSAVESASLPQFLTTGSTHLLHKTGSATDPKNYRPITCLPTVYKLLTSILRAKINEHVDSFSIMSASQNGCRSGSRGTKELLLIDTAICQQVRRSKKDLSTCWIDYKKAYDSVPHTWLMRVLELYKINTTLRAFLMSCMGQWSTVLHYPGCRDIQQGGEPIRIERGIFQGDSLSPLWFCLALNPLSTLLENSGLGYSLRRGSRVISHLLYMDDLKLFATGGLQLMKLLKITEGFSNSISMEFGVDKCAVMHVKRGGIVESQGIQLSDSINLRSLSATETYKYLGMSEALGINAADVKQSLQARFFGRLNKVLKSVLSGGNKVRAFNGWVMPVLMYSFGVLKWTQTELDALDRRVRTLLTANRMHHPRSSVMRLYIPRKCGGRGFLNAKTLHNREVCNLREYFLQVGVGMHRDVVVVDKGFTPLSLGKENWHKPVVLSVKDRENVWQSKELHGRYYRTLHGSDVDLLASVAWLRFGDLFGETEGFVCAIMDEVIMTNNYRKYIIKDGTVDICRACHCPGESLRHIISGCSRLANGEYLHRHNQVARIIHQQLALRYKLVESEVPYYRYVPDPVLENGRVTLYWDRSIITDRTIVANKPDIVVIDRSERRAIIVDITIPHDENLVKAEKEKQLKYLDLAHEVVDMWEVDSAIIVPIVVTANGIIAKSLDQHLKRLSLGAWVKGLIQKAVLLDTARIVRRFLSLES

SEQ ID NO: 28092 - protein, 1194 aa, Autographa pulchrina
MLTRLKARAAARPPPPDSSPSSASQLPDHVPTPAPAVASSSSDEYYSPPTSPTPVRRQGRRRPPSSLAPAGQPASNRAPAPGGDVRRMKWTQSINENVMRAYYGATEGGTNLTAYRARMLSLFQALEPGVSVSAQRLSDQVRVIQRNNRLDDSTLDRLRSEIQHSPAASTSLPVATPVSGAPPTAPSDGEEDDGAITVSTQCSELIRSTLEDAIRDYRKSPPDQRPRLPRLPMHNRNKAIMGALDSLLPVYFESSEDLRDTHSILYCAALTACRVANVAICHSNIATRPKPAVPAWQYRIEQRVAEARTLIAKLIAFKQGNSRPRVMRFVRRAFAGTDISPSEYTARVTERIDLFKQRVYAWASRIRRYKRRVERFHLNRMFQKDQRWVHRAWERPVSAMDGGCLPDGDATNSFWRNIWSVPVSHSEGDWMREVEQVCEPIQEMGAITISPQDVANAVRPMVNWKTPGPDGLQNFWLKWLPSSHSCLASQFQSAVESASLPQFLTTGSTHLLHKTGSATDPKNYRPITCLPTVYKLLTSILRAKINEHVDSFSIMSASQNGCRSGSRGTKELLLIDTAICQQVRRSKKDLSTCWIDYKKAYDSVPHTWLMRVLELYKINTTLRTFLMSCMGQWSTVLHYPGCRDIQQGGEPIRIERGIFQGDSLSPLWFCLALNPLSTLLENSGLGYSLRRGSRVISHLLYMDDLKLFATGGLQLMKLLKITEGFSNSISMEFGVDKCAVMHVKRGGIVESQGIQLSDFINLRSLSATETYKYLGMSEALGINVADVKQSLQARFFGRLNKVLKSVLSGGNKVRAFNGWVMPVLMYSFGVLKWTQTELDALDRRVRTLLTANRMHHPRSSVMRLYIPRKCGGRGFLNAKTLHNREVCNLREYFLQVDVGMHRDVVVVDKGFTPLSLGKENWHKPVVLSVKDRKDVWQNKELHGRYYRTLHGSDVDFLASVAWLRFGDLFGETEGFVCAIMDEVIMTNNYRKYIIKDGTVDICRACHCPGESLRHIISGCSRLANGEYLHRHNQVARIIHQQLALRYKLVESEVPYYRYVPDPVLENGRVTLYWDRSIITDRTIVANKPDIVVIDRSERRAIIVDITIPHDENLVKAEKEKQLKYLDLAHEVVDMWEVDSAIIVPIVVTANGIIAKSLDQHLKRLALGAWVKGLIQKAVLLDTARIVRRFLSLES

SEQ ID NO: 28093 - protein, 1194 aa, Autographa gamma
MLTRQKARAAARPPPPDSSPSSASQLPDHVPAPAPAVASSSSDEYYSPPTSPTPVRRQGRRRPPSSLAPSGQPASSRAPAPGGVVRRMKWTLGINENVMRAYYGATEGGTNLTAYRARMLSLFQALEPGVSVSAQRLSDQVRVIQRNHMLDDSTLDRLRSEIQHSPAASTSPPVAAPVFGAPLTAPGDGEEDDGAITVSTQCNELIRSTLEDAIRDYRRSPPDQRPRLPRLPMHNRNKAIMGALDSLLPVYFESSEDLRDTHSILYCAALTACRVANIAMCHSNIATRPKPAVPAWQCRIEQRVAEARTLIAKLKAFKQGNSRPRVMRFVRRAYAGTDISPSEYTARVTERIDLFRQKVCAWANRIRRYKRRAERFHLNRMFQKDQRWVHRLWERPVSAVDGGCLPDGDATNSFWRSIWSAPVSHSEGDWIREVEQVCEPIQEMGAITISPQDVANAVRPMANWKTPGPDGLQNFWLKWLRSSHSCLASQFQSAVESASLPQFLTTGSTHLLHKTGSATDPKNYRPITCLPTVYKLLTSILRAKINEHIVSFSIMSASQNGCRSGSRGTKELLLIDTAICQQVRRSKKDLSTCWIDYKKAYDSVPHTWLMRVLELYKINATLRAFLMSCMGQWSTVLHYPGCRDIQQGGEPIRIERGIFQGDSLSPLWFCLALNPLSTLLENSGLGYSLRRGSRVISHLLYMDDLKLFATNGLQLMKLLKITESFSNSISMEFGVDKCAVMHVKRGGIVESQGIQLSDSINLRSLSATETYKYLGMSEALGINAADVKQSLQARFFGRLNKVLKSVLSGGNKVRAFNGWVMPVLMYSFGVLKWTQTELDALDRRVRTLLTANRMHHPRSSVMRLYIPRKCGGRGFLNAKTLHNREVCNLREYFLQVDVGMHRDVVVVDKGFTPLSLGKENWHKPVVLSVKDREDVWQSKELHGRYYRTLHGPDVDFLASVAWLRFGDLFGETEGFVCAIMDEVIMTNNYRKYIIKDGTVDICRACHCPGESLRHIISGCSRLANGEYLHRHNQVARIIHQQLALRYKLVESEVPYYRYVPDPVLENGRVTLYWDRSIITDRTIVANKPDIVVIDRSERRAIIVDVTIPHDGNLVKAEKEKQLKYLDLAHEVVDMWEVDAAMIVPIVVTANGIIAKSLDQHLKRLSLGTWVKGLIQKAVLLDTARIVRRFLSLES

SEQ ID NO: 28094 - protein, 1194 aa, Autographa pulchrina
MLTRQKARAAARPPPPDSSPSSASQLPDQVPAPAPAIASSSSDEYYSPPTSPTPVRRQGRRRPPSSLAPAGQPASNRAPAPGGDVRRMKWTQSINENVMRAYYGATEGGTNLTAYRARMLSLFQALEPGVNVSAQRLSDQVRVIQRNHRLDDSTLDRLRSEIQHSPAASTSLPVVAPVPGAPPTAPDDGEEDDGAITVSTQCSELIRSTLEDAIRDYLKSPPDQRPRLPRLPMHNRNKAIMGALDSLLPVYFESSEDLRDTHSILYCAALTACRVANVAICHSNIATRPKPAVPAWQCRIEQRVAEARTLIAKLIAFKQGNSRPRVMRFVRRAFAGTDISPSEYTARVTERIDLFKQKVYAWANRIRRYKRRVERFHLNRMFQKDQRWVHRAWERPVSAVDGGCLPDGDATNSFWRSIWSVPVSHSEGDWMREVEQVCEPIQEMGAITISPQDVANAVRPMANWKTPGPDGLQNFWLKWFPSSHSCLASQFQSAVESASLPQFLTTGSTHLLHKTGSATDPKNYRPITCLPTVYKLLTSILRAKINKHVDSFSIMSASQNGCRSGSRGTKELLLIDTAICQQVRRSKKDLSTCWIDYKKAYDSVPHTWLMRVLELYKINTTLRAFLMSCIGQWSTVLHYPGCRDIQQGGEPIRIERGIFQGDSLSPLWFCLALNPLSTLLENSGLGYSLRRGSQVISHLLYMDDLKLFATSGLQLMKLLKITESFSNSISMEFGVDKCAVMHVKRGGIVESQGIQLSDSINLRSLSATETYKYLGMSEALGINVADVKQSLQARFFGRLNKVLKSVLSGGNKVRAFNGWVMPVLMYSFGVLKWTQTELDALDRRVRTLLTANRMHHPRSSVMRLYIPRKCGGRGFLNAKTLHNREVCNLREYFLEVDMGMHRDVVVVDKGLTPLSLGKENWHKPVVLSVKDRKDVWQSKELHGRYYRTLHGPDVDFLASVAWLRFGDLFGETEGFVCAIMDEVIMTNNYRKYIIKDGTVDICRACHCPGESLRHIISGCSRLANGEYLHRHNQVARIIHQQLALRYKLVESEVPYYRYVPDPVLESGRVTLYWDRSIITDRTIIANKPDIVVIDRSERRAIIVDITIPHDENLVKAEKEKQLKYLDLAHEVVDMWEVDSAIIVPIVVTANGIIAKSLDQHLKRLSLGAWVKGLIQKAVLLDTARIVRRFLSLES

SEQ ID NO: 28095 - protein, 1194 aa, Autographa gamma
MLTRQKARAAARPPPPDSSPSSASQLPDHVPAPAPAVASSSSDEYYSPPTSPTPVRRQGRRRPPCSLAPSGQPASSRAPAPGGVVRRMKWTLGINENVMRAYYGATEGGTNLTAYRARMLSLFQALEPGVSVSAQRLSDQVRVIQRNHMLDDSTLDRLRSEIQHSPAASTSLPVTAPVFGAPLTAPIDGEEDDGAITVSTQCNELIRSTLEDAIRDYRRSPPDQRPRLPRLPMHNRNKAIMGALDSLLPVYFESSEDLRDTHSILYCAALTACRVANIAMCHSNIATRPKPAVPAWQCRIEQRVAEARTLIAKLKAFKQGNSRPRVMRFVRRAYAGTDISPSEYTARVTERIDLFRQKVCAWANRIRRYKRRAERFHLNRMFQKDQRWVHRLWERPVSAMDGGCLPDGDATNSFWRSIWSAPVSHSEGDWIREVEQVCEPIQEMGAITISPQDVANAVRPMANWKTPGPDGLQNFWLKWLRSSHTCLASQFQSAVESASLPQFLTTGSTHLLHKTGSATDPKNYRPITCLPTVYKLFTSILRAKINEHIVSFSIMSASQNGCRSGSRGTKELLLIDTAICQQVRRSKKDLSTCWIDYKKAYDSVPHTWLMRVLELYKINATLRAFLMSCMGQWSTVLHYPGCRDIQQGGEPIRIERGIFQGDSLSPLWFCLALNPLSTLLENSGLGYSLRRGSRVISHLLYMDDLKLFATNGLQLMKLLKITESFSNSISMEFGVDKCAVMHVKRGGIVESQGIQLSDSINLRSLSATETYKYLGMSEALGINAADVKQSLQARFFGRLNKVLKSVLSGGNKVRAFNGWVMPVLMYSFGVLKWTQTELDALDRRVRTLLTANRMHHPRSSVMRLYIPRKCGGRGFLNAKTLHNREVCNLREYFLQVDVGMHRDVVVVDKGFTPLSLGKENWHKPVVLSVKDREDVWQSKELHGRYYRTLHGPDVDFLASVAWLRFGDLFGETEGFVCAIMDEVIMTNNYRKYIIKDGTVDICRACHCPGESLRHIISGCSRLANGEYLHRHNQVARIIHQQLALRYKLVESEVPYYRYVPDPVLENGRVTLYWDRSIITDRTIVANKPDIVVIDRSERRAIIVDVTIPHDENLVKAEKEKQLKYLDLAHEVVDMWEVDSAMIVPIVVTANGIIAKSLDQHLKRLSLGTWVKGLIQKAVLLDTARIVRRFLSLES

SEQ ID NO: 28096 - protein, 1194 aa, Autographa pulchrina
MLTRLKARAAARPPPPDSSPSSASQLPDHVPTPAPAVTSSSSDEYYSPPTSPTPVRRQGRRRPPSSLAPAGQPASNRAPAPGGDVRRMKWTQSINENVMRAYYGATEGGTNLTAYRARMLSLFQALEPGVSVSAQRLSDQVRVIQRNHRLDDSTLDRLRSEIQHSPAASTSLPVAAPVSGAPPTAPSDGEEDDGAITVSTQCSELIRSTLEDAIRDYRKSPPDQRHRLPRLPMHNRNKAIMGALDSLLPVYFESSEDLRDTHSILYCAALTACRVSNVAICHSNIATRPKPAVPAWQCRIEQRVAEARTLIAKLIAFKQGNSRPRVMRFVRRAFAGTDISPSEYTARVTERIDLFKQRVYAWASRIRRYKRRVERFHLNRMFQKDQRWVHRAWERPVSAMYGGCLPDGDATNSFWRSIWSVPVSHSEGDWMREVEQVCEPIQEMGAITISPQDVANAVRPMVNWKTPGPDGLQNFWLKWLPSSHSCLASQFQSAVDSASLPQFLTTGSTHLLHKTGSATDPKNYRPITCLPTVYKLLTSILRAKINEHVDSFSIMSASQNGCRSGSRGTKELLLIDTAICQQVRRSKKDLSTCWIDYKKAYDSVPHTWLMRVLELYKINTTLRTFLMSCMGQWSTVLHYPGCRDIQQGGEPIRIERGIFQGDSLSPLWFCLALNPLSTLLENSGLGYSLRRGSRVISHLLYMDDLKLFATGGLQLMKLLKITEGFSNSISMEFGVDKCAVMHVKRGGTEESQGIQLSDSINLRSLSATETYKYLGMSEALGINVADVKQSLQARFFGRLNKVLKSVLSGGNKVRAFNGWVMPVLMYSFGVLKWTQTELDALDRRVRTLLTANRMHHPRSSVMRLYIPRKCGGRGFLNAKTLHNREVCNLREYFLQVDVGMHRDVVVVDKGFTPLSLGKENWHKPVVLSVKDRKDVWQSKELHGRYYRTLHGSDVDFLASVAWLRFGDLFGETEGFVCAIMDEVIMTNNYRKYIIKDGTVDICRACHCPGESLRHIISGCSRLANGEYLHRHNQVARIIHQQLALRYKLVESEVPYYRYVPDPVLENGRVTLYWDRSIITDRTIVANKPDIVVIDRSERRAIIVDITIPHDENLVKAEKEKQLKYLDLAHEVVDMWEVDSAIIVPIVVTANGIIAKSLDQHLKRLALGAWVKGLIQKAVLLDTARIVRRFLSLES

SEQ ID NO: 28097 - protein, 1194 aa, Autographa pulchrina
MLTRLKARAAARPPPPDSSPSSASQLPDHVPTPAPAVASSSSDEYYSPPTSPTPVRRQGRRRPPSSLAPAGQPASNRAPAPGGDVRRMKWTQSINENVMRAYYGATEGGTNLTAYRARMLSLFQALEPGVSVSAQRLSDQVRVIQRNHRLDDSTLDRLRSEIQHSPAASTSLPVAAPVSGAPPTAPSDGEEDDGAITVSTQCSELIRSTLEDAIRDYRKSPPDQRPRLPRLPMHNRNKAIMGALDSLLPVYFESSEDLRDTHSILYCAALTACRVANVAICHSNIATRPKPAVPAWQCRIEQRVAEARTLIAKLIAFKQGNSRPRVMRFVRRAFAGTDMSPSEYTARVTERIDLFKQRVYAWASRIRRYKRRVERFHLNRMFQKDQRWVHRAWERPVSAMDGGCLPDGDATNSFWRSIWSVPVSHSEGDWMREVEQVCEPIEEMGAITISPQDVANAVRPMVNWKTPGPDGLQNFWLKWLPSSHSCLASQFQSAVESASLPQFLTTGSTHLLHKTGSATDPKNYRPITCLPTVYKLLTSILRAKINEHVDSFSIMSASQNGCRSGCRGTKELLLIDTAICQQVRRSKKDLSTCWIDYKKAYDSVPHTWLMRVLELYKINTTLRAFLMSCMGQWSTVLHYPGCRDIQQGGEPIRIELGIFQGDSLSPLWFCLALNPLSTLLENSGLGYSLRRGSRVISHLLYMDDLKLFATGGLQLMKLLKITEGFSNSISMEFGVDKCAVMHVKRGGIVESQGIQLSDSINLRSLSATETYKYLGMSEALGINAADVKQSLQARFFGRLNKVLKSVLSGGNKVRAFNGWVMPVLMYSFGVLKWTQTELDALDRRVRTLLTANRMHHPRSSVMRLYIPRKCGGRGFLNAKTLHNREVCNLREYFLQVDVGMHRDVVVVDKGFTPLSLGKQNWHKPVVLSVKDREKVWQSKELHGRYYRTLHGSDVDLLASVAWLRFGDLFGETEGFVCAIMDEVIMTNNYRKYIIKDGTVDICRACHCPGESLRHIISGCSRLANGEYLHRHNQVARIIHQQLALRYKLVESEVPYYRYVPDPVLENGRVTLYWDRSIITDRTIVANKPDIVVIDRSERRAIIVDITIPHDENLVKAEKEKQLKYLDLAHEVVDMWEVDSAIIVPIVVTANGIIAKSLDQHLKRLALGAWVKGLIQKAVLLDTARIVRRFLSLES

SEQ ID NO: 28098 - protein, 1194 aa, Autographa gamma
MLTRQKARAAARPPPPDSSPSSASQLPDHVPAPAPAVASSSSDEYYSPPTSPTPVRRQGRRRPPCSLAPSGQPASSRAPAPGGVVRRMKWTLGINENVMRAYYGATEGGTNLTAYRARMLSLFQALEPGVSVSAQRLSDQVRVIQRNHMLDDSTLDRLRSEIQHSPAASSSPPVAAPVFGAPLTAPSDGEEDDGAITVSTQCNELIRSTLEDAIRDYRRSPPDQRPRLPRLPMHNRNKAIMGALDSLLPVYFESSEDLRDTHSILYCAALTACRVANIAMCHSNIATRPKPAVPAWQCRIEQRVAEARTLIAKLKAFKQGNSRPRVMRFVRRAYAGTDISPSEYTARVTERIDLFRQKVCAWANRIRRYKRRAERFHLNRMFQKDQRWVHRLWERPVSAVDGGCLPDGDATNSFWRSIWSAPVSHSEGDWIREVEQVCEPIQEMGAITISPQDVANAVRPMANWKTPGPDGLQNFWLKWLRSSHSCLASQFQSAVESASLPQFLTTGSTHLLHKTGSATDPKNYRPITCLPTVYKLLTSILRAKINEHIVSFSIMSASQNGCRSGSRGTKELLLIDTAICQQVRRSKKDLSTCWIDYKKAYDSVPHTWLMRVLELYKINATLRAFLMSCMGQWSTVLHYPGCRDIQQGGEPIRIERGIFQGDSLSPLWFCLALNPLSTLLENSGLGYSLRRGSRVISHLLYMDDLKLFATNGLQLMKLLKITESFSNSISMEFGVDKCAVMHVKRGGIVESQGIQLSDSINLRSLSATETYKYLGMSEALGINAADVKQSLQARFFGRLNKVLKSVLSGGNKVRAFNGWVMPVLMYSFGVLKWTQTELDALDRRVRTLLTANRMHHPRSSVMRLYIPRKCGGRGFLNAKTLHNREVCNLREYFLQVDVGMHRDVVVVDKGFTPLSLGKENWHKPVVLSVKDREDVWQSKELHGRYYRTLHGPDVDFLASVAWLRFGDLFGETEGFVCAIMDEVIMTNNYRKYIIKDGTVDICRACHCPGESLRHIISGCSRLANGEYLHRHNQVARIIHQQLALRYKLVESEVPYYRYVPDPVLENGRVTLYWDRSIITDRTIVANKPDIVVIDRSERRAIIVDVTIPHDENLVKAEKEKQLKYLDLAHEVVDMWEVDAAMIVPIVVTANGIIAKSLDQHLKRLSLGTWVKGLIQKAVLLDTARIVRRFLSLES

SEQ ID NO: 28099 - protein, 1064 aa, Sesamia nonagrioides
MLTRSAARQRARPPSPDSLLSSASPPPVSSATVNAVTTPAAAVALSSSDEYFSPPTSPTPVRRQGRGRPPKSLGLRGHPAPSRVPAAGGCVQRMRWSQTMNENVMRAYYGATEGGTNLTAYRERMLSLFQALEPTVNVSAQRLSDQVRVIQRNHRLDDTALDRLRSEVLSNQIAPTLTQTAALASIIDAVPPRSNRVEEEDDRVETVSSQYNDRLRSTLEDAFREYRSTPTDLRPRLPRLPMHKKNRALVSALDSQLKNVFESSEDLIDTHSILFCAAVAACRLANIKFPNCDEANRPKPAVPAWQHRIERRIDGARVFIGKLYCFREGNTRPRVMRFVRQAFSGTGISPREYLTHVTERIDFLKQKVCAWANRIRRYKRRVDRYTQNRMFQSDERWVYRAWERSELNEADVCRPDVAATSAFWRSIWSVPVCHAEGDWIQNVEQVCEMIPEMDTILITPIDVATAVRSLPNWKSPGPDGLHNFWLKWLSSSHTCLASQFQSSLESGSLPQFLTTGITHLLHKSGSTAEPNNYRPITCLPTVYKVLTSILKAKINKHLDSNSIMSVSQNGCKSGSRGTKELLLIDMAISQQVRRSRKDLSTCWIDYKKAYDSVPHTWLMRVLELYKINATLRTFLRSCMGQWKTVLRYPGSRRIQGNDEPVWIKRGIFQGDSLSPLWFCLALNPLSTLLEDSGLGYRLKRGGQVISHLLYMDDLKLFAPNKLHLMKLLIVTETFSSGIKMEFGVDKCAVMHVERGQIMESEGITLPDSIHLRSLSSFESYKYLGMSEALGINDADMKQSLKERFFGRLKKVLKSLISGGNKVRAFNGWVMPVLMYSFGILKWTQTELDALDRRVRTLLTANRMHHPRSSVMRLYIPRKCGGRGFLNAKTLHNREVCSLREHFLKTVVGMHHDVVTVDKGLTPLSMAKENWHKPIILTTDDRKMIWQSKELHGRFYRALHGPDVDFLASVSWLRFGDLFGETEGFVCAIMDEVILTNNYRRYIMKDGTIDVCRACHHPGESIRHIISGCSRLANSEYLHRHNQVARIIHQQLALKYKLVDSEVPY

SEQ ID NO: 28100 - protein, 870 aa, Sesamia nonagrioides
MRFVRQAFSGTGISPREYLTHVTERIDFLKQKVCAWANRIRRYKRRVDRYTQNRMFQSDERWVYRAWERSELNEADVCRPDVAATSAFWRSIWSVPVCHAEGDWIQNVEQVCEMIPEMDTILITPIDVATAVRSLPNWKSPGPDGLHNFWLKWLSSSHTCLASQFQSSLESGSLPQFLTTGITHLLHKSGSTAEPNNYRPITCLPTVYKVLTSILKAKINKHLDSNSIMSVSQNGCKSGSRGTKELLLTDMAISQQVRRSRKDLSTCWIDYKKAYDSVPHTWLMRVLELYKINATLRTFLRSCMGQWKTVLRYPGSRRIQGNDEPVWIKRGIFQGDSLSPLWFCLALNPLSTLLEDSGLGYRLKRGGQVISHLLYMDDLKLFAPNKLHLMKLLNVTETFSSGIKMEFGVDKCAVMHVERGQIMESEGITLPDSIHLRSLSSFESYKYLGMSEALGINDADMKQSLKERFFGRLKKVLKSLLSGGNKVRAFNGWVMPVLMYSFGIVKWTQTELDALDRRVRTLLTANRMHHPRSSVMRLYIPRKCGGRGFLNAKTLHNREVCSLREHFLKTVVGMHHDVVTVDKGLTPLSMAKENWHKPIILTTDDRKMIWQSKELHGRFYRALHGPDVDFLASVSWLRFGDLFGETEGFVCAIMDEVILTNNYRRYIMKDGTIDVCRACHHPGESIRHIISGCSRLANSEYLHRHNQVARIIHQQLALKYKLVDSEVPYYKYVPDPVLENDHVTLYWDRSIITDRTIVANKPDISITTIDRLARLAMIVDVTIPHDGNLVKAEKEKQMKYLDLAHEVVDMWNVNSAVIVPIVVSANGLIAKSLDQHLLRLSLGSWIKGLIQKAVLLDTARIVRRFLSLEP

SEQ ID NO: 28101 - protein, 1046 aa, Mythimna ferrago
MLDDAVLDRLRLESRNGRVSPISPPAAVQRQPSVSPRPDHVGEDDDDGAISVSTQCNARLRSALEDAFREYRSIPPELRPRLPRLPMHRKNRALVCALDSQLSNCFDSSEDLTDTHSILYCAAAAACRVAHVKIPNNDRATRPAKPAWQCRIERRIGVARALIGKLICFREGNTRPRVMRFVRRAFLGTDISSRDYLPRITERIDFLKQKVYAWANRIRRYKRRVERYTQNHTFQSNERWVYRAWERPDQSVIDTRLPDDDAMYSFWRSIWSVPVNHTEGDWTREIERVCELVPEMGATNISPQDVARAVRPLPNWKSPGPDGLHNFWLKWFQSSHARLAFQFQSALESGSLPQFLTTGITHLLHKSGSTAEPKNYRPITCLPTVYKVLTSILRAKINNHIETNSIMSASQNGCRNGSRGTKELLLIDVAISQQVRRSRRDLSTCWIDYKKAYDSVPHTWLMRVLELYKIDVTLRTFLMSCMGQWRTVLHYPGCRRVSENSEPLRIERGIFQGDSLSPLWFCLALNPLSTLLEGSGLGYRLRREGQVISHLLYMDDLKLFASNNLQLMELLKVTETFSSAIRMEFGLDKCAVMHVKRGEIMESVGTQLLDSIHLRSLSSTETYKYLGMSEALGINAADVKQSLRERFFGRLNKVLKSLVSGGNKVRAFNGWVMPVLMYSFGILKWTQTELDALDRRVRSLLTANRMHHPRSSVMRLYIPRKCGGRGFLNAKTLHNREVYSLRKYFLETDVGMHRYVVAVDKGLTPLSLANENWRKPIVMDTNERKEVWKGKELHGRFYRALHGPDVDLLASVSWLRFGDLFGETEGFVFAIMDEVMMTNNYRKYIVKDGTVDICRACHRPGESIRHIISGCSHLANGDYLHRHNLVARIIHQQLALKYNLVESEVPYYRYVPDPVLENGSVTLYWDRSIITDRTIVANKPDMVVIDRLERHTMIVDIAVPHDENLVKAEKDKQTKYLDLAREVVDMWEVDRAIIVPIVVTANGLIAKSLDQHLWRLSLGSWIKGLIQKAVLLDTARIVRRFLSQEP

SEQ ID NO: 28102 - protein, 1069 aa, Eilema sororculum
MLTRAQARNRNAQTTSPDSSLSSAAQPPAVEPAASSSSSSDEFFSPPTSPTPVRRPGRGRPPTCLGPRRPPASNRAPAAGGNVHRMRWTNSINENVMRAYFAATEGGTNLSAYRTRMLPLFQALEPSINTSAQRLSDQVRVIQRNRMLNETVLETLRQECLRNICVTPAPAPAPASTAEINNDTCVAPDDTPIPVSIQYNEQIKEALECALREYRSVPVHVRPRLPRLPIHRRNIALVSALDSLLPRYLENSENLGDTHSILYCTAVAACRMAGAKFPIKDPAIRPKSAIPAWQCRIERRVAEARVLIGKLICFRSGNTRPRVMRYVTRAFAGTDISPQDYTSRVTERIDFLKQKVYAWANRIRRYKRRVDRYTVNHMFQRDQRWVYRNWERTDESVDDVRRPDAEATNAFWRSIWSVPVSHTEGDWMREVERACEIIPEMEEIYIDATDVDCAVRSLSNWKSPGPDGLHNFWLKWLRSSHLVLASQFQSAIESGTLPAFMTTGVTHLLHKTGSTLEPNNYRPITCLPTVYKLLTSILRAKINNHINNNSIMCASQNGCRNGARGTKELLLIDMAISQQARRNRKDLTACWIDYKKAFDSVPHTWLLRVLELYKVNTTLCTFLRSCMGQWRTVLFYPGCRRALGGGVPITIERGIFQGDSLSPLWFCLALNPLSTLLVNSGLGYRLRREGQMVSHLFYMDDLKLFAHTNPQLMALLKVTETFSNSIKMAFGVDKCAVIHVKRGRVVESEGIQLSDSTNLRSLLVTETYKYLGMSQALCINEVDMKQMLQERFFGRLKKVLNSLLSGGNKVRACNSWVMPLLMYSFGILRWTQTELDTIDRKVRTQLTAFRMHHPRSSVMRLYIPRKCGGRGFLNAKTLHNREVCNLRDYFLKSHVDMHRDVVNVDTGLTPLGLAKENWRRPTIVSTDSRREVWQSKELHGRFYRALHRPEVDLLASVSWLRFSDLFGETEGFVCAIADEVIKTNNYRKYIMRDGTIDICRACHQPGESLRHITSGCSRLANGEYFHRHNQVARIIHQRLALKYNLVEVEVPYYKYVPEPVLQNSHITLY

SEQ ID NO: 28103 - protein, 1028 aa, Eilema sororculum
MCVTPAPAPAPASTTALNEDSHVTRDDTPIPVSIQYNEEIKEALEYALREYRSMPIHVRPRLPRLPIHRRNIALVSAFDSLLPKYLKNSENLGDTHSILYCTAVAACRMAGAKFPIKDPAIRPKPAIPAWQCRIERRVAEARVLIGKLICFRSGNTRPRVMRYVTRAFAGTNISPQDYTSRVTERIDFLKQKVCAWANRIRRYKKRVDRYTVNRMFQRDQRWVYRNWERTDESVDDVRRADAEATNAFWRSIWSVPVSHTEGDWMREVERACEPIPEMEEIYIDATDVDCAVRSLSNWKSPGPDGLHNFWLKWLRSSHVVLASQFQSAVESGTLPVFMTTGVTHLLHKTGSTLEPNNYRPITCLPTVYKLLTSILRAKINNHINNNSIMCASQNGCRNGAQGTKELLLIDMTISQQARRNRKDLAACWIDYKKAFDSVPHTWLLRVLELYKVNTTLCTFLRSCMGQWRTVLFYPGCRQALGSGEPITIERGIFQGDSLSPLWFCLALNPLSTLLVNSGLGYRLRREGQMVSHLFYMDDLKLFAHTNPQLIALLKVTETFSNSIKMAFGVDKCAVIHVKRGRVVESESIQLSDSTNLRSLLVTETYKYLGMSQALCIKEVDMKQMLQERFFSRLKKVLNSLLSGGNKVRACNSWVMPLLMYSFGILKWTQTELDTIDRKVRTQLTAFRMHHPRSSVMRLYIPRKCGGRGFLNAKTLHNREVCNLRDYFLKSNVEMHRDVVNVDTGLTPLGLAKENWRRPTIVGTDSRREVWQSKELHGRFYQALHRPEVDLLASVSWLRFSDLFGETEGFVCAIADEVIKTNNYRKYIMRDGTIDICRACHQPGESLRHITSGCSRLANGEYLHRHNQVARIIHQRLALKYNLVEVEVPYYRYVPEPVLENSHITLYWDRSIITDRTVVANKPDIVVIDRSEHRALIVDVTIPHDENLVKAEKDKQVKYLDLAHEVVDMWNVDSAIIVPIVVSVNGLIAKSLDQHLKRLGLDGWVKGQMQKAVLLDTARIVRKFLSLEP

SEQ ID NO: 28104 - protein, 1191 aa, Eilema sororculum
MLTRAQARNRNAQSTSPGSSLSSAAQLPAVEPAASSSSSSDEFFSPPTSPTPVRRPGRGRPPTCLGPRRPPASNRAPATGDNVHRMRWTTSINENVMRAYFAATEGGTNLSAYRTRMLPLFQALEPTINTSAQRLSDQVRVIQRNRLLNETVLETLRLECLRNICVTPAPAPAPASTAEINDDAYVAPDDTPIPVSIQYNEEIKEALECALREYRSMPVHVRPRLPRLPIHRRNIVLVSALDSLLPRYLEKSENLGDTHSILYCTAVAAWRIAGAKFPIKDPAIRPKPAIPAWQCRIERRVAEARVLIGKLICFRSGNTRPRVMRYVTRAFAGTDISPLDYTSRVTERIDLLKQKVYAWANRIRRYKKRVDRYTLNCMFQRDQRWVYRSWERTEESVDDVRRPDAEATNAFWRSIWLVPVSHTEGDWMREVERACETIPEMEEINIDAIDVDCAVRPLSNWKSPGPDGLHNFWLKWLRSSHVVLASQFQSAVESGTLPAFMTTGVTHLLHKTGSTLEPNNYRPITCLPTVYKLLTSILRAKINNHINNNSIICASQNGCRNGARGTKELLLIDMTISQQARRNRKDLAACWIDYKKAFDSVPHTWLLRVLELYKVNTTLCTFLRSCMGQWRTVLFYPGCRQALGSGEPITIERGIFQGDSLSPLWFCLALNPLSTLLVNSGLGYRLRREGQMVSHLFYMDDLKLFAHTNPQLIALLKVTETFSHSIKMAFGVDKCAVIHVKRGRVVESESIQLSDSTNLRSLLVTETYKYLGMSQTLCINEADMKQMLQDRFFGRLKKVLNSLLSGGNKVRACNSWVMPLLMYFFGILKWIQTELDTIDRKVRAQLTAFRMHHPRSSVMRLYIPRKCGGRGFLNAKTLHNREVCNLRDYFLKSNVDMHRDVVNVDTGLTPLGLAKENWRRPTIVSTDSRREVWQSKELHGRFYRALHRPEVDLLASVSWLRFSDLFGETEGFVCAIADEVIKTNNYRKYIMRDGTIDICRACHQPGESLRHITSGCSRLANGEYLHRHNQVARIIHQRLALKYNLVEVEVPYYRYVPEPVLENSHITLYWDRSIITDRTVVANKPDIVVIDRSERRALIVDVTIPHDENLVKAEKDKQVKYLDLAHEVVDMWNVDAAIIVPIVVSVNGLIAKSLDQHLKRLGLDGWVKGQMQKAVLLDTARIVRKFLSLEP

SEQ ID NO: 28105 - protein, 1195 aa, Eilema sororculum
MLTRAQANRNRSAPTTSPDSSLSSAAQPPAVEPAASSSSSSDEFFSPPTSPTPVRRPGRGRPPTCLGPRRPPASNRAPATGGNVHRMRWTNSINENVMRAYFAATEGGTNLSAYRTRMFPLFQALEPTINTSAQRLSDQVRVIQRNRMLNETVLETLRLECLRNICVTPAPAPAPASTAGINDVTYVAPDDTPIPVSIQYNEEIKEALECALREYRSMPVHVRPRLPRLPIHRRNIALVSALDSLLPRYLENSENLGDTHSILYCTAVAACRIAGAKFPIKHPAIRPKPVIPAWQCRIERRVAEARVLIGKLICFRSGNTRPRVMRYVTRAFAGTDISPQDYTSRVTERIDFLKQKVYAWANRIRRYKKRVDRYTINCMFQRDQRWVYRSWERTEESVDDVRRPDAEATNAFWRSIWSVPVSHTEGDWMREVERACETIPEMEEINIDAIDVDCAVRSLSNWKSPGPDGLHNFWLKWLRSSHFVLASQFQSAIESGTLPTFMTTGVTHLLHKTGSTLEPNNYRPITCLPTVYKLLTSILRAKINNHINNNSIMCASQNGCRNGARGTKELLLIDMTISQQARRNRKDLAACWIDYKKAFDSVPHTWLLRVLELYKVNTTLCTFLRSCMGQWRTVLFYPGCRQALGSGEPITIERGIFQGDSLSPLWFCLALNPLSTLLVNSGLGYRLRREGQMVSHLFYMDDLKLFAHTNPQLIALLKITETFSNSIKMAFGVDKCAVIHVKRGWVVESEGIQLSDSTNLRSLLVTETYKYLGMSQALCIKEVDMKQMLQERFFGRLKKVLNSLLSGGNKVRACNSWVMPLLMYSFGILKWTQTELDTIDRKVRTQLTAFRMHHPRSSVMRLYIPRKCGGRGFLNAKTLHNREVCNLRDYFLKSNVEMHLDVVNVDTGLTPLGLAKENWRRPTIVGTDSRREVWQSKELHGRFYRALHRPEVDLLASVSWLRFSDLFGETEGFVCAIADEVNKTNNYRKYIMRDGTIDICRACHQPGESLRHITSGCSRLANGEYLHRHNQVARIIHQRLALKYNLVEVEVPYYRYVPEPVLENSHITLYWDRSIITDRTVVANKPDIVVIDRSERRALIVDVTIPHDENLVKAEKDKQVKYLDLAHEVVDMWNVDSAIIVPIVVSVNGLIAKSFDQHLKRLGLDGWVKGQMQKAVLLDTARIVRSSFLWSPNHR

SEQ ID NO: 28106 - protein, 1066 aa, Sesamia nonagrioides
MLTRAATRRARPPPPDSSLSTASPPPVSSATVNAVRTPAVVVASSSSDEYFSPTTSPTPVRRQGRGRPPKSLGLRGHPASSRVPAAGGCVQRMRWTQTMNENVMRAYYGATEGGTNLTAYRERMLSLFQALEPTVNISAQRLSDQVRVIQRNHRLDDIALDRLRSEVLSNQIAPTLTQTAAQASIINAVPPRSNRVEEEDDRVETVSSQYNDRLRSALEDAFRDRSTPTNLRPRLPRLPMHKKNRALVCALDSQLKNFFESSEDLIDTHLILYCAAVAACRLAKVKFPNCDEATRPKLAVPAWQRRIERRIDGTRVLIDKLYCFREGNTRPREMRFVRQAFSGTGISPREYINNVTERIDFLKQKVCAWASRIRRYKKRVDRYTQNRMFQSDERGVYRAWERPEQNEADECRPDDATTSAFWRGIWSVSVCHTEGDWTQDVEQVCDAIPEMDNILITPLDVATAVRSLPNWKSPGPDGLHNFWLKWLSSSHTCLASQFQSSLESGSLPQFLTTGITHLLHKSGSTAEPKNYRPITCLPTVYKVLTSILKAKINNHLDSNSIMSVSQNGCRSGSRGTKELPLIDMAISQQVRRSRKDLSTCWIDYKKAYDSVPHTWLMRVLELYKINATLRTFLRSCMGQIQGNDEPVWIKRGIFQGDSLSPLWFCLALNPLSTLLEDSGLGYRLKRGGQVISHLLYMDDLKLFAPNKLHLMKLLNVTETFSSGIKMEFGVDKCAVMHVKRVQIMESEGITLPDSIHLRSLSSFESYKYLGMSEALGINDADMKQSLKERFFGRLKKVLNSLLSAGNKVRAFNGWVMPVLMYSFGILKWTQTELDALDRRVRTLLTANRMHHPRSSVMRLYIPRKCGGRGFLNAKTLHNREVCSLREYFLKTVVGMHHDVVTVDKGLTPLSMAKENWHKPIILTTDDRKMLWQSKELHGRFYRALHGPDVDFLASVSWLRFGDLFGETEGFVCAIMDEVILTNNYRRYIMKDGTIDVCRACHHPGESIRHIISGCSRLANSQYLHRHNQVARIIHQQLALKYKLVDSEVPYYKYVPDPVLENDHVTL

SEQ ID NO: 28107 - protein, 1202 aa, Griposia aprilina
MLTRSARTRARPPPPDSSLSSASPPPVSSPIVSAVTTPVAVVASSSSDEYFSPPTSPTPVRRQGRGRPPRSLGLRGHPAPSRVPAAGGCVQRMKWTQSMNENVMRAYYRSTEGGTNLTAYRDRMLSLFQELEPTINVSAQRLSDQVRVIQRNHRLDDAALDRLRSELNNHIISTPAQTAVQASTIDEIQPRSNHGVEVEDDRVASVSSQCNARLRSALEDAFREYRSTPTELRPRLPRLPMHKKNRALVCALDSQLKNVFESSENLIDTHSILYCAAVAACRLANVRFPNCDGATRPKPAVPAWQCRIERRIDGARVLIGKLHCFREGNNRPRVMRFVRRAFSGTGISPREYMSHATERIDFLKQKVCAWASRIRRYKRRVDRYTQNRMFQSDERWVYRAWERPEQNVTDECRPDDATTSTFWRSIWSVPVCHVEADWMRDVGRACETVPEMDAVLITPLDVARAVRPLPNWKSPGPDGLHNFWLKWLISSHACLASQYQSSLESGSLPQFLTTGVTHLLHKSGSPTDPKNYRPITCLSTVYKLLTSILRAKINTHIESNSIMSASQNGCRNGSRGTKELLLIDMAISQQVRRSRRDLSTCWIDYKKAYDSVPHTWLMRVLELYKIDTTLRTFLRSCMGQWRTVLRYPGCRQIQANDEPVWIKRGIFQGDSLSPLWFCLALNPLSTLLEDSGLGYRLRKDGQVISHLLYMDDLKLFAPNKLQLMELLKVTETFSSTIRMEFGVDKCAVMHVKRGEVMEPEGIQLSDSIHLRSLSSSESYKYLGMSEALGINVADMKQSLRERFFGRLKKVLISLLSGGNKVRAFNGWVMPVLMYSFGILKWTQTELDALDRRVRTLLTANRMHHPRSSVMRLYIPRKCGGRGFLNAKTLHNREMCSLREYFLKAEVGMHRDVVAVDKGLTPLSMAKENWRKPVVLTTDDRKEVWQSKELHGRFYRALHEPGVDFLASVSWLRFGDLFGETEGFVCAIMDEVILTNNYRRHIMKDGTVDMCRACHRPGESIRHIVSGCSRLANGEYLQRHNQVARIIHQQLALKYKLVDSEVPYYKYVPDPVLENDHITLYWDRSIITDRTIVANKPDIVVIDRLARRTMIIDITIPHDENLVKAEKEKQIKYLDLAHEVVEMWNVSSAVIVPIVVSANGLMAKSLDQHLSRLSLDGWVKGLIQKAVLLDTARIVRRFLSLEP

SEQ ID NO: 28108 - protein, 1093 aa, Eilema sororculum
MRAYFAATEGGTNLSAYRSRMLPLFQALEPSVNTSVQRLSDQVRVIQRNHMLNETVLETLRQECLRNICVTPTPAPAPASTTALNEDSHVTRDDTPIPVSIQYNEEIKEALEYALREYRSMPIHVRPRLPRLPIHRRNIALVSALDSLLPKYLENSENLGDTHSILYCTAVAACRMAGAKFPIKDPAIRPKPAIPAWQCRIERRVAEARVLIGKLICFRSGNTRPRVMRYVTRAFAGTNISPQDYTSRVTERIDFLKQKVCAWANRIRRYKKRVDRYTVNRMFQRDQRWVYRSWERTDESVDDVRRPDAEATNAFWRSIWSVPVSHTEGDWMREVERACETIPEMEEIYIDATDVDCAVRSLSNWKSPGQDGLHNFWLKWLRSSHVVLASQFQSAIESGTLPAFMTTGVTHLLHKTGSTLEPNNYRPITCLPTVYKLLTSILRAKINNHINNNSIMCASQNGCRNGARGTKELLLIDMTISQQARRNRKDLAACWIDYKKAFDSVPHTWLLRVLELYKVNTTLCTFLRSCMGQWRTVLLYPGCRRALGSGEPITIERGIFQGDSLSPLWFCLALNPLSTLLVNSGLGYRLRREGQMVSHLFYMDDLKLFAHTNPQLIALLKVTETFSNSIKMAFGVDKCAVIHVKRGRVVESEGIQLSDSTNLRSLLVTETYKYLGMSQALCINEVGMKQMLQERFFGQKVLNSLLSGGNKVRACNSWVMPLLMYSFGILKWTQTELDTIDRKVRTQLTAFRMHHPRSSVMRLYIPRKCGGRGFLNAKTLHNREVYNLRDYFLKSNVDMHRDVVNVDTGLTPLGLAKENWRRPTIVGTDSRREVWQSKELHGRFYRALHRPEVDLLASVSWLRFSDLFGETEGFVCAIADEVIKTNNYRKYIMRDGTIDICRACHQPGESLRHITSGCSRLANGEYLHRHNQVARIIHQRLALKYNLVEVEVPYYRYVPEPVLENSHITLYWDRSIITDRTVVANKPDIVVIDRSERRALIVDVTIPHDENLVKAEKDKQVKYLDLAHEVVDMWNVDSAIIVPIVVSVNGLIAKSLDQHLKRLGLDGWVKGQMQKAVLLDTARIVRKFLSLEP

SEQ ID NO: 28109 - protein, 1053 aa, Noctua fimbriata
MLTRAAARRARLPPPDPSLSSASPPPESSHIVSAVTPAVAVASSSSDEYFSPPTSPTPVRRQGRGRPPRSLGLRGHPAPSRVPAAGGCVQRMRWTHSINENVMRAYYGSTEGGTNLTAYRVGMLSLFQVLEPTVNVSAQRLSDQVRVIQRNHMLDDAVLDRLRSEVLSNRIVLTPAQTAVQASVIDATPPRFNPAVVEEDDRVAVVSSQCNDRLRSALEDALREYRSTPTELRPRLPRLPMHNKNRALVCALDSQLENIFESSENLVDTHSILYCGAVAACRLANVKFPNCDVATRPKPAVPAWQRRIERRIDGARVLIGKLHCFREGNTRPRVMRFVRRAFSGTGISPQEYMSRATERIDFLKQKVYAWANRIRRYKRRVDRYSQNRMFQSDERWVYRAWERPELNMTDVCRPDDAATSSFWRSIWSVPVCHTEADWMCDVERVCEPIPEMEPILITPLDIARAVRPLPNWKSPGPDGLHNFWLKWLSSSHTCLASQFQSSLESGSLPQFLTTGVTHLLHKSGSPAEPKNYRPITCLSTVYKLLTSILRAKINTHIDKNSIMSASQNGCRNGSRGTKELLLIDMAISQQVRRSRKDLSTCWIDYKKAYDSVPHTWLMRVLELYKIDATLRAFLESCMGQWRTVLRYPGCRQIQGNDEPVWIKRGIFQGDSLSPLWFCLALNPLSTLLEDSGLGYRLRRGGQVISHLLYMDDLKLFAPNELRLMELLKVTETFSSAIRMEFGVDKCAVMYVKQGEIMESEGIQLSDSIHLRTLSSTESYKYLGMSEALGINVTDMKQSLKERFFGRLNKVLHSLLSGGNKVRAFNGWVMPVLMYSFGVLKWTQTELDALDRRVRTLLTANRMHHPRSSVMRLYIPRKCGGRGFLNAKSLHNREMCSLREYFLKVEVGMHRDVVAVDKGLTPLSMAKDNWRKPEVLTTDIPTIVANKPDIVVIDRSARRVMIVDVTIPHDENLVKAEKEKQIKYLDLAHEVVDMWNVNSAIIVPIVVTANGLIAKSLDDHLSRLSLGGWIKGLIQKAVLLDTARIVRRFLSLEP

SEQ ID NO: 28110 - protein, 1202 aa, Griposia aprilina
MLTRSARTRARPPPPDSSLSSASPPPVSSLIVSAVTTPAAVVASSSSDEYFSPPTSPTPVRRQGRGRPPRSLGLRGHPAPSRVPAAGGCVQRMKWTQSMNENVMRAYYRSTEGGTNLTAYRDRMLSLFQELEPTINVSAQRLSDQVRVIQRSHRLDDAALDRLRSELNNHIISTPAQTAVQASTIDEIQPRSNHGVEVEDDRVASVSSQCNARLRSALEDAFREYRSTPTELRPRLPRLPMHKKNRALVCALDSQLKNVFESSENLIDTHSILYCAAVAACRLANVRFPNCDGATRPKPAVPAWQCRIERRIDGARVLIGKLHCFREGNNRPRVMRFVRRAFSGTGISPREYMSHATERIDFLKQKVCAWASRIRRYKRRVDRYTQNRMFQSDERWVYRAWERPEQNVTDECRPDDATTSTFWRSIWSVPVCHVEADWMRDVGRACETVPEMDAVLITPLDVARAVRPLPNWNSPGPDGLHNFWSKWLISSHACLASQYQSSLESGSLPQFLTTGVTHLLHKSGSPTDPKNYRPITCLSTVYKLLTSILRAKINTHIESNSIMSASQNGCRNGSRGTKELLLIDMAISQQVRRSRRDLSTCWIDYKKAYDSVPHTWLMRVLELYKIDTTLRTFLRSCMGQWRTVLRYPGCRQIQANDEPVWIKRGIFQGDSLSPLWFCLALNPLSTLLEDSGLGYRLRRGGQVISHLLYMDDLKLFAPNKLQLMELLKVTETFSSTIKMEFGVDKCAVMHVKRGEVMEPEGIQLSDSIHLRSLSSSESYKYLGMSEALGINVADMKQSLRERFFGRLKKVLISLLSGGNKVRAFNGWVMPVLMYSFGILKWTQTELDALDRRVRRLLTANRMHHPRSSVMRLYIPRKCGGRGFLNAKTLHNREVCSLREYFLKAEVGMHRDVVAVDKGLTPLSMAKENWRKPVVLTTDDRKEVWQSKELHGRFYRALHEPGVDFLASVSWLRFGDLFGETEGFVCAIMDEVILTNNYRRHIMKDGTVDMCRACHRPGESIRHIVSGYSRLANGEYLHRHNQVARIIHQQLALKYKLVDSEVPYYKYVPDPVLENDHITLYWDRSIITVRTIVANKPDIVVIDRLARRTMIIDITIPHDENLVKAEKEKQIKYLDLAHEVVDMWNVSSAVIVPIVVSANGLMAKSLDQHLSRLSLGGWVKGLIQKAVLLDTARIVRRFLSLEP

SEQ ID NO: 28111 - protein, 961 aa, Limenitis camilla
MHKKNRALVCTLDSLLPMYFESSEDLKDTHTILFCAAVAVCRVAHVKLVNTETTRPKPDVAAWQSRIEQRIDETRVLIGKLYSFREGNTRPRVMRFVRRAFSGTEICPPEYMARVTERIDTLKQKIYAWANRIRRYRRRVDRYSQNRMFQKDQKWVYRTWERPDQNVDDIHRPDDDDTNKFWRSIWSVSVDHTEGDWMQEIRQTREPLQAMEHISITCKDVADAVLSVPNWKSPGPDGLHNFWLKWLRSSHACLASQFQSALESGSLPQFLTTGITHLLHKSGSTTEPKNYRPITCLPTVYKLLTSILRDKIDSHITKNAIMSVSQNGCRNRSRGTKELLLIDMTISQQVRRSRKDLSTCWIDYKKAYDSVPHGWLMRVLELYKVDATLCAFLGSCMRQWRTVLRYPGCRPIQGNNEPIRIKRGIFQGDSLSPLWFCLALKPLSTLLENSGLGYRLRRSGQVISHLLYMDDLKLFVPTKLQLIELLKITKTFSNSIRMEFGVDKCAVMHVKRGKIEESEGIQLSDSVNLRSLSADETYKYLGMSEALGIIEIDMKQSVRERFLARLRKVLKSLLSGGNKVRAYNGWVMPILMYSFGILKWTQKELDDLDRKVRALLITYRMHHPRSSVMRLYIPRKCGGRGFLNAKTLHNREVCNLREHFLQTDVGMHRDVVAMDKGLTPLSLAKENWRKPIVLSTDNRKEVWKSKELHGRFYRALHGDEVDFKASVSWLRFGNLFGETEGFVCAIMDEVIMTRNYRRYIVRDGTVDICRACHSSGESLRHIISGCPRLANGEYLHRHNQVAKIIHQQLALRYGLVESEVPYYRYAPDPVLENGHVTLYWDRIIITDRTIIANKPDIVVIDRSERCTMIVDVTIPHDGNLVKAEKDKQMKYLDLAHEIVDMWDVDSAVVVPIVVTANGLIAKSLDQHLKRLALDGWVKGLMQKAVLLDTARIVRMFLSLEP

SEQ ID NO: 28112 - protein, 1067 aa, Sesamia nonagrioides
MLTRSATRKARPPPPDSLLRSASPPPVSSPIVNAVTTSAAAVASSSSDEYFSPPTSPTPVRRQGRGRPPKSLGLRGHPAPSRVPAVGGCVQRMRWSQTMNENVMRAYYGATEGGTNLTAYRERMLSLFQALEPTVNVSAQRLSDQVRVIQRNHRLDDTALDRLRPEVLSNQIAPTLTQTAALASIIDAVPPRSNRVEEEDDGVETVSSQYNDRLRSTLEDAFREYRSTPTDLRPRLPRLPMHKKNRALVSALDSQLKNVFESSEDLIDTHSILFCGAVAACRLANIKFPNCDEANRPRPAVPHWQHRIECRIDGARVLIGKLYCFREGNTRPRVMRFVRQAFSGTGISPREYISHVTERIDFLKQKVCAWASRIRRYKRRVDHYTQNRMFQSDERWVYRAWERTEQNEADVCRPDDAATSAFWRSIWSVPVCHAEGDWIQDVEQVCEMIPEMDTILITPIDVATAVRSLPNWKSPGPDGLHNFWLKWLSSSHTCLASQFQSSLESGLLPQFLTTGITHLLLKSGSTAEPNNYRPITCLPTVYKVLTSILKAKLNKHLDRNSIMSVSQNGCRSGSRGTKELLLIDMAISQQVRRSRKDLSTCWIYYKKAYDSVPHTWLMRVLELYKVNATLRTFLRSCMGQWKTVLRYPGSRRIQGNDEPVWIKRGIFRGDSLSPLWFCLALNPLSTLLEDSGLGYRLRRGGQVISHLLYMDDLKLFAPNKLHLMKLLNVTETFSSGIKMEFGVDKCAVMHVKRGQIMESEGITLPDSIHLRSLSSVESYKYLGMSEALGINDADMKQSLKERFFGRLKKVLKSLLSGGNKVSAFNGWVMPVLMYSFGILKWTQTELDALDRRVRTLLTANKMHHPRSSVMRLYIPRKCGGRGFLNAKTLHNREVCSLREHFLKTVVGMHHDVVTVDKGLTPLSMAKENWHKPIILTTDDRKMIWQSKELYITDRTIVANKPDIVVIDRLARLAMIVDVTIPHDGNLVKAEKEKQMKYLDLAHEVVDMWNVNSAVIVPIVVSANGLIAKSLDQHLLRLSLGSWIKGLIQKAVLLDTARIVRRFLSLEP

SEQ ID NO: 28113 - protein, 1071 aa, Spodoptera exigua
MKWTTSINENVMRAYFGATEGGNNLTAYRVRMLALFQVLEPSVNVSAQRLSDQVRVIQRNRMLEDVVLDRLRSEVLRSRVIIPPSQTTEELQPNSTDVPNDDRTTEVSTHICSDELRRTLEGAIQEYRHAYLKPRLPRLPMHKKNKAIICALDSQLPTYLDNSKATRPKPAVPAWQCRIERRIGEVRTLIAKLICFREGNTRPRIMRFVKRAFSGTAISPQNYASHITERVDFLKQKIYAWANRIRRYKKRAERYTQNRAFQRDQRWVYRNWEQKEQARTDTCLPDFSATKAFWRSIWSAPVDHTEGDWIEEVKGKCELIPQMNSIKISTEDVSNAAYPLANWKAPGPDGLHNFWIKWFMSSHSRLATQFQSALESGSLPQFFTTGLTHLLHKSGCTTEPKNYRPITCLPTIYKLLTSILRAKLNKHIEDNNIMSSSQNGCRNGSRGTKELLLIDISICQVRRFHKNLSTCWIDYKKAYDSIPHTWLMRVLELYNVDPTLCTFLRSCMNQWKTVLRYPGCGQIFESDEPIKIERGIFQGDSLSPLWFCLALNPLSTLLEGSGLGYRLRRGGQIVSHLLYMDDLKLFAPNNSHLMRLLNLTEMFSNAIGMEFGVDKCAVMHVKRGEVVESDGTQISDSTNFRSLSPSDSYKYLGMSEALGIDTAVMKQTLRERFFGCLRKVLNSLLSGGNKVRAYNGWVMPVLMYSFGILKWTQTELDTLDRKVRSLLTEHRMHHPRSSVMRLYIPRKCGGRGFLNAKALHNSEVCSLRNYFLKMEVGMHQDVVAVDKGLTALSLAYENWRKPVVLSTKDRKDVWQSKELHGRYYRALHGPEVDFLASVSWLRFGNLFGETEGFVCAIMDEVMLANNYRKYIIKDGTADICRACHRPGESIRHIILGCSHLANGEYLHRHNLVARIIQQLALKYKLVESEVPYYKYLPDPVLENGDVTLYWDRTIITDRTIVANKPDIVMIDRSSRRTMIIDITIPHDENLVKAEKDKASKYLDLAHEIVDMWDVDSATIVPIVVSANGLMAKSLDKHLSRLTLDGWVKNLIQKAVLLDTARIVRRFLSLEP

SEQ ID NO: 28114 - protein, 1197 aa, Spodoptera exigua
MLTRAKARAASQRTRPPSPTSPPSSAPLSSVPDPDTGIRPATAVVSSSSDEFFSPPTSPPPPRRRRKRRPPSSLGPRGPSASGGVPAPGGSVSRMKWTTSINENVMRAYFGATEGGNNLTAYRVRMLALFQVLEPSVNVSAQRLSDQVRVIQRNRMLEDVVLDRLRSEVLRSRVIIPPSQTTEELQPNSTDVPNDDRTTEVSTHICSDELRRTLEGAIQEYRHAYLKPRLPRLPMHKKNKAIMCALDSQLPTYLDNSKDLVDTHSILYCAAIAACRVANVKLPDNYNRATRPKPAVPAWQCRIERRIGEVRTLIAKLICFREGNTRPRIMRFVKRAFSGTAISPQNYASHITERVDFLKQKIYAWANRIRRYKRRAERYTQNRAFQRDQRWVYRNWEQKEQARTDTCLPDFSATKALWRSIWSAPVDHTEGDWIEEVKGKCELIPQMNSIKISTEDVSNAAYPLANWKAPGPDGLHNFWIKWFMSSHSRLATQFQSALESGSLPQFFTTGLTHLLHKSGCTTEPKNYRPITCLPTIYKLLTSILRAKLNKHIEDNNIMSSSQNGCRNGSRGTKELLLIDISICQQVRRFHKNLSTCWIDYKKAYDSIPHTWLMRVLELYNVDPTLCTFLRSCMNQWKTVLRYPGCGQIFESDEPIKIERGIFQGDSLSPLWFCLALNPLSTLLEGSGLGYRLRRGGQIVSHLLYMDDLKLFAPNNSHLMRLLNLTEMFSNAIGMEFGVDKCAVMHVKRGEVVESDGTQISDSTNFRSLSPSDSYKYLGMSEALGIDTAVMKQTLRERFFGRLRKVLNSLLSGGNKVRAYNGWVMPVLMYSFGILKWTQTELDTLDRKVRSLLTEHRMHHPRSSVMRLYIPRKCGGRGFLNAKALHNSEVCSLRNYFLKMEVGMHQDVVAVDKGLTALSLANENWRKPVVLSTKDRKDVWQSKELHGRYYRALHGPEVDFLASVSWLRFGNLFGETEGFVCAIMDEVMLTNNYRKYIIKDGTADICRACHRPGESIRHIISGCSHLANGEYLHRHNLVARIIHQQLALKYKLVESEVPYYKYLPDPVLENGDVTLYWDRTIITDRTIVANKPDIVMIDRSSRRTMIIDITIPHDENLVKAEKDKASKYLDLAHEIVDMWDVDSAIIVPIVVSANGLMAKSLDKHLSRLTLDGWVKNLIQKAVLLDTARIVRRFLSLEP

SEQ ID NO: 28115 - protein, 945 aa, Spodoptera exigua
MPYFPTTLVDTHSILYCAAIAACRVANVKLPDNYNRATRPKPAVPAWQCRIERRIGEVRTLIAKLICFREGNTRPRIMRFVKRAFSGTAISPQNYASHITERVDFLKQKIYAWANRIRRYKRRAERYTQNRAFQRDQRWVYRNWEQKEQARTDTCLPDFSATKAFWRSIWSVPVDHTEGDWIEEVKGKCELIPQMNSIKISTEDVSNAAYPLANWKAPGPDGLHNFWIKWFMSSHSRLATQFQSALESGSLPQFFTTGLTHLLHKSGCTTEPKNYRPITCLPTIYKLLTSILRAKLNKHIEDNNIMSSSQNGCRNGSRGTKELLLIDISICQQVRRSHKNLSTCWIDYKKAYDSIPHTWLMRVLELYNVDPTLCTFLRSCMNQWKTVLRYPGCGQIFESDEPIKIERGIFQGDSLSPLWFCLALNPLSTLLEGSGLGYRLRRGGQIVSHLLYMDDLKLFAPNNSHLMRLLNLTEIFSNAIGMEFGVDKCAVMHVKRGEIVESDGTQISDSTNFRSLSPSDSYKYLGMSEALGIDTAVMKQTLRERFFGRLRKVLNSLLSGGNKVRAYNGWVMPVLMYSFGILKWTQTELDTLDRKVRSLLTEHRMHHPRSSVMRLYIPRKCGGRGFLNAKALHNSEVCSLRNYFLKMEVGMHQDVVAVDKGLTALSLANENWRKPVVLSTKDRKDVWQSKELHGRYYRALHGPEVDFLASVSWLRFGNLFGETEGFVCAIMDEVMLTNNYRKYIIKDGTADICRACHRPGESIRHIISGCSHLANGEYLHRHNLVARIIHQQLALKYKLVESEVPYYKYLPDPVLENGDVTLYWDRTIITDRTIVANKPDIVMIDRSSRRTMIIDITIPHDENLVKAEKDKASKYLDLAHEIVDMWDVDSAIIVPIVVSANGLMAKSLDKHLSRLTLDGWVKNLIQKAVLLDTARIVRRFLSLEP

SEQ ID NO: 28116 - protein, 1197 aa, Spodoptera exigua
MLTRAKARAASQRTRPPSPTSPPSSAPPSSAPDPDTGIRPATAVVSSSSDEFFSPPTSPPPPRRRRKRRPPSSLGPRGPSASGGVPAPGGSVSRMKWTTSINENVMRAYFGATEGGNNLTAYRVRMLALFQVLEPSVNVSAQRLSDQVRVIQRNRMLEDVVLDRLRSEVLRSRVIIPPSQTTEELQPNSTDVPNDDRTTEVSTHICSDELRRTLEGAIQEYRHAYLKPRLPRLPMHKKNKAIMCALDSQLPTYLDNSKDLVDTHSILYCAAIAACRVANVKLPDNYNRATRPKPAVPAWQCRIERRIGEVRTLIAKLICFREGNTRPRIMRFVKRAFSGTAISPQNYASHITERVDFLKQKIYAWANRIRRYKRRAERYTQNRAFQRDQRWVYRNWEQKEQARTDTCLPDFSATKAFWRSIWSAPVDHTEGDWIEEVKGKCELIPQMNSIKISTEDVSNAAYPLANWKAPGPDGLHNFWIKWFMSSHSRLATQFQSALESGSLPQFFTTGLTHLLHKSGCTTEPKNYRPITCLPTIYKLLTSILRAKLNKHIEDNNIMSSSQNGCRNGSRGTKELLLIDISICQQVRRSHKNLSTCWIDYKKAYDSIPHTWLMRVLELYNVDPTLCTFLRSCMNQWKTVLRYPGCGQIFESDEPIKIERGIFQGDSLSPLWFCLALNPLSTLLEGSGLGYRLRRGGQIVSHLLYMDDLKLFAPNNSHLMRLLNLTEIFSNAIGMEFDVDKCAVMHVKRGEIVESDGTQISDSTNFRSHSPSDSYKYLGMSEALGIDTAVMKQTLRERFFGRLRKVLNSLLSGGNKVRAYNGWVMPVLMYSFGILKWTQTELDTLDRKVRSLLTEHRMHHPRSSVMRLYIPRKCGGRGFLNAKALHNSEVCSLRNYFLKMEVGMHQDVVAVDKGLTALSLANENWRKPVVLSTKDRKDVWQSKELHGRYYRALHGPEVDFLASVSWLRFGNLFGETEGFVCAIMDEVMLTNNYRKYIIKDGTADICRACHRPGESIRHIISGCSHLANGEYLHRHNLVARIIHQQLALKYKLVESEVPYYKYLPDPVLENGDVTLYWDRTIITDRTIVANKPDIVMIDRSSRRTMIIDITIPHDENLVKAEKDKASKYLDLAHEIVDMWDVDSAIIVPIVVSANGLMAKSLDKHLSRLTLDGWVKNLIQKAVLLDTARIVRRFLSLEP

SEQ ID NO: 28117 - protein, 1197 aa, Spodoptera exigua
MLTRAKARAASQRTRPPSPTSPPSSAPLSSAPDPDTGIRPATAVVSSSSDEFFSPPTSPPPPRRRRKRRPPSSLGPRGPSASGGVPAPGGSVSRMKWTTSINENVMRAYFGATEGGNNLTAYRVRMLALFQVLEPSVNVSAQRLSDQVRVIQRNRMLEDVVLDRLRSEVLRSRVIIPPSQTTEELQPNSTDVPNDDRTTEVSTHICSDELRRTLEGAIQEYRHAYLKPRLPRLPMHKKNKAIMCALDSQLPTYLDNSKDLVDTHSILYCAAIAACRVANVKLPDNYNRATRPKPAVPAWQCRIERRIGEVRTLIAKLICFREGNTRPRIMRFVKRAFSGTAISPQNYASHITERVDFLKQKIYAWANRIRRYKRRAERYTQNRAFQRDQRWVYRNWEQKEQARTDTCLPDFSATKAFWRNIWSAPVDHTEGDWIEEVKGKCELIPQMNSIKISTEDVSNAAYPLANWKAPGPDGLHNFWIKWFMSSHSRLATQFQSALESGSLPQFFTTGLTHLLHKSGCTTEPKNYRPITCLPTIYKLLTSILRAKLNKHIEDNNIMSSSQNGCRNGSRGTKELLLIDISICQQVRRFHKNLSTCWIDYKKAYDSIPHTWLMRVLELYNVDPTLCTFLRSCMNQWKTVLRYPGCGQIFESDEPIKIERGIFQGDSLSPLWFCLALNPLSTLLEGSGLGYRLRRGGQIVSHLLYMDDLKLFAPNNSHLMRLLNLTEMFSNAIGMEFGVDKCAVMHVKRGEVVESDGTQISDSTNFRSLSPSDSYKYLGMSEALGIDTAVMKQTLRERFFGRLRKVLNSLLSGGNKVRAYNGWVMPVLMYSFGILKWTQTELDTLDRKVRSLLTEHRMHHPRSSVMRLYIPRKCGGRGFLNAKALHNSEVCSLRNYFLKMEVGMHQDVVAVDKGLTALSLANENWRKPVVLSTKDRKDVWQSKELHGRYYRALHGPEVDFLASVSWLRFGNLFGETEGFVCAIMDEVMLTNNYRKYIIKDGTADICRACHRPGESIRHIISGCSHLANGEYLHRHNLVARIIHQQLALKYKLVESEVPYYKYLPDPVLENGDVTLYWDRTIITDRTIVANKPDIVMIDRSSRCTMIIDITIPHDENLVKAEKDKASKYLDLAHEIVDMWDVDSAIIVPIVVSANGLMAKSLDKHLSRLTLDGWVKNLIQKAVLLDTARIVRRFLSLEP

SEQ ID NO: 28118 - protein, 1197 aa, Spodoptera exigua
MLTRAKARAASQRTRPPSPTSPPSSAPPSSAPDPDTGIRPATAVVSSSSDEFFSPPTSPPPPRRGRKRRPPSSLGPRGPSASGGVPAPGGSVSRMKWTTSINENVMRAYFGATEGGNNLTAYRVRMLALFQVLEPSVNVSAQRLSDQVRVIQRNRMLEDVVLDRLRSEVLRSRVIIPPSQTTEELQPNSTDVPNDDRTTEVSTHICSDELRRTLEGAIQEYRHAYLKPRLPRLPMHNKNKAIMCALDSQLPTYLDNSKDLVDTHSILYCAAIAACRVANVKLPDNYNRATRPKSAVPAWQCRIERRIGEVRTLIAKLICFREGNTRPRIMRFVKRAFSGTAISPQNYASHITERVDFLKQKIYAWANRIRRYKRRAERYTQNRAFQRDQRWVYRNWEQKEQARTDTCLPDFSATKAFWRSIWSAPVDHTEGDWIEEVKGKCELIPQMNSIKISTEDVSNAAYPLANWKAPGPDGLHNFWIKWFMSSHSRLATQFQSALEAGSLPQFFTTGLTHLLHKSGCTTEPKNYRPITCLPTIYKLLTSILRAKLNKHIEDNNIMSSSQNGCRNGSRGTKELLLIDISICQQVRRFHKNLSTCWIDYKKAYDSIPHTWLMRVLELYNVDPTLCTFLRSCMNQWKTVLRYPGCGQIFESDEPIKIERGIFQGDSLSPLWFCLALNPLSTLLEGSGLGYRLRRGGQIVSHLLYMDDLKLFAPNNSHLMKLLNLTEMFSNAIGMEFGVDKCAVMHVKRGEIVESDGTQISDSTNFRSLSPSDSYKYLGMSEALGIDTAVMKQTLRERFFGRLRKVLNSLLSGGNKVRAYNGWVMPVLMYSFGILKWTQTELDTLDRKVRSLLTEHRMHHPRSSVMRLYIPRKCGGRGFLNAKALHNSEVCSLRNYFLKMEVGMHQDVVAVDKGLTALSLANENWRKPVVLSTKDRKDVWQSKELHGRYYRALHGPEVDFLASVSWLRFGNLFGETEGFVCAIMDEVMLTNNYRKYIIKDGTADICRACHRPGESIRHIISGCSHLANGEYLHRHNLVARIIHQQLALKYKLVESEVPYYKYLPDPVLENGDVTLYWDRTIITDRTIVANKPDIVMIDRSSRRTMIIDITIPHDENLVKAEKDKASKYLDLAHEIVDMWDVDSAIIVPIVVSANGLMAKSLDKHLSRLTLDGWVKNLIQKAVLLDTARIVRRFLSLEP

SEQ ID NO: 28119 - protein, 1197 aa, Spodoptera exigua
MLTRAKARAASQRTRPPSPTSPPSSAPPSSAPHPDTGIRPATAVVSSSSDEFFSPPTSPPPPRRRRKRRPPSSLGPRGPSASGGVPAPGGSVSRMKWTTSINENVMRAYFGATEGGNNLTAYRVRMLALFQVLEPSVNVSAQRLSDQVRVIQRNRMLEDVVLDRLRSEVLRSRVIIPPSQTTEGLQPNSTDVPNDDRTTEVSTHICSDELRRTLEGAIQEYRHACLKPRLPRLPMHKKNKAIMCALDSQLPTYLDNSKDLVDTHSILYCAAIAACRVANVKLPDNYNRATRPKPAVPAWQCRIERRIGEVRTLIAKLICFREGNTRPRIMRFVKRAFSGTAISPQNYASHITERVDFLKQKIYAWANRIRRYKRRAERYTQNRAFQRDQRWVYRNWEQKEQARTDTCLPDFSATKAFWRSIWSAPVDHTEGDWIEEVKGKCELIPQMNSIKISTEDVSNAAYPLANWKAPGPDGLHNFWIKWFMSSHSRLATQFQSALESGSLPQFFTTGLTHLLHKSGCTTEPKNYRPITCLPTIYKLLTSILRAKLNKHIEDNNIMSSSQNGCRNGSRGTKELLLIDISICQQVRRFHKNLSTCWIDYKKAYDSIPHTWLMRVLELYNVDPTLCTFLRSCMNQWKTVLRYPGCGQIFESDEPIKIERGIFQGDSLSPLWFCLALNPLSTLLEGSGLGYRLRRGGQIVSHLLYMDDLKLFAPNNSHLMRLLNLTEMFSNAIGMEFGVDKCAVMHVKRGEIVESDGTQISDSTNFRSLSPSDNYKYLGMSEALGIDTAVMKQTLRERFFGRLRKVLNSLLSGGNKVRAYNGWVMPVLMYSFGILKWTQTELDTLDRKVRSLLTEHRMHHPRSSVMRLYIPRKCGGRGFLNAKALHNSEVCSLRNYFLKMEVGMHQDVVAVDKGLTALSLANENWRKPVVLSTKDRKDVWQSKELHGRYYRALHGPDVDFLASVSWLRFGNLFGETEGFVCAIMDEVMLTNNYRKYIIKDGTADICRACHRPGESIRHIISGCSHLANGEYLHRHNLVARIIHQQLALKYKLVESEVPYYKYLPDPVLENGDVTLYWDRTIITDRTIVANKPDIVMIDRSSRRTMIIDITIPHDENLVKAEKDKASKYLDLAHEIVDMWDVDSAIIVPIVVSANGLMAKSLDKHLSRLTLDGWVKNLIQKAVLLDTARIVRRFLSLEP

SEQ ID NO: 28120 - protein, 1197 aa, Spodoptera exigua
MLTRAKARAASQRTRPPSPTSPPSSAPPSSAPDPDTGIRPATAVVSSSSDEFFSPPTSPPPPRRRRKRRPPSSLGPRGPSASGGVPAPGGSVSRMKWTTSINENVMRAYFGATEGGNNLTAYRVRMLALFQVLEPSVNVSAQRLSDQVRVIQRNRMLEDVVLDRLRSEVLRSRVIIPPSQTTEELQPNSTDVPNDDRTTEVSTHICSDELRRTLEGAIQEYRHAYLKPRLPRLPMHKKNKAIMCALDSQLPTYLDNSKDLVDTHSILYCAAIAACRVANVKLPDNYNRATRPKPAVPAWQCRIERRIGEVRTLIAKLICFREGNTRPRIMRFVKRAFSGTAISPQNYASHITERVDFLKQKIYAWANRIRRYKRRAERYTQNRAFQRDQRWVYRNWEQKEQARTDTCLPDFSATKAFWRSIWSAPVDHTEGDWIEEVKGKCELIPQMNSIKISTEDVSNAAYPLANWKAPGPDGLHNFWIKWFMSSHSRLATQFQSALESGSLPQFFTTGLTHLLHKSGCTTEPKNYRPITCLPTIYKLLTSILRAKLNKHIEDNNIMSSSQNGCRNGSRGTKELLLIDISICQQVRRFHRNLSTCWIDYKKAYDSIPHTWLMRVLELYNVDPTLCTFLRSCMNQWKTVLCYPGCGQIFESDEPIKIERGIFQGDSLSPLWFCLALNPLSTLLEGSGLGYRLRRGGQIVSHLLYMDDLKLFAPNNSHLMRLLNLTEMFSNAIGMEFGVDKCAVMHVKRGEIVESDGTQISDSTNFRSLSPSDSYKYLGMSEALGIDTAVMKQTLRERFFGRLRKVLNSLLSGGNKVRAYNGWVMPVLMYSFGILKWTQTELDTLDRKVRSLLTEHRMHHPRSSVMRLYIPRKCGGRGFLNAKALHNSEVCSLRNYFLKMEVGMHQDVVAVDKGLTALSLANENWRKPVVLSTKDRKDVWQSKELHGRYYRALHGPEVDFLASVSWLRFGNLFGETEGFVCAIMDEVMLTNNYRKYIIKDGTADICRACHRPGESIRHIISGCSHLANGEYLHRHNLVARIIHQQLALKYKLVESEVPYYKYLPAPVLENGDVTLYWDRTIITDRTIVANKPDIVMIDRSSRRTMIIDITIPHDENLVKAEKDKASKYLDLAHEIVDMWDVDSAIIVPIVVSANGLMAKSLDKHLSRLTLDGWVKNLIQKAVLLDTARIVRRFLSLEP

SEQ ID NO: 28121 - protein, 1197 aa, Spodoptera exigua
MLTRAKARAASQRTRPPSPTSPPSSAPPSSAPDPDTGIRPATAVVSSSSDEFFSPPTSPPPPRRRRKRRPPSSLGPRGPSASGGVPAPGGSVSRMKWTTSINENVMRAYFGATEGGNNLTAYRVRMLALFQVLEPSVNVSAQRLSDQVRVIQRNRMLEDVVLDRLRSEVLRSRVIIPPSQTTEELQPNSTDVPNDDRTTEVSTHICSDELRRTLEGAIQEYRHAYLKPRLPRLPMHKNNKAIMCALDSQLPTYLDNSKDLVDTHSILYCAAIAACRVANVKLPDNYNRATRPKPAVPAWQCRIERRIGEVRTLIAKLICFREGNTRPRIMRFVKRAFSGTAISPQNYASHITERVDFLKQKIYAWANRIRRYKRRAERYTQNRAFQRDQRWVYRNWEQKEQARTDTCLPDFSATKAFWRSIWSVPVDHTEGDWIEEVKGKCELIPQMNSIKISTEDVSNAAYPLANWKAPGPDGLHNFWIKWFMSSHSRLATQFQSALESGSLPQFFTTGLTHLLHKSGCTTEPKNYRPITCLPTIYKLLTSILRAKLNKHIEDNNIMSSSQNGCRNGSRGTKELLLIDISICQQVRRSHKNLSTCWIDYKKAYDSIPHTWLMRVLELYNVDPTLCTFLRSCMNQWKTVLRYPGCGQIFESDEPIKIERGIFQGDSLSPLWFCLALNPLSTLLEGSGLGYRLRRGGQIVSHLLYMDDLKLFAPNNSHLMRLLNLTEIFSNAIGMEFGVDKCAVMHVKRGEIVESDGTQISDSTNFRSLSPSDSYKYLGMSEALGIDTAVMKQTLRERFFGRLRKVLNSLLSGGNKVRAYNGWVMPVLMYSFGILKWTQTELDTLDRKVRSLLTEHRMHHPRSSVMRLYIPRKCGGRGFLNAKALHNSEVCSLRNYFLKMEVGMHQDVVAVDKGLTALSLANENWRKPVVLSTKDRKDVWQSKELHGRYYRALHGPEVDFLASVSWLRFGNLFGETEGFVCAIMDEVMLTNNYRKYIIKDGTADICRACHRPGESIRHIISGCSHLANGEYLHRHNLVARIIHQQLALKYKLVESEVPYYKYLPDPVLENGDVTLYWDRTIITDRTIVANKPDIVMIDRSSRRTMIIDITIPHDENLVKAEKDKASKYLDLAHEIVDMWDVDSAIIVPIVVSANGLMAKSLDKHLSRLTLDGWVKNLIQKAVLLDTARIVRRFLSLEP

SEQ ID NO: 28122 - protein, 868 aa, Spodoptera exigua
MRFVKRAFSGTAILPQNYASHITERVDFLKQKIYAWANRIRRYKRRAERYTQNRAFQRDQRWVCRNWEQKEQARTDTCLPDFSATKAFWRSIWSAPVDHTEGDWIEKVKGKCELIPQMNSIKISTEDVSNAAYPLANWKAPGPDGLHNFWIKWFMSSHSRLATQFQSALESGSLPQFFTTGLTHLLHKSGCTTEPKNYRPITCLPTIYKLLTSILRAKLNKHIEDNNIMSSSQNGCRNGSRGTKELLLIDISICQQVRRFHKNLSTCWIYYKKAYDSIPHTWLMRVLELYNVDPTLCTFLRSCMNQWKTVLRYPGCGQIFESDEPIKIERGIFQGDSLSPLWFCLALNPLSTLLEGSGLGYRLRRGGQVVSHLLYMDDLKLFAPNNSHLMRLLNLTEMFSNAIGMEFGVDKCAVMHVKRGEIVESDGTQISDSTNFRSLSPSESYKYLGMSEALGIDTTVMKQTLRERFFGRLRKVLNSLLSGGNKVRAYNGWVMPVLMYSFGILKWTQTELDTLDRKVRSLLTEHRMHHPRSSVMRLYIPRKCGGRGFLNAKALHNSEVCSLRNYFLKMEVGMHQDVVAVDKGLTALSLANENWRKPVVLSTKDRKDVWQSKELHGRYYRALHGPEVDFLASVSWLRFGNLFGETEGFVCAIMDEVMLTNNYRKYIIKDGTADICRACHRPGESIRHIISGCSHLANGEYLHRHNLVARIIHQQLALKYKLVESEVPYYKYLPDPVLENGDVTLYWVRTIITDRTIVANKPDIVMIDRSSRRTMIIDITIPHDENLVKAEKDKASKYLDLAHEIVDMWDVDSAIIVPIVVSANGLMAKSLDKHLSRLTLDGWVKNLMQKAVHLDTARIVRRFLSLEP

SEQ ID NO: 28123 - protein, 1197 aa, Spodoptera exigua
MLTRAKARAASQRTRPPSPTSPPSSAPPSSAPDPDTGIRPATAVVSSSSDEFFSPPTSPPPPRRRRKRRPPSSLGPRGPSASGGVPAPGGSVSRMKWTTSINENVMRAYFGATEGGNNLTAYRVRMLALFQVLEPSVNVSAQRLSDQVRVIQRNRMLEDVVLDRLRSEVLRSRVIILPSQTTEEIQPNSTDVPNDDRTTEVSTHTCSDELRRTLEGAIQEYRHAYLKPRLPRLPMHKKNKAIMCALDSQLPTYLDNSKDLVDTHSILYCAAIAACRVANVKLPDNYNRATRPKPAVPAWQCRIERRIGEVRTLIAKLICFREGNTRPRIMRFVKRAFSGTAISPQNYASHITERVDFLKQKIYAWANRIRRYKRRAERYTQNRAFQRDQRWVYRNWEQKEQARTDTCLPDFSATKAFWRSIWSAPVDHTEGDWIEEVKGKCELIPQMNSIKISTEDVSNAAYPLANWKAPGPDGLHNFWIKWFMSSHSRLATQFQSALESGSLPQFFTTGLTHLLHKSGCTTEPKNYRPITCLPTIYKLLTSILRAKLNKHIEDNNIMSSSQNGCRNGSRGTKELLLIDISICQQVRRFHKNLSTCWIDYKKAYDSIPHTWLMRVLELYNVDPTLCTFLRSCMNQWKTVLRYPGCGQIFESDEPIKIERGIFQGDSLSPLWFCLALNPLSTLLEGSGLGYRLRRGGQIVSHLLYMDDLKLFAPNNSHLMRLLNLTEMFSNAIGMEFGVDKCAVMHVKRGEVVESDGTQISDSTNFRSLSPSDSYKYLGMSEALGIDTAVMKQTLRERFFGRLRKVLNSLLSGGNKVRAYNGWVMPVLMYSFGILKWTQTELDTLDRKVRSLLTEHRMHHPRSSVMRLYIPRKCGGRGFLNAKALHNSEVCSLRNYFLKMEVGMHQDVVAVDKGLTALSLANENWRKPVVLSTKDRKDVWQSKELHGRYYRALHGPEVDFLASVSWLRFGNLFGETEGFVCAIMDEVMLTNNYRKYIIKDGTADICRACHRPGESIRHIISGCSHLANGEYLHRHNLVARIIHQQLALKYKLVESEVPYYKYLPDPVLENGDVTLYWDRTIITDRTIVANKPDIVMIDRSSRRTMIIDITIPHDENLVKAEKDKASKYLDLAHEIVDMWDVDSAIIVPIVVSANGLMAKSLDKHLSRLTLDGWVKNLIQKAVLLDTARIVRRFLSLEP

SEQ ID NO: 28124 - protein, 1200 aa, Griposia aprilina
MLTRSATRRARPSPPDSSLSSASPPPVSSPTVSAVTTPAAVVASSSSDEYFSPPTSPTPVRRQGRGRPPKSLGLRGHPAPSRVPAAGGCVQRMKWTQSMNENVMRAYYRSTEGGTNLTAYRDRMLSLFQELEPTVNVSAQRLSDQVRVIQRSHRLDDAALDRLRSELSNHITSRPAQTAVQASTIDEIQPRSNHGVELEDDRVASVSSQCNARLRSALEDAFREYRSTPTEIRPRLPRLPMHKKNRALVCALDSHLKNVFESSENLVDTHSILYCAAVAACRLANVKFPNCDGATRQKPAVPAWQCRIERRIDEARVLIGKLYCFREGNTRPRVMRFVRRAFSGTEISPQEYMSRVTERIDFLKQKVCAWASLIRRYKRRGDRYTQNRMFQSDERWVYRAWERPEPNLTDKCHPDDAATITFWHNIWSVPVCHVEADWIRDVEQVCETVPEMEAVLITPLDVTKAVRPLPNRKSPGPDGLHNFWLKWLISSHTCLASQFQASLESGSLPQFLTTGVTHLLHKSGSSTDPTNYRPITCLSTIYKLLTSILRAKINTHIDNNSIMSASQNGCRNGSRGTKELLLIDMAISQQVRRSCKDLSTCWIDYKKAYDSVPHTWLMRVLELYKIDTTLRTFLGSCMRQWRTVLRYPGCQQIQGNDEPVWIKRGIFQGDSLSPLWFCLALNPLSTLLEDSGLGYRLRRGGQLISHLLYMDDLKLFAPNKLQLMKLLKVTETFSSAIRMEFGVDKCAVMHVKQGEIMESEGIQLSDSIHLRSLSSSESYKYLGMSETLGINVADMKQSLKERFFGRLSKVLISLLSGGNKVRAFNGWVMPVLMYSFGILKWTQTELDALDRRVRTLLTANRMHHPRSSVMRLYIPRKCGGRGFLNAKTLHNREVCSLREYFLKAEVGMHRDVVAVDKGLTPLSMAKENWRKPVVLTTDDRKEVWQSKELHGRFYRALHEPDFLASVSWLRFGDLFGETEGFVCAIMDEVILTNNYRRHIMKDGTVDVCRACHRPGESIRHIVSGCSRLANGEYLHRHNQVARIIHQQLALKYKLVDSEVPYYKYVPDPVLENDHITLYWDRSIITDRTVVANKPDIVVIDRLARRTMIIDITIPHDENLVKAEKEKQIKYLDLAHEVVDMWNVSSAVIVPIVVSANGLMAESLDQHLSRLSLGGWVKGLIQKAVLLDTARIVRRFLSLEP

SEQ ID NO: 28125 - protein, 1202 aa, Griposia aprilina
MLTRSATRRARPSPPDSSLSSASPPPVSSPTVSAVTTPAAVVASSSSDEYFSPPTSPTPVRRQGRGRPPKSLGLRGHPAPSRVPAAGGCVQRMKWTQSMNENVMRAYYRSTEGGTNLTAYRDRMLSLFQELEPTVNVSAQRLSDQVRVIQRSHRLEDAALDRLRSELSNHIASRPAQTAVQASTIDEIQPRSNHGVELEDDRVASVSSQCNARLRSALEDAFREYRSTPTEIRPRLPRLPMHKKNRALVCALDSHLKNVFESSENLVDTHSILYCAAVAACRLANVKFPNCDGATRQKPAAPAWQCRIERRIDEARVLIGKLYCFREGNTRPRVMRFVRRAFSGTEISPQEYMSRVTERIDFLKQKVCAWASRIRRYKRRVDRYTQNRMFQSDERWVYRAWERPEQNVTDECRPDDAATITFWRNIWSVPVCHVEADWIRDVEQVCETVPEMEAVLITPLDVTKAVRPLPNWKSPGPDGLHNFWLKWLISSHTCLASQFQASLESGSLPQFLTTGVTHLLHKSGSSTDPKNYRPITCLSTIYKLLTSILRAKINTHIDNNSIMSASQNGCRNGSRGTKELLLIHMAISQQVRRSCKDLSTCWIDYKKAYDSVPHTWLMRVLELYKIDTTLRTFLGSCMRQWRTVLRYPGCRQIQGNDEPVWIKRGIFQGDSLSPLWFCLALNPLSTLLEDSGLGYRLRRGGQLISHLLYMDDLKLFAPNKLQLMKLLKVTETFSSAIRMEFGVDKCAVMHVKQGEIMESEGIQLSDSIHLRSLSSSESYKYLGMSETLGINVADMKQSLKERFFGRLRKVLISLLSGGNKVRAFNGWVMPVLMYSFGVLKWTQTELDALDRRVRTLLTANRMHHPRSSVMRLYIPRKCGGRGFLNAKTLHNREVCSLREYFLKAEVGMHRDVVAVDKGLTPLSMAKENWRKPVVLTTDDRKEVWQSKELHGRFYRALHEPGVDFLASVSWLRFGDLFGETEGFVCAIMDEVILTNNYRRHIMKDGTVDVCRACHRPGESIRHIVSGCSRLANGEYLHRHNQVARIIHQQLALKYKLVDSEVPYYKYVPDPVLENDHITLYWDRSIITDRTIVANKPDIVVIDRLARRTMIIDITIPHDENLVKAEKEKQIKYLDLAHEVVDMWNVSSAVIVPIVVSANGLMAESLDQHLSRLSLGGWVKGLIQKAVLLDTARIVRKFLSLEP

SEQ ID NO: 28126 - protein, 1009 aa, Griposia aprilina
MKYSRGLIDEIQPRSNHGVDEIQPRSNHGVELEDDRVASVSSQCNARLRSALEDAFREYRSTPTEIRPRLPRLPMHKKNRALVCALDSHLKNVFESSENLVDTHSILYCAAVAACRLANVKFPNCDGATRQKPAVPAWQCRIERRIDEARVLIGKLYCFREGNTRPRVMRFVRRAFSGTEISPQEYMSRVTERIDFLKQKVCAWASRIRRYKRRVDRYTQNRMFQNDERWVYRAWERPEQNVTDECRPDDAATITFWRNIWSVPVCHVEADWIRDVEQVCETVPEMEAVLITPLDVTKAVRPLPNWKSPGPDGLHNFWLKWLISSHTCLASQFQASLESGSLPQFLTTGVTHLLHKSGSSTDPKNYRPITCLSTIYKLLTSILRAKINTHIDNNSIMSASQNGCRNGSRGTKELLLIDMAISQQVRRSCKDLSTCWIDYKKAYDSVPHTWLMRVLELYKIDTTLRTFLGSCMRQWRTVLRYPGCFLALNPLSTLLEDSGLGYRLRRGGQLISHLLYMDDLKLFAPNKLQLMKLLKVTETFSSAIRMEFGVDKCAVMHVKQGEIMESEGIQLSDSIHLRSLSSSESYKYLGMSETLGINVADMKQSLKERFFGRLRKVLISLLSGGNKVRAFNGWVMPVLMYSFGVLKWTQTELDALDRRVRTLLTANRMHHPRSSVMRLYIPRKCGGRGFLNAKTLHNREVCSLREYFLKAEVGMHRDVVAVDKGLTPLSMAKENWRKPVVLTTDDRKEVWQSKELHGRFYRALHEPGVDFLASVSWLRFGDLFGETEGFVCAIMDEVILTNNYRRHIMKDGTVDVCRACHRPGESIRHIVSGCSRLANGEYLHRHNQVARIIHQQLALKYKLVDSEVPYYKYVPDPVLENDHITLYWDRSIITDRTIVANKPDIVVIDRLARRTMIIDITIPHDENLVKAEKEKQIKYLDLAHEVVDMWNVSSAVIVPIVVSANGLMAESLDQHLSRLSLGGWVKGLIQKAVLLDTARIVRKFLSLEP

SEQ ID NO: 28127 - protein, 858 aa, Griposia aprilina
MRFLRRAFLGTEISPQEYMSRVTERIDFLKQKVCAWASRIRRYEYKRRVDRYTQNRMFQSDERWVYRAWERPEQNVTDECRPDDAATITFWRNIWSVPHCHVEADWIRDVEQVCETVPEMEAVLITPLDVTKAVRPLPNWKSPGPDGLHNFWLKWLISSHTCLASQFQASLESGSLPQFLTTGVTHLLHKSGSSTDPKNYRPITCLSTIYKLLTSILRAKINTHIDNNSIMSASQNGRRNGSRGTKELLLIDMAISQQVRRSCKDLSTCWIDYKKAYDSVPHTWLMRVLELYKIDPTLRTFLGSCMRQWRTVLRYPGCQQIQGNDERVWIKRGIFQGDSLSPLLEDSGLGYRLRRGGQLISHLLYMDDLKLFAPNKLQLMKLLKVTETFSSAIRMEFGVDKCAVMHVKQGEIMESEGIQLSDSIHLRSLSSSESYKYLGMSETLGINVADMKQSLKERFFGRLRKVLISLLSGGNKVRAFNGWVMPVLMYSFGILKWTQTELDALDRRVRTLLTANRMHHPRSSVMRLYIPRKCGGRGFLNAKTLHNREVCSLREYFLKAEVGMHRDVVAVDKGLTPLSMAKENWRKPVVLTTDDRKEVWQSKELHGRFYRALHEPGVDFLASVSWLRFGDLFGETEGFVCAIMDEVILTNNYRRHIMKDGTVGVCRACLSPGESIRHIVSGCSRLSNGEYLHRHNQVARIIHQQLALKYKLVDSEVPYYKYVPDPVLENDHITLYWDRSIITDRTIVANKPDIVVIDRLARRTMIIDITIPHDENLVKAEKEKQIKYLDLAHEVVDMWNVSSAVIVPIVVSANGLMAESLDQHLSRLSLGGWVKGLIQKAVLLDTARIVRRFLSLEP

SEQ ID NO: 28128 - protein, 1202 aa, Griposia aprilina
MLTRSATRRARPSPPDSSLSSASPPPVSSPTVSAVTTPAAVVASSSSDEFFSPPTSPTPVRRQGRGRPPKSLGLRGHPAPSRVPAAGGCVQRMKWTQSMNENVMRAYYRSTEGGTNLTAYRDRMLSLFQELEPTVNVSAQRLSDQVRVIQRSHRLEDAALDRLRSELSNHIASRPAQTAVQVSTIDEIQPRSNHGVELEYDRVASVSSQCNARLRSALEDAFREYRSTPTEIRPRLPRLPMHKKNRALVCALDSHLKNVFESSENLVDTHSILYCAAVAACRLANVKFPNCDGATRQKPAVPAWQCRIERRIDEARVLIGKLYCFREGNTRPRVMRFVRRAFSGTEISPQEYMSRVTERIDFLKQKVCAWASRIRRYKRRVDRYTQNRMFQSDERWVYRAWERPEQNVTDECRPDDAATITFWRNIWSVPVCHVEADWIRDVEQVCETVPEMEAVLITPLDVTKAVRPLPNWKSPGPDGLHNFWLKWLISSHTCLASQFQASLESGSLPQFLTTGVTHLLHKSGSSTDPKNYRPITCLSTIYKLLTSILRAKINTHIDNNSIMSASQNGCRNGSRGTKELLLIDMAISQQVRRSCKDLSTCWIDYKKAYDSVPHTWLMRVLELYKIDTTLRTFLGSCMRQWRTVLRYPGCRQIQGNDEPVWIKRGIFQGDSLSPLWFCLALNPLSTLLEDSGLGYRLRRGGQLISHLLYMDDLKLFAPNKLQLMKLLKVTETFSSAIRMEFGVDKCAVMHVKQGEIMESEGIQLSDSIHLRSLSSSESYKYLGMSETLGINVADMKQSLKERFFGRLRKVLISLLSGGNKVRAFNGWVMPVLMYSFGVLKWTQTELDALDRRVRTLLTANRMHHPRSSVMRLYIPRKCGGRGFLNAKTLHNREVCSLREYFLKAEVGMHRDVVAVDKGLTPLSMAKENWRKPVVLTTDDRKEVWQSKELHGRFYRALHEPGVDFLASVSWLRFGDLFGETEGFVCAIMDEVILTNNYRRHIMKDGTVDVCRACHRPGESIRHIVSGCSRLANGEYLHRHNQVARIIHQQLALKYKLVDSEVPYYKYVPDPVLENDHITLYWDRSIITDRTIVANKPDIVVIDRLARRTMIIDITIPHDENLVKAEKEKQIKYLDLAHEVVDMWNVSSAVIVPIVVSANGLMAESLDQHLSRLSLGGWVKGLIQKAVLLDTARIVRKFLSLEP

SEQ ID NO: 28129 - protein, 1202 aa, Griposia aprilina
MLTRSATRRARPSPPDSSLSSASPPPVSSPTVSAVTTPAAVVASSSSDEYFCPPTSPTPVRRQGRGRPPKSLGLRGHPAPSRVPAAGGCVQRMKWTQSMNENVMRAYYRSTEGGTNLTAYRDRMLSLFQELEPTVNVSAQRLSEQVRVIQRSHRLEDAALDRLRSELSNHIASRPAQTAVQASTIDEIQPRSNHGVELEDDRVASVSSQCNARLRSALEDAFREYRSTPTEIRPRLPRLPMHKKNRALVCALDSHLKNVFESSENLVDTHSILYCAAVAACRLANVKFPNCDGATRQKPAVPAWQCRIERRIDEARVLIGKLYCFREGNTRPRVMRFVRRAFSGTEISPQEYMSRVTERIDFLKQKVCAWASRIRRYKRRVDRYTQNRMFQSDERWVYRAWERPEQNVTDECRPDDAATITFWRNIWSVPVCHVEADWIRDVEQVCETVPEMEAVLITPLDVTKAVRPLPNWKSPGPDGLHNFWLKWLISSHTCLASQFQASLESGSLPQFLTTGVTHLLHKSGSSTDPKNYRPITCLSTIYKLLTSILRAKINTHIDNNSIMSASQNGCRNGSRGTKELLLIDMAISQQVRRSCKDLSTCWIDYKKAYDSVPHTWLMRVLELYKIDTTLRTFLGSCMRQWRTVLRYPGCRQIQGNDEPVWIKRGIFQGDSLSPLWFCLALNPLSTLLEDSGLGYRLRRGGQLISHLLYMDDLKLFAPNKLQLMKLLKVTETFSSAIRMEFGVDKCAVMHVKQGEIMESEGIQLSDSIHLRSLSSSESYKYLGMSETLGINVADMKQSLKERLFGRLRKVLISLLSGGNKVRAFNGWVMPVLMYSFGVLKWTQTELDALDRRVRTLLTANRMHHPRSSVMRLYIPRKCGGRGFLNAKTLHNREVCSLREYFLKAEVGMHRDVVAVDKGLTPLSMAKENWRKPVVLTTDDRKEVWQSKELHGRFYRALHEPGVDFLASVSWLRFGDLFGETEGFVCAIMDEVILTNNYRRHIMKDGTVDVCRACHRPGESIRHIVSGCSRLANGEYLHRHNQVARIIHQQLALKYKLVDSEVPYYKYVPDPVLENDHITLYWDRSIITDRTIVANKPDIVVIDRLARRTMIIDITIPHDENLVKAEKEKQIKYLDLAHEVVDMWNVSSAVIVPIVVSANGLMAESLDQHLSRLSLGGWVKGLIQKAVLLDTARIVRKFLSLEP

SEQ ID NO: 28130 - protein, 1202 aa, Griposia aprilina
MLTRSATRRARPSPPDSSLSSASPPPVSSPTVSAVTTPAAVVASSSSDEYFSPPTSPTPVRRQGRGRSPKSLGLRGHPAPSWVPAAGGCVQRMKWTQSMNENVMRAYYRSTEGGTNLTAYRDRMLSLFQELEPTVNVSAQRLSDQVRVIQRSHRLDDAALDRLRSELSNHIASRPAQTAVQASTIDEIQPRSNHGVELEDDRVASVSSQCNARLRSALEDAFREYRSTPTEIRPRLPRLPMHKKNRALVCALDSHLKNVFESSENLVDTHSILYCAAVAACRLANVKFPNCDGATRQKPAVPAWQCRIERRIDEARVLIGKLYCFREGNTRPRVMRFVRRAFSGTEISPQEYMSRVTERIDFLKQKVCAWASRIRRYKRRVDRYTQNRMFQSDERWVYRAWERPEQNVTDECRPDDAATITFWRNIWSVPVCHVEADWIRDVEQVCETVPEMEAVLITPLDVTKAVRPLPNWKSPGPYGLHNFWLKWLISSHTCLASQFQASLESGSLPQFLTTGVTHLLHKSGSSTDPKNYRPITCLSTIYKLLTSILRAKINTHIDNNSIMSASQNGCRNGSRGTKELLLIDMAISQQVRRSCKDLSTCWIDYKKAYDSVPHTWLMRVLELYKIDTTLRTFLGSCMRQWRTVLRYPGCRQIQGNDEPVWIKRGIFQGDSLSPLWFCLALNPLSTLLEDSGLGYRLRRGGQLISHLLYMDDLKLFAPNKLQLMKLLKVTETFSSAIRMEFGVDKCAVMHVKQGEIMESEGIQLSDSIHLRSLSSSESYKYLGMSETLGINVADMKQSLKERFFGRLRKVLISLLSGGNKVRAFNGWVMPVLMYSFGVLKWTQTELDALDRRVPTLLTANRMHHPRSSVMRLYIPRKCGGRGFLNAKTLHNREVCSLREYFLKAEVGMHRDVVAVDKGLTPLSMAKENWRKPVVLTTDDRKEVWQSKELHGRFYRALHEPGVDFLASVSWLRFGDLFGETEGFVCAIMDEVILTNNYRRHIMKDGTVDVCRACHRPGESIRHIVSGCSRLANGEYLHRHNQVARIIHQQLALKYKLVDSEVPYYKYVPDPVLEKDHITLYWDRSIITDRTIVANKPDIVVIDRLARRTMIIDITIPHDENLVKAEKEKQIKYLDLAHEVVDMWNVSSAVIVPIVVSANGLMAESLDQHLSRLSLGGWVKGLIQKAVLLDTARIVRKFLSLEP

SEQ ID NO: 28131 - protein, 1202 aa, Griposia aprilina
MLTRSATRRARPPPPDSSLSSASPPPVSSPTVSAVTTPAAVVASSSSDEYFSPPTSPTPVRRQGRGRPPKSLGLRGHPAPSRVPAAGGCVQRMKWTQSMNENVMRAYYRSTEGGTNLTAYRDRMLSLFQELEPTVNVSAQRLSDQVRVIQRSHRLEDAALDRLRSELSNHIASRPVQTAVQASTIDEIQPRSNHGVELEDDRVASVSSQCNARLRSALEDAFREYRSTPTEIRPRLPRLPMHKKNRALVCALDSHLKNVFESSENLVDTHSILYCAAVAACRLANVKFPNCDGATRQKPAVPAWQCRIERRIDEARVLIGKLYCFREGNTRPRVMRFVRRAFSGTEISPQEYMSRVTERIDFLKQKVCAWASRIRRYKRRVDRYTQNRMFQSDERWVYRAWERPEQNVTDECRPDDAATITFWRNIWSVPVCHVEADWIRDVEQVCETVPEMEAVLITPLDVTKAVRPLPNWKSPGPDGLHNFWLKWLISSHTCLASQFQASLESGSLPQFLTTGVTHLLHKSGSSTDPKNYRPITCLSTIYKLLTSILRAKINTHIDNNSIMSASQNGCRNGSRGTKELLLIDMAISQQVRRSCKDLSTCWIDYKKAYDSVPHTWLMRVLELYKIDTTLRTFLGSCMRQWRTVLRYPGCRQIQGNDEPVWIKRGIFQGDSLSPLWFCLALNPLSTLLEDSGLGYRLMRGGQLISHLLYMDDLKLFAPNKLQLMKLLKVTETFSSAIRMEFGVDKCAVMHVKQGEIMESEGIQLSDSIHLRSLSSSESYKYLGMSETLGINVADMKQSLKERFFGRLRKVLISLLSGGNKVRAFNGWVMPVLMYSFGVLKWTQTELDALDRRVRTLLTANRMHHPRSSVMRLYIPRKCGGRGFLNAKTLHNREVCSLREYFLKAEVGMHRDVVAVDKGLTPLSMAKENWRKPVVLTTDDRKEVWQSKELHGRFYRALHEPGVDFLASVSWLRFGDLFGETEGFVCAIMDEVILTNNYRRHIMKDGTVDVCRACHRPGESIRHIVSGCSRLANGEYLHRHNQVARIIHQQLALKYKLVDPEVPYYKYVPDPVLENDHITLYWDRSIITDRTIVANKPDIVVIDRLARRTMIIDITIPHDKNLVKAEKEKQIKYLDLAHEVVDMWNVSSAVIVPIVVSANGLMAESLDQHLSRLSLGGWVKGLIQKAVLLDTARIVRKFLSLEP

SEQ ID NO: 28132 - protein, 1079 aa, Griposia aprilina
MLSLFQELEPTVNVSAQRLSDQVRVIQRSHRLEDAALDRLRSELSNHIASRPAQTAVQASTIDEIKPRSNHGVELEDDRVASVSSQCNARLRSALEDAFREYRSTPTEIRPRLPRLPMHKKNRALVCALDSHLKNVFESSENLVDTHSILYCAAVAACRLANVKFPNCDGATRQKPAVPAWQCRIERRIDEARVLIGKLYCFREGNTRPRVMRFVRRAFSGTEISPQEYMSRVTERIDFLKQKVCAWASRIRRYKRRVDRYTQNRMFQSDERWVYRAWERPEQNVTDECRPDDAATITFWRNIWSVPVCHVEADWIRDVEQVCETVPEMEAVLITPLDVTKAVRPLPNWKSPGPDGLHNFWLKWLISSHTCLASQFQASLESGSLPQFLTTGVTHLLHKSGSSTDPKNYRPITCLSTIYKLLTSILRAKINTHIDNNSIMSASQNGCRNGSRGTKELLLIDMAISQQVRRSCKDLSTCWIDYKKAYDSVPHTWLMRVLELYKIDTTLRTFLGSCMRQWRTVLRYPGCRQIQGNDEPVWIKRGIFQGDSLSPLWFCLALNPLSTLLEDSGLGYRLRRGGQLISHLLYMDDLKLFAPNILQLMKLLKVTETFSSAIRMEFGVDKCAVMHVKQGEIMESEGIQLSDSIHLRSLSSSESYKYLGMSETLGINVADMKQSLKERFFGRLRKVLISLLSGGNKVRAFNGWVMPVLMYSFGVLKWTQTELDALDRRVRTLLTANRMHHPRSSVMRLYIPRKCGGRGFLNAKTLHNREVCSLREYFLKAEVGMHRDVVAVDKGLTPLSMAKENWRKPVVLTTDDRKEVWQSKELHGRFYRALHEPGVDFLASVSWLRFGDLFGETEGFVCAIMDEVILTNNYRRHIMKDGTVDVCRACHRPGESIRHIVSGCSRLANGEYLHRHNQVARIIHQQLALKYKLVDSEVPYYKYVPDPVLENDHITLYWDRSIITDRTIVANKPDIVVIDRLARRTMIIDITIPHDENLVKAEKEKQIKYLDLAHEVVDMWNVSSAVIVPIVVSANGLMAESLDQHLSRLSLGGWVKGLIQKAVLLDTARIVRKFLSLEP

SEQ ID NO: 28133 - protein, 983 aa, Griposia aprilina
MHSVSTDPLRPKLDLDYHACLCTKKNRALVCALDSHLKNVFESSENLVDTHSILYCAAVAACRLANLKFPNCDGATRQKPAVPAWQCRIERRIDEARVLIGKLYCFREGNTRPRVMRFVRRAFSGTEISPQEYMSRVTERIDFLKQKVCAWASRIRRYKRRVDRYTQNRMFQSDERWVYRAWERPEQNVTDECRPDDSATITFWRNIWSVPVFHVEADWIRDVEQVCETVPEMEAVLITPLDVTKAVRPLPNWKSPGPDGLHNFWLKWLISSHTCLASQFQASLESGSLSQFLTTGVTHLLHKSGSSTDPKNYRPITCLSTIYKLLTSILRAKINTHIDNNSIMSASQNGCRNGSRGTKELLLIDMAISQQVRRSCKDLSTCWIDYKKAYDSVPHTWLMRVLELYKIDTTLRTFLGSCMRQWRTVLRYPGCQQIQGNDEPVWIKRGIFQGDSLSPLWFCLALNPLSTLLEDSGLGYRLRRGGQLISHFLYMDDLKLFAPNKLQLMKLLKVTETFSSAIRMEFGVDKCAVMHVKQGEIMESEGIQLSDSIHLRSRSSSESYKYLGMSETLGINVADMKQSLKERFFGRLRKVLISLLSGGNKVRAFNGWVMPVLMYSFGILKWTQTELDALDRRVRTLLTANRMHHPRSSVMRLYIPRKCGGRGFLNAKTLHNREVCSLREYFLKAEVGMHRDVVAVDKGLTPLSMAKENWRKPVVLTTDDRKEVWQSKELHGRFYRALHEPGVDFLASVSWLRFGDLFGETEGFVCAIMDEVILTNNYRRHIMKERTVDVCRACHRPGESIRHIVSGCSRLANGEYLHRHNQVARIIHQQLALKYKLVDSEVPYYKYVPDPVLKNDHITLYWGRSIITDRTIVANKPDIVVIDRLARRTMIIDITIPHDENLVKAEKEKQIKYLDLAHEVVDMWNVSSAVIVPIVVSANGLMAESLDQHLSRLSLGGWVKGLIQKAVLLDTARIVRRFLSLEL

SEQ ID NO: 28134 - protein, 1200 aa, Sesamia nonagrioides
MLTRSAARRARSPPPDSSPSSASPPPVSSLTVNAVMTPAAAVALSSSDEYFSPPTTPPPVRRRGGRRPPDCLGPRGPPASDRAPATGGNVQRMKWTQSINENVMRAYFGATEGGSNLTAYRGRMLSLFQVLEPAVNVSAQRLSDQVRVIQRNHMLDDVVLDRLRLESRNSHVTPASSLVAVQVNSVPSRPNLVDEEDDDEAISVTPQCNEKVRSALEDAFREYRSTPPELRPRLPRLPMHKKNKALVCALDSQLSNYLKDSKDLADTHSILYCGAVAICRVAHVKFPDSDRATRPKPAVPAWQCRIERRIGETRALIGKLISFREGNTRPRVMRFVRRAFSGTDVGTRDYLLRVTERIDFLKQKIYAWANRIRRYRRRVERYSQNRNFQSDERWVYRAWERSDQGVTDTCLPDDDATRSFWRNIWSVPVSHTEGGWTRDVERACDPVPEMGAITICPQDVARAVRPLPNWKSPGSDGLHNFWIKWFSGSHACLASQFQTALESGSLPQFLTTGITHLLHKSGSTAEPKNYRPITCLPTVYKVLTSILKAKINRHIDSNSIMSASQNGCRNGSRGTKELLLIDMAISQQVRRSRKDLSTCWIDYKKAYDSVPHTWLMRVLELYKVDATLRTFLMTCMSQWRTVLRYPGCRNIQRNSEPIRIERGIFQGDSLSPLWFCLALNPLSTLLEDSGLGYRLRRGGQLISHLLYMDDLKLFAHTNSQLKELLKITETFSSAIRMEFGVDKCAVMHVQRGEIVESVGTQLTGSINLRSLSASETYKYLGMSEALGINVTDMKQSLKERFFGRLKKVLNSLLSGGNKVRAFNGWVMPVLMYSFGILKWTQTELDALDQRVRTLLTANRLHHPRSSVMRLYIPRKCGGRGFLNAKTLHNREVCSLREYFLKTDVGMHRDVVAVDKGLTPLSLAKENWRKPVVLETNDRMEVWQSKELHGRFFRALRGPDVDFQASVAWLRYGDLFGETEGFVCAIMDEVMMTNNYRKFIVKDGTVDICRACHRPGESIRHIISGCSRLANGEYLHRHNLVARIIHQQLALKYNLVESEVPYYRYMPDPVLENGHITLYWDRSIITDRTIVANKPDIVMVDRSERRAMIVDITIPHDENLVKAEKDKQIKYLDLAHEVVDMWEVDSAIIVPIVVTANGLIAKSLDQHLRRLSLGGWIKGLIQKAVLLDTARIVRKFLSLEP

SEQ ID NO: 28135 - protein, 1202 aa, Griposia aprilina
MLTRSATRRARPSPPDSSLSSASPPPVSSPTVSAVITPAAVVASSSSDEYFSPLTSPTPVRRQGRGRPPKSLGRRGHPAPSRVPAAGGCVQRMKWTQSMNENVMRAYYRSIEGGTNLTAYRDRMLSLFQELESTVNVSAQRLSDQVRVIQRSHRLDDAALVWLRSELSNHIVTRPAQTAVQASTIDEIQPRSNHGVELEDDRVASVSSQCNAQLRSALEDAFREYRSTPTEIRLRLPRLPMHKKNRALDCALDSHLKNVFESSENLVDTHSILYCAAVAACRLANVKFPNCDGATRQKPAVPAWQCRIERRIDEARVLIGKLYCFREGNTRPRVMRFVRRAFSGTEISPQEYMSRVTERIDFLKQKVCAWASRIRRYKRRVDRYTQNRMFQSNERWVYRAWERPEQNVTDECRPDDAATITFWRNIWSVPVCHVEADWIRDVEQVCETVPEMEAVLITPLDVTKAVRPLPNWKSPGPDGLHNFWLKWLISSHTCLASQFQASLESGSLPQFLTTGVTHLLHKSGSSTDPKNYRPITCLSTIYKLLTSILRAKINTHIDNNSIMSASQNGYRNGSRGTKELLLIDMAISQQVRRSCKDLSTCWIDYKKAYDSVPHTWLMRVLELYKIDTTLRTFLGSCMRQWRTVLRYPGCQQIQGNDEPVWIKRGIFQGDSLSPLWFCLALNPLSTLLEDSGLGYRLRRGGQLISHLLYMDDLKLFAPNKLQLMKLLKVTETFSSAIRMEFGVDKCAVMHVKRGEIMESEGIQLSDSIHLRSLSSSESYKYLGMSETLGINVADMKQSLKERFFGRLRKVLISLLSGGNKVRAFNGWVMPVLMYSFGILKWTQTELDALDRRVRTLLTANRMHHPRSSVMRLYIPRKCGGRGFLNAKTLHNREVCSLREYFIKAEVGMHRDVVAVDKGLTPLSMAKENWRKPVVLTTDDRKEVWQSKELHGRFYRALHEPGVDFLASVSWLRFGDLFGETEGFVCAIMDEVILTNNYRRHIMKDGTVDVCRACHRPGESIRHIVSSCSSLANGEYLHRHNQVARIIHQQLALKYKLVDSEVPYYKYVPDPVLENDHITLYWDRSIITDRTIVANKPDIVVIDRLARRTMIIDITIPHDENLVKAEKEKQIKYLDLAHEVVDMWNVSSAVIVPIVVSANGLMAESLDQHLSRLSLGGWVKGLIQKAVLLDTARIVRRFLSLEP

SEQ ID NO: 28136 - protein, 1202 aa, Griposia aprilina
MLTRSATRRARPSPPDSSLSSASPPPVSSPTVSAVTTPAAVVASSSSDEYFSPPTSPTPVRRQGRGRPPKSLGLRGHPAPSRVPAAGGCVQRMKWTKSMNENVMRAYYRSTEGGTNLTAYRDRMLSLFQELEPTVNVSAQRLSDQVRVIQRSHRLEDAALDRLRSELSNHIASRPAQTAVQASTIDEIQPRSNHGVELEDDRVASVSSQCNARLRSALEDAFREYRSTPTEIRPRLPRLPMHKKNRALVCALDSHLKNVFESSENLVDTHSILYCAAVAACRLANVKFPNCDGATRQKPAVPAWQCRIERRIDEARVFIGKLYCFREGNTRPRVMRFVRRAFSGTEISPQEYMSRVTERIDFLKQKVCAWASRIRRYKRRVDRYTQNRMFQSDERWVYRAWERPEQNVTDECRPDDAATITFWRNIWSVPVCHVEADWIRDVEQVCETVPEMEAVLITPLDVTKAVRPLPNWKSPGPDGLHNFWLKWLISSHTCLASQFQASLESGSLPQFLTTGVTHLLHKSGSSTDPKNYRPITCLSTIYKLLTSILRAKINTHIDNNSIMSASQNGCRNGSRGTKELLLIDMAISQQVRRSCKDLSTCWIDYKKAYDSVPHTWLMRVLELYKIDTTLRTFLGSCMRQWRTVLRYPGCRQIQGNDEPVWIKRGIFQGDSLSPLWFCLALNPLGTLLEDSGLGYRLRRGGQLISHLLYMDNLKLFAPNKLQLMKLLKVTETFSSAIRMEFGVDKCAVMHVKQGEIMESEGIQLSDSIHLRSLSSSESYKYLGMSETLGINVADMKQSLKERFFGRLRKVLISLLSGGNKVRAFNGWVMPVLMYSFGVLKWTQTELDALDRRVRTLLTANRMHHPRSSVMRLYIPRKCGGRGFLNAKTLHNREVCSLREYFLKAEVGMHRDVVAVDKGLTPLSMAKENWRKPVVLTTDDRKEVWQSKELHGRFYRALHEPGVDFLASVSWLRFGDLFGETEGFVCAIMDEVILTNNYRRHIMKDGTVDVCRACHRPGESIRHIVSGCSRLANGEYLHRHNQVARIIHQQLALKYKLVDSEVPYYKYVPDPVLENDHITLYWDRSIITDRTIVANKPDIVVIDRLARRTMIIDITIPHDENLVKAEKEKQIKYLDLAHEVVDMWNVSSAVIVPIVVSANGLMTESLDQHLSRLSLGGWVKGLIQKAVLLDTARIVRKFLSLEP

SEQ ID NO: 28137 - protein, 894 aa, Griposia aprilina
MRRIDEARVLIGKLYCFREGNTRPRVMRFVRRAFSGTEISPQEYMSRVTERIDFLKQKVCAWASRIRRYKRRVDRYTQNRMFQSDERWVYRAWERPEQNVTDECRPDDAATITFWRNIWSVPVCHVEADWIRDVEQVCETVPEMEAVLITPLDVTKAVRPLPNWKSPGPDGLHNFWLKWLISSHTCLASQFQASLESGSLPQFLTTGVTHLLHKSGSSTDPKNYRPITCLSTIYKLLTSILRAKINTHIDNNSIMSASQNGRRNGSRGTKELLLIDMAISQQVRRSCKDLSTCWIDYKKAYDSVPHTWLMRVLELYKIDTTLRTFLGSCMRQWRTVLRYPGCRQIQGNDEPVWIKRGIFQGDSLSPLWFCLALNPLSTLLEDSGLGYRLRRGGQLISHLLYMDDLKLFAPNKLQLMKLLKVTETFSSAIRMEFGVDKCAVIHVKQGEIMESEGIQLSDSIHLRSLSSSESYKYLGMSETLGINVADMKQSLKERFFGRLRKVLISLLSGGNKVRAFNGWVMPVLMYSFGVLKWTQTELDALDRRVRTLLTANRMHHPRSSVMRLYIPRKCGGRGFLNAKTLHNREVCSLREYFLKAEVGMHRDVVAVDKGLTPLSMAKENWRKPVVLTTDDRKEVWQSKELHGRFYRALHEPGVDFLASVSWLRFGDLFGETEGFVCAIMDEVILTNNYRRHIMKDGTVDVCRACHRPGESIRHIVSGCSRLANGEYLHRHNQVARIIHQQLALKYKLVDSEVPYYKYVPDPVLENDHITLYWDRSIITDRTIVANKPDIVVIDRLARRTMIIDITIPHDENLVKAEKEKQIKYLDLAHEVVDMWNVSSAVIVPIVVSANGLMAESLDQHLSRLSLGGWVKGLIQKAVLLDTARIVRKFLSLEP

SEQ ID NO: 28138 - protein, 1202 aa, Griposia aprilina
MLTRSATRRARPSPPDSSLSSASPPPVSSPTVSAVITPAAVVASSSSDEYFSPPTSPTPVRRQGRGRPPKSLGLRGHPAPSRVPAAGGCVQRMKWTQSMNENVMRAYYRSTEGGTNLTAYRVRMLSLFQELEPTVNVSAQRLSDQVRVIQRSHRLDDAALDRLRSELSNHIVSRPAQTAVQASTIDEIQPRSNHGVELEDDRVASVSSQCNARLRSALEDAFREYRSTPTKIRHRLPRLPMHKKNRALVCALDSHLKNVFESSKNLVDTHSILYCAAVAACRLANVKFPNYDGATRQKPAVPAWQCRIERRIDEARVLIGKLYCFREGNTRPRVMRFVRRAFSGTEISPQEYMSRVTERIDFLKQKVCAWASRIRRYKRRVDRYTQNRMFQSDERWVYRAWERPEQNVTDECLPDDAATITFWRNIWSVPVCHVEADWIRDVEQVCETVPEMEVVLITPLDVTKAVRPLPNWKSLRPDGLHNFWLKWLISSHTCLASQFQASLESGSLPQFLTTGVTHLLHKSGSSTDPKNYRPITCLSTIYKLLTSILRAKINTHIDNNSIMSASQNGCRNGSRGTKELLLIDMAISQQVRRSCKDLSTCWIDYKKAYDSVPHTWLMRVLELYKIDTTLRTFLGSCMRQWRTVLRYPGCQQIQGNDEPVWIKRGIFQGDSLSPLWFCLALNLLSTLLEDSGLGYRLRRGGQLISHLLYMDDLKLFAPNKLQLMKLLKVTETFSSAIRMEFGVDKCAVMHVKQGEIMESEGIQLSDSIHLRSLSSSESYKYLGMSETLGINVADMKQSLKERFFGRLRKVLISLLSGGNKVRAFNGWVMPVLMYSFGILKWTQTELDALDRRVRTLLTANRMHHPRSSVMRLYIPRKCGGRGFLNAKTLHNREVCSLREYFLKAEVGMHRDVVAVDKGLTPLSMAKENWRKPVVLTTDDRKEVWQSKELHGRFYRALHEPGVDFLASVSWLRFGDLFGETEGFVCAIMDEVILTFDYRRHIMKDGTVDVCRACHRPGESIRHIVSGCFRLANGEYLHRHNQVARIIHQQLALKYKLVDSEVPYYKYVPDPVLENDHITLYWDRSIITDRTIVANKPDIVVIDRLARRTMIIDITIPHDENLVKAEKEKQIKYLDLAHEVVDMWNVSSAVIVPIVVSANGLMAESLDQHLSRLSLGGWVKGLIQKAVLLDTARIVRRFLSLEP

SEQ ID NO: 28139 - protein, 1202 aa, Griposia aprilina
MLTRSATRRARPSPPDSSLSSASPPPVSSPTVSAVTTPAAVVASSSSDEYFSPPTSPTPVRRQGRGRPPKSLGLRGHPAPSRVPAAGGCVQRMKWTQSMNENVMRAYYRSTEGGTNLTAYRDRMLSLFQELEPTVNVSAQRLSDQVRVIQRSHRLDDAALDRLRSELSNHIASRPAQTAVQASTIDEIQPRSNHGVELEDDRVASVSSQCNARLRSALEDAFREYRSTPTEIRPRLPRLPMHKKNRALVCALDSHLKNVFESSENLVDTHSILYCAAVAACRLANVKFPNCDGATRQKPAVPAWQCRIERRIDEARVLIGKLYCFREGNTRPRVMRFVRRAFSGTEISPQEYMSRVTERIDFLKQKVCAWASRIRRYKRRVDRYTQNRMFQSDERWVYRAWERPEQNVTDECRPDDAATITFWRNIWSVPVCHVEADWIRDVEQVCETVPKTEAVLITPLDVTKAVRPLPNWKSPGPDGLHNFWLKWLISSHTCLASQFQASLESGSLPQFLTTGVTHLLHKSGSSTDPKNYRPITCLSTIYKLLTSILRAKINTHIDNNSIMSASQNGCRNGSRGTKELLFIDMAISQQVRRSCKDLSTCWIDYKKAYDSVPHTWLMRVLELYKIDTTLRTFLGSCMRQWRTVLRYPGCQQIQGNDEPVWIKRGIFQGDSLSPLWFCLALNPLSTLLEDSGLGYRLRRGGQLISHLLYMDDLKLFAPNKLQLMKLLKVTETFSSAIRMEFGVDKCVVMHVKQGEIMESEGIQLSDSIHLRSLSSSESYKYLGMSETLGINVADMKQSLKERFFGRLRKVLISLLSGGNKVRAFNGWVMPVLMYSFGVLKWSQTELDALDRRVRTLLTANRMHHPRSSVMRLYIPRKCGGRGFLNAKTLHNREVCSLREYFLKAEVGMHRDVVAVDKGLTPLSMAKENWRKPVVLTTDDRKEVWQSKELHGRFYRALHEPGVDFLASVSWLRFGDLFGETEGFVCAIMDEVILTNNYRRHIMKDGTVDVCRACHRPGESIRHIVSGCSRLANGEYLHRHNQVARIIHQQLALKYKLVDSEVPYYKYVPDPVLENDHITLYWDRSIITDRTIVANKPDIVVIDRLARRTMIIDITIPHDENLVKAEKEKQIKYLDLAHEVVDMWNVSSAVIVPIVVSANGLMAESLDQHLSRLSLGGWVKGLIQKAVLLDTARIVRKFLSLEP

SEQ ID NO: 28140 - protein, 1202 aa, Griposia aprilina
MLTRSATRRARPSPPDSSLSSASPPPVSSPTVSAVTTPAAVVASSSSDEYFSPPTSPTPVRRQGRGRPPKSLGLRGHPAPSRVPAAGGCVQRMKWTQSMNENVMRAYYRSTEGGTNLTAYRDRMLSLFQELEPTVNVSAQRLSDQVRVIQRSHRLEDAALDRLRSELSNHIASRPAQTAVQASTIDEIQPRSNHGVELEDDRVASVSSQCNARLRSALEDAFREYRSTPTEIRPRLPRLPMHKKNRALVCALDSHLKNVFESSENLVDTHSILYCAAVAACRLANVKFPNCDGATRQKPAVPAWQCRIERRIDEARVLIGKLYCFREGNTRPRVMRFVRRAFSGTEISPQEYMSRVTERIDFLKQKVCAWASRIRRYKRRVDRYTQNRMFQSDERWVYRAWERPVQNVTDECRPDDAATITFWRNIWSVPVCHVEADWIRDVEQVCETVPEMEAVLITPLDVTKAVRPLPNWKSPGPDGLHNFWLKWLISSHTCLASQFQASLESGSLPQFLTTGVTHLLHKSGSSTDPKNYRPITCLSTIYKLLTSILRAKINTHIDNNSIMSASQNGCRNGSRGTKELLLIDMAISQQVRRSCKDLSTCWIDYKKAYDSVPHTWLMRVLELYKIDTTLRTFLGSCMRQWRTVLRYPGCRQIQGNDEPVWIKRGIFQGDSLSPLWFCLALNPLSTLLEDSGLGYRLRRGGQLISHLLYMDDLKLFAPNKLQLMKLLKVTETFSSAIRMEFGVDKCAVMHVKQGEIMESEGIQLSDSIHLRSLSSSESYKYLGMSETLGINVADMKQSLKERFFGRLRKVLISLLSGGNKVRAFNGWVMPVLMYSFGVLKWTQTELDALDRRVRTLLTANRMHHPRSSVMRLYIPRKCGGRGFLNAKTLHNREVCSLREYFLKAEVGMHRDVVAVDKGLTPLSMAKENWRKPVVLTTDDRKEVWQSKELHGRFYRALHEPGVDFLASVSWLRFGDLFGETEGFVCAIMDEVILTNNYRRHIMKDGTVDVCRACHRPGESIRHIVSGCSRLANGEYLHRHNQVARIIHQQLALKYKLVDSEVPYYKYVPDPVLENDHITLYWDRSIITDRTIVANKPDIVVIDRLARRTMIIDITIPHDENLVKAEKEKQIKYLDLAHEVVDMWNVSSAVIVPIVVSANGLMAESLDQHLSRLSLGGWVKGLIQKAVLLDTARIVRKFLSLEP

SEQ ID NO: 28141 - protein, 1202 aa, Griposia aprilina
MLTRSATRRARPSPPDSSLSSASPPPVSSPTVSAVTTPAAVVASSSSDEYFSPPTSPTPVRRQGRGRPPKSLGLRGHPAPSRVPAAGGCVQRMKWTQSMNENVMRAYYRSTEGGTNLTAYRDRMLSLFQELEPTVNVSAQRLSDQVRVIQRSHRLEDAALDRLRSELSNHIASRPAQTAVQASTIDEIQPRSNHGVELEDDRVASVSSQCNARLRSALKDAFREYRSTPTEIRPRLPRLPMHKKNRALVCALDSHLKNVFESSENLVDTHSILYCAAVAACRLANVKFPNCDGATRQKPAVPAWQCRIERRIDEARVLIGKLYCFREGNTRPRVMRFVRRAFSGTEISPQEYMSRVTERIDFLKQKVCAWASRIRRYKRRVDRYTQNRMFQSDERWVYRAWERPEQNVTDECRPDDAATITFWRNIWSVPVCHVEADWIRDVEQVCETVPEMEAVLITPLDVTKAVRPLPNWKSPGPDGLHNFWLKWLISSHTCLASQFQASLESGSLPQFLTTGVTHLLHKSGSSTDPKNYRPITCLSTIYKLLTSILRAKINTHIDNNSIMSASQNGCRNGSRGTKELLLIDMAISQQVRRSCKDLSTCWIDYKKAYDSVPHTWLMRVLELYKIDTTLRTFLGSCMRQWRTVLRYPGCRQIQGNDEPVWIKRGIFQGDSLSPLWFCLALNPLSTLLEDSGLGYRLRRGGQLISHLLYMDDLKLFAPNKLQLMKLLKVTETFSSAIRMEFGVDKCAVMHVKQGEIMESEGIQLSDSIHLRSLSSSESYKYLGMSETLGINVADMKQSLKERFFGRLRKVLISLLSGGNKVRAFNGWVMPVLMYSFGVLKWTQTELDALDRRVRTLLTANRMHHPRLSVMRLYIPRKCGGRGFLNAKTLHNREVCSLREYFLKAEVGMHRDVVAVDKGLTPLSMAKENWRKPVVLTTDDRKEVWQSKELHGRFYRALHEPGVDFLASVSWLRFGDLFGETEGFVCAIMDEVILTNNYRRHIMKDGTVDVCRACHRPGESIRHIVSGCSRLANGEYLHRHNQVARIIHQQLALKYKLVDSEVPYYKYVPDPVLENDHITLYWDRSIITDRTIVANKPDIVVIDRLARRTMIIDITIPHDENLVKAEKEKQIKYLDLAHEVVDMWNVSSAVIVPIVVSANGLMAESLDQHLSRLSLGGWVKGLIQKAVLLDTARIVRKFLSLEP

SEQ ID NO: 28142 - protein, 1120 aa, Griposia aprilina
MLTRSATRRARPSPPDSSLSSASPPPVSSPTVSAVTTPAAVVASSSSDEYFSPPTSPTPVRRQGRGRPPKSLGLRGHPAPSRVPAAGGCVQRMKWTQSMNENVMRAYYRSTEGGTNLTAYRDRMLSLFQELEPTVNVSAQRLSDQVRVIQRSHRLEDAALDRLRSELSNHIASRPAQTAVQASTIDEIQPRSNHGVELEDDRVASVSSQCNARLRSALEDAFREYRSTPTEIRPRLPRLPMHKKNRALVCALDSHLKNVFESSENLVDTHSILYCAAVAACRLANVKFPNCDGATRQKPAVPAWQCRIERRIDEARVLIGKLYCFREGNTRPRVMRFVRRAFSGTEISPQEYMSRVTERIDFLKQKVCAWASRIRRYKRRVDRYTQNRMFESDERWVYRAWERPEQNVTDECRPDDAATITFWRNIWSVPVCHVEADWIRDVEQVCETVPEMEAVLITPLDVTKAVRPLPYWKSPGPDGLHNFWLKWLISSHTCLASQFQASLESGSLPQFLTTGVTHLLHKSGSSTDPKNYRPITCLSTIYKLLTSILRAKINTHIDNNSIMSASQNGCRNGSRGTKELLLIDMAINQQVRRSCKDLSTCWIDYKKAYDSVPHTWLMRVLELYKIDTTLRTFLGSCMRQWRTVLRYPGCRQIQGNDEPVWIKRGIFQGDSLSPLWFCLALNPLSTLLEDSGLGYRLRRGGQLISHLLYMDDLKLFAPNKLQLMKLLKVTETFSSAIRMEFGVDKCAVMHVKKGEIMESEGIQLSDSIHLRSLSSSESYKYLGMSETLGINVADMKQSLKERFFGRLRKVLISLLSGGNKVRAFNGWVMPVLMYSFGVLKWTQTELDALDRRVCTLLTANRMHHPRSSVMRLYIPRKCGGRGFLNAKTLHNREVCSLREYFLKAEVGMHRDVVAVDKGLTPLSMAKENWRKPVVLTTDDRKEVWQSKELHGRFYRALHEPGVDFLASVSWLRFGDLFGETEGFVCAIMDEVILTNNYRRHIMKDGTVDVCRACHRPGESIRHIVSGCSRLANGEYLHRHNQVARIIHQQLALKYKLVDSEVPYYKYVPDPVLENDHFFFFFFFFFFFFFFFFFWQEWEILMDAQTDSLVNQSGQCRTLTG

SEQ ID NO: 28143 - protein, 1202 aa, Griposia aprilina
MLTRSATRRARPSPPDSSLSSASPPPVSSSTVSAVTTPAAVVASSSSDEYFSPPTSPTPVRRQGRGRPPKSLGLRGHPAPSRVPAAGGCVQRMKWTQSMNANVMRAYYRSTEGGTNLTAYRDRMLSLFQELEPTVNVSAQRLSDQVRVIQRSHRLEDAALDRLRSELSNHIASRPAQTAVQASTIDEIQPRSNHGVELEDDRVASVSSQCNARLRSALEDAFREYRSTPTEIRPRLPRLPMHKKNRALVCALDSHLKNVFESSENLVDTHSILYCAAVAACRLANVKFPNCDGATRQKPAVPAWQCRIERRIDEARVLIGKLYCFREGNTRPRVMRFVRRAFSGTEISPQEYMSRVTERIDFLKQKVCAWASRIRRYKRRVDRYTQNRMFQSDERWVYRAWERPEQNVTDECRPDDAATITFWRNIWSVPVCHVEADWIRDVEQVCETVPEMEAVLITPLDVTKAVRPLPNWKSPGPDGLHNFWLKWLISSHTCLAFQFQASLESGSLPQFLTTGVTHLLHKSGSSTDPKNYRPITCLSTIYKLLTSILRAKINTHIDNNSIMSAFQNGCRNGSRGTKELLLIDMAISQQVRRSCKDLSTCWIDYKKAYDSVPHTWLMRVLELYKIDTTLRTFLGSCMRQWRTVLRYPGCRQIQGNDEPVWIKRGIFQGDSLSPLWFCLALNPLSTLLEDSGLGYRLRRGGQLISHLLYMDDLKLFAPNKLQLMKLLKVTETFSSAIRMEFGVDKCAVMHVKQGEIMESEGIQLSDSIHLRSLSSSESYKYLGMSETLGINVADMKQSLKERFFGRLRKVLISLLSGGNKVRAFNGWVMPVLMYCFGVLKWTQTELDALDRRVRTLLTANRMHHPRSSVMRLYIPRKCGGRGFLNAKTLHNREVCSLREYFLKAEVGMHRDVVAVDMGLTPLSMAKENWRKPVVLTTDDRKEVWQSKELHGRFYRALHEPGVDFLASVSWLRFGDLFGETEGFVCAIMDEVILTNNYRRHIMKDGTVDVCRACHRPGESIRHIVSGCSRLANGEYLHRHNQVARIIHQQLALKYKLVDSEVPYYKYVPDPVLENDHITLYWDRSIITDRTIVANKPDIVVIDRLARRTMIIDITIPHDENLVKAEKEKQIKYLNLAHEVVDMWNVSSAVIVPIVVSANGLMAESLDQHLSRLSLGGWVKGLIQKAVLLDTARIVRKFLSLEP

SEQ ID NO: 28144 - protein, 982 aa, Griposia aprilina
MHSVSTDPLRPKLDPDYHACLCKKNRALVCALDSHLKNVFESSENLVDTHSILYCAAVAACRLANVKFPNCDGATRQKPAVPAWQCRIERRIDEARVLIGKLYCFREGNTRPRVMRFVRRAFSGTEISPQEYMSRVTERIDFLKQKVCAWASRIRRYKRRVDRYTQNRMFESDERWVYRAWERPEQNVTDECRPDDAATITFWRNIWSVPVCHVEADWIRDVEQVCETVPEMEAVLITPLDVTKAVRPLPNWKSPGPDGLHNFWLKWLISSHTCLASQFQASLESGSLPQFLTTGVTHLLHKSGSSTDPKNYRPITCLSTIYKLLTSILRAKINTHIDNNSIMSASQNGCRNGSRGTKELLLIDMAISQQVRRSCKDLSTCWIDYKKAYDSVPHTWLMRVLELYKIDTTLRTFLGSCMRQWRTVLRYPGCRQIQGNDEPVWIKRGIFQGDSLSPLWFCLALNPLSTLLEDSGLGYRLRRGGQLISHLLYMDDLKLFAPNKLQLMKLLKVTETFSSAIRMEFGVDKCAVMHVKKGEIMESEGIQLSDSIHLRSLSSSESYKYLGMSETLGINVADMKQSLKERFFGRLRKVLISLLSGGNKVRAFNGWVMPVLMYSFGVLKWTQTELDALDRRVRTLLTANRMHHPRSSVMRLYIPRKCGGRGFLNAKTLHNREVCSLREYFLKAEVGMHRDVVAVDKDLTPLSMAKENWRKPVVLTTDDRKEVWQSKELHGRFYRALHEPGVDFLASVSWLRFGDLFGETEGFVCAIMDEVILTNNYRRHIMKDGTVDVCRACHRPGESIRHIVSGCSRLANGEYLHRHNQVARIIHQQLALKYKLVDSEVPYYKYVPDPVLENDHITLYWDRSIITDRTIVANKPDIVVIDRLARRTMIIDITIPHDENLVKAEKEKQIKYLDLAHEVVDMWNVSSAVIVPIVVSANGLMAESLDQHLSRISLGGWVKGLIQKAVLLDTARIVRKFLSLEP

SEQ ID NO: 28145 - protein, 1170 aa, Griposia aprilina
MLTRSATRRARPSPPDSSLSPASPPPVSSPTVSAVITSAAVVASSSSDEYFSPPTSPTPVRRQGRGRPPKSLGLRGHPAPSRVPAAGGCVQRMKWTQSMNENVMRAYYRSTEGGTNLTTYRDRMLSLFQELEPTVNVSAQRLSDQVRVIQRSHRLDDAALDRLRSELSNHIVTRPAQTAVQASTIDEIQPRSNHGVELEDDRVASVSSQCNAQLRSALEDAFREYRSTPTEIRPRLPRLPMHKKNRALVCALDSHLKNVFENSENLVDTHSILYCAAVAACRLANVKFPNCDGATRQKPAVPAWQCRIERRIDEARVLIGKLYCFREGNTRPRVMRFVRRAFSGIEISPQEYMSRVTERIDFLKQKVCAWARRIRRYKRRVDRYTQNRMFQSDERWVYRAWERPEQNVTDECRPDDAATITFWRNIWSVPVCHVEADWIRDVEQVCETVPERLKWLISSHTCLASQFQASLESGSLPQFLTTGVTHLLHKSGSSTDPKSYRPITCLSTIYKLLTSILRAKINTHIDNNSIMSASQNGCRNGSRGTKELLLIDMAISQQVRRSCKDLSTCWIDHKKAYDSVPHTWLMRVLELYKIDTTLRTFLGSCMRQWRTVLRYSGCQQIQGNDEPVWIKRKIFQGDSLSPLWFCLALNPLSTLLEDSGLGYRLRRGGQLISHLLYMDDLKLFAPNKLQLMKLLKVTETFSSAIRMEFGVDKCAVMHVKQGEIMESEGIQLSDSIHLRSLSSSESYKYLGMSETLGINVADMKQSLKERFFGRLRKVLISLLSGGNKVRAFNGWVMPVFMYSFGILKWTQTELDALDRRVRTLLTANRMHHPRSSVMRLYIPRKCGGRGFLNAKTLHNREVCSLREYFLKAAVGMHRDVVAVDKGLIPLSMAKENWRKPVVLTTDDRKEVWQSKELHGRFYRALHEPGVDFLASVSWLRFGDLFGETEGFVCAIMDEVILTNNYRRHIMKDGTVDVCRACHRPGESIRHIVSGCSRLANGEYLHRHNQVARIIHQQLALKYKLVDSEVPYYKYVPDPVLENDHITLYWDRSIITDRTIVANKPDIVVIDRLARRTMIIDITIPHDENLVKTEKEKQIKYLDLAHEVVDMWNVSSAVIVPIVVSANGLMAESLDQHLSRLSLGGWVKGLIQKAVLLDTARIVRRFLSLEP

SEQ ID NO: 28146 - protein, 1202 aa, Griposia aprilina
MLTRSATRRARPSPPDSSLSSASPPPVSSPTVSAVTTPAAVVASSSSDEFFSPPTSPTPVRRQGRGRPPKSLGLRGHPAPSRVPAAGGCVQRMKWTQSMNENVMRAYYRSTEGGTNLTAYRDRMLSLFQELEPTVNVSAQRLSDQVRVIQRSHRLEDAALDRLRSELSNHIASRPAQTAVQASTIDEIQPRSNHGVELEDDRVASVSSQCNARLRSALEDAFREYRSTPTEIRPRLPRLPMHKKNRALVCALDSHLKNVFESSENLVDTHSILYCAAVAACRLANVKFPNCDGATRQKPAVPAWQCRIERRIDEARVLIGKLYCFREGNTRPRVMRFVRRAFSGTEISPQEYMSRVTERIDFLKQKVCAWASRIRRYKRRVDRYTQNRMFQSDERWVYRAWERPEQNVTDECRPDDAATITFWRNIWSVPVCHVEADWIRDVEQVCETVPEMEAVLITPLDVTKAVRPLPNWKSPGPDGLHNFWLKWLISSHTCLASQFQASLESGSLPQFLTTGVTHLLHKSGSSTDPKNYRPITCLSTIYKLLTSILRAKINTHIDNNSIMSASQNGCRNGSRGTKELLLIDMAISQQVRRSCKDLSTCWIDYKKAYDSVPHTWLMRVLELYKIDTTLRTFLGSCMRQWRTVLRYPGCRQIQGNDEPVWIKRGIFQGDSLSPLWFCLALNPLSTLLEDSGLGYRLRRGGQLISHLLYMDDLKLFAPNKLQLMKLLKVTETFSSAIRMEFGVDKCAVMHVKQGEIMESEGIQLSDSIHLRSLSSSESYKYLGMSETLGINVADMKQSLKERFFGRLRKVLISLLSGGNKVRAFNGWVMPVLMYSFGVLKWTQTELDALDRRVRTLLTANRMHHPRSSVMRLYIPRKCGGRGFLNAKTLHNREVCSLREYFLKAEVGMHRDVVAVDKGLTPLSMAKENWRKPVVLTTDDRKEVWQSKELHGRFYRALHEPGVDFLASVSWLRFGDLFGETEGFVCAIMDEVILTNNYRRHIMKDGTVDVCRTCHRPGESIRHIVSGCSRLANGEYLHRHNQVARIIHQQLALKYKLVDSEVPYYKYVPDPVLENDHITLYWDRYIITDRTIVANKPDIVVIDRLARRTMIIDITIPHDENLVKAEKEKQIKYLDLAHEVVDMWNVSSAVIVPIVVSANGLMAESLDQHLSRLSLGGWVKGLIQKAVLLDTARIVRKFLSLEP

SEQ ID NO: 28147 - protein, 1092 aa, Griposia aprilina
MLTRSATRRARPSPPDSSLSSASPPPVSSPTVSAVTTPAAVVASSSSDEYFSPPTSPTPVRRQGRGRPPKSLGLRGHPAPSRLPTAGGCVQRMKWTQSTNENVIRAYYRSTEGGTNLTAYRDRMLSLFQELEPTVNVSAQRLSDQVRVIQRSHRLDDAALDRLRSELSNHIVSRPAQTAVQASTIDEIQPRSNHGVELEDDRVASVSSQCNARLRSALEDAFREYRSTPTEIRPRLPRLPMHKKNRALVCALDSHLKNVFESSENLVDTHSILYCAAVAACRLANVKFPNCDGVTRQKPAVPAWQCRIERRIDEARVLIGKLYCFREGNTRPRVMRFVRRAFSGTEISPQEYMSRDAERIDFLKQKVCAWASRIRRYKRRVDRYTQNRMFQSDERWVYRAWERPEQNVTDKCRPDDAATITFWRNIWSVPVCHVEADWIRDVEQVCETVPEMEAVLITPLDVTIAVRPLPNWKSPGPDGLHNFWLKWLISSHTCLASQFQASLESGSLPQFLTTGVNHLLHKSGSSTDPKNYRPITCLSTIYKLLTSILRTKMNTHIDNNSIMSASQNGCRNGSRGTKELLLIDMAISQQVRRSYKDLSTCWIDYKKAYDSVPHTWLMRVLELYKIDTTLRTFLGSCMRQWRTVLRYPGCQQIQGNDEPVWIKRGIFQGDSLSPLWFCLALNPLSTLLEDSGLGYRLRRGAQLISHLLDMDDLKLFAPNKLQLMKLLKVTETFSSAIRMEFGVDKCAVMHVKQGEIMESEGIQLSDSIHLRSLSSSESYKYLGMSETLGINVADMKQSLKERFFGRLRKVLISLLSGGNKVRAFNGWVMPVLMYSFGVLKWTQTELDALDRRIRTLLTANRMHHPRSSVMRLYIPRKSGGRSFLNAKTLHNREVCSLREYFLKAEVGMHRDVVTVDMGLTPLSMAKKNWRKPVVLTTDDRKEVWQSKKLHGRFYRALHAPGVDFLASVSWLRFGDLFGETEGFVCTIMDEVIWTNNYRRHIMKDGTVDVCQACHRPGESIRHIVSGCSRLANGEYLHRHNQVARIIHQQLALKYKLVDSEVPYYKYVPDPVLENDHITLYWDRSIITDYCRQ

SEQ ID NO: 28148 - protein, 1110 aa, Griposia aprilina
MKWTQSMNENVMRAYYRSTEGGTNLTAYRDRMLSLFQELEPTVNVSAQRLSDQVRVIQRSHRLDDAALDRLRSELSNHIASRPAQTAVQASTIDEIQPRSNHGVELEDDRVASVSSQCNARLRSALEDAFREYRSTPTEIRPRLPRLPMHKKNRALVCALDSHLKNVFESSENLVDTHSILYCAAVAACRLANVKFPNCDGATRQKPAVPAWQCRIERRIDEARVLIGKLYCFREGNTRPRVMRFVRRAFSGTEISPQEYMSRVTERIDFLKQKVCAWASRIRRYKRRVDRYTQNRMFQSDERWVYRAWERPEQNVTDECRPDDAATITFWRNIWSVPVCHVEADWIRDVEQVCETVPEMEAVLITPLDVTKAVRPLPNWKSPGPDGLHNFWLKWLISSHTCLASQFQASLESGSLPQFLTTGVTHLLHKSGSSTDPKNYRPITCLSTIYKLLTSILRAKINTHIDNNSIMSASQNGCRNGSRGTKELLLIDMAISQQVRRSCKDLSTCWIDYKKAYDSVPHTWLMRVLELYKIDTTLRTFLGSCMRQWRTVLHYPGCRQIQGNDEPVWIKRGIFQGDSLSPLWFCLALNPLSTLLEDSGLGYRLRRGGQLISHLLYMDDLKLFAPNKLQLMKLLKVTETFSSAIRMEFGVDKCAVMHVKQGEIMESEGIQLSDSIHLRSLSSSESYKYLGMSETLGINVADMKQSLKERFFGRLRKVLISLLSGGNKVRAFNGWVMPVLMYSFGVLKWTQTELDALDRRVRTLLTANRMHHPRSSVMRLYIPRKCGGRGFLNAKTLHNREVCSLREYFLKAEVGMHRDVVAVDKGLTPLSMAKENWRKPVVLTTDDRKEVWQSKELHGRFYRALHEPGVDFLASVSWLRFGDLFGETEGFVCAIMDEVILTNNYRRHIMKDGTVDVCRACHRPGESIRHIVSGCSRLANGEYLHRHNQVARIIHQQLALKYKLVDSEVPYYKYVPDPVLENDHITLYWDRSIITDRTIVANKPDIVVIDRLARRTMIIDITIPHDENLVKAEKEKQIKYLDLAHDVVDMWNVSSAVIVPIVVSANGLMAESLDQHLSRLSLGGWVKGLIQKAVLLDTARIVRKFLSLEP

SEQ ID NO: 28149 - protein, 1110 aa, Griposia aprilina
MKWTQSMNENVMRAYYRSTEGGTNLTAYRDRMLSLFQELEPTVNVSAQRLSDQVRVIQRSHRLEDAALDRLRSELSNHIASRPAQTAVQASTIDEIQPRSNHGVELEDDRVASVSSQCNARLRSALEDAFREYRFTPTEIRPRLPRLPMHKKNRALVCALDSHLKNVFESSENLVDTHSILYCAAVAACRLANVKFPNCDGATRQKPAVPAWQCRIERRIDEARVLIGKLYCFREGNTRPRVMRFVRRAFSGTEISPQEYMSRVTERIDFLKQKVCAWASRIRRYKRRVDRYTQNRMFQSDERWVYRAWERPEQNVTDECRPDDGATITFWRNIWSVPVCHVEADWIRDVEQVCETVPEMEAVLITPLDVTKAVRPLPNWKSPGPDGLHNFWLKWLISSHTCLASQFQASLESGSLPQFLTTGVTHLLHKSGSSTDPKNYRPITCLSTIYKLLTSILRAKINTHIDNNSIMSASQNGCRNGSRGTKKLVLIDMAISQQVRRSCKDLSTCWIDYKKAYDSVPHTWLMRVLELYKIDTTLRTFLGSCMRQWRTVFRYPGCRQIQGNDEPVWIKRGIFQGDSLSPLWFCLALNPLSTLLEDSGLGYRLRRGGQLISHLLYMDDLKLFAPNKLQLMKLLKVTETFSSAIRMEFGVDKCAVMHVKQGEIMESEGIQLSDSIHLRSLSSSESYKYLGMSETLGINVADMKQSLKERFFGRLRKVLISLLSGGNKVRAFNGWVMPVLMYSFGVLKWTQTELDALDRRVRTLLTANRMHHPRSSVMRLYIPRKCGGRGFLNAKTLHNREVCSLREYFLKAEVGMHRDVVAVDKGLTPLSMAKENWRKPVVLTTDDRKEVWQSKELHGRFYRALHEPGVDFLASVSWLRFGDLFGETEGFVCAIMDEVILTNNYRRHIMKDGTVDVCRACHRPGESIRHIVSGCSRLANGEYLHRHNQVARIIHQQLALKYKLVDSEVPYYKYVPDPVLENDHITLYWDRSIITDRTIVANKPDIVVIDRLARRTMIIDITIPHDENLVKAEKEKQIKYLDLAHEVVDMWNVSSAVIVPIVVSANGLMAESLDQHLSRLSLGGWVKGLIQKAVLLDTARIVRKFLSLEP

SEQ ID NO: 28150 - protein, 1198 aa, Noctua fimbriata
MLTRSAARRARLSPPDPSLSSASPPPESSPVVSAVTPAVAVASSSSDEYFSPPTTPPPVRRRGGRRPPDGLGPRGPPASDRVPAPGGSVQRMRWTQSINANVMRAYCGATEGGNNLTAYRVRMLSLFQVLEPAVNVSAQRLSDQVRVIQRNRMLDDTVLDRLRTEMQSSHVIATPPPQAVVPPQSTIIPNRDNDVSNDIVTNVSTQCNEEMRSALEGAIREYRFMQPDLRPRIPRLPMHNKNRALVAVLDSQLSNYFDNCEDLTDAHSILYCAAVAACRVAHVKFSDDRATRPKPAVPPWQYRIERRIGGARALIGKLICFREGNTRPRVMRFVRRAFSGTDISPRDYMSRITERIDFLKQKVYAWANRIRRYKRRVDRYTQNRTFQRDERWVYRAWERPDQGVADTRLPDDDAMCSFWRSIWSVPVSHTEGEWTQGVERACDLVPEMGAITISPQDVVRAVRPLPNWKSPGPDGLHNFWIKWFTRSHARLAILFQSALESGSLPEFLTTGITHLLHKSGSTAEPKNYRPITCLPTVYKVLTSILRAKINKHIDDNSIMSASQNGCRNGSRGTKELLLIDMAVSQQVRRSRSDLSTCWIDYKKAYDSVPHTWLMRVLELYKVDATLRTFLMSCMGQWRTVLRYPGCRQIQRNSEPIRIERGIFQGDSLSPLWFCLALNPLSTLLEDSGLGYRLRRGGQLISHLLYMDDLKLFAPNDLQLMELLKVTETFSSAIRMEFGVDKCAVMHVKRGEIVESVGTQLSDSINLRSLSATETYKYLGMSEALGINVADMKQSLKERFFGRLKKVFNSLLSGGNKVRAFNGWVMPVLMYSFGILKWTQTELDALDRRVRTLLTAYRMHHPRSSVMRLYIPRKCGGRGFLNAKTLHNREICSLREYFLETDVGMHRDVVAVDKGLTPLSLAKENWRKPLVLDTNDRMEVWQSKELHGRFFRALHGPDVDLSASVAWLRSGDLFGETEGFVCAIMDEVMMTNNYRRFIVKDGTVDICRACHRPGESIRHIISGCSRLANGEYLHRHNLVARIIHQQLALKYNLVESEVPYYKYVPDPVLENGSITLYWDQSIITDRTIVANKPDIVVVDRSERRTMIVDITVPHDENLVKAEKDKKIKYLDLAREVVDMWDVDSAIIVPIVVSAHGLIAKSLDQYLRRLSLGSWIKGLIQKAVLLDTARIVRRFLSLEP

SEQ ID NO: 28151 - protein, 1202 aa, Griposia aprilina
MLTRSATRRARPSPPDSSLSSASPPPVFSPTVSAVTTPAAVVASSSSDEYFSPPTSPTPVRRQGRVRPPKSLGLRGHPAPSRVPAAGGCVQRMKWTQSMNENVMRAYYRSTEGGTNLTAYRDRMLSLFQELEPTVNVSAQRLSDQVRVIQRSHRLEDAALDRLRSELSNHIASRPAQTAVQASTIDEIQPRSNHGVELEDDRVASVSSQCNARLRSALDDAFREYRSTPTEIRPRLPRLPMHKKNRALVCALDSHLKNVFESSENLVDTHSILYCAAVAACRLANVKFPNCDGATRQKPAVPAWQCRIERRIDEARVLIGKLYCFREGNTRPRVMRFVRRAFSGTEISPQEYMSRVTERIDFLKQKVCAWASRIRRYKRRVDRYPQNRMFQSDERWVYRAWERPEQNVTDECRPDDAATITFWRNIWSVPVCHVEADWIRDVEQVCETVPEMEAVLITPLDVTKAVRPLPNWKSPGPDGLHNFWLKWLISSHTCLASQFQASLESGSLPQFLTTGVTHLLHKSGSSTDPKNYRPITCLSTIYKLLTSILRAKINTHIDNNSIMSASQNGCRNGSRGTKELLLIDMAISQQVRRSCKDLATCWIDYKKAYDSVPHTWLMRVLELYKIDTTLRTFLGSCMRQWRTVLRYPGCRQIQGNDEPVWIKRGIFQGDSLSPLWFCLALNPLSTLLEDSGLGYRLRRGGQLISHLLYMDDLKLFAPNKLQLMKLLKVTETFSSAIRMEFGVDKCVVIHVKQGEIMESEGIQLSDSIHLRSLSSSESYKYLGMSETLGINVADMKQSLKERFFGRLRKVLISLLSGGNKVRAFNGWVMPVLMYSFGVLKWTQTELDALDRRVRTLLTANRMHHPRSSVMRLYIPRKCGGRGFLNAKTLHNREVCSLREYFLKAEVGMHRDVVAVDKGLTPLSMAKENWRKPVVLTTDDRKEVWQSKELHGRFYRALHEPGVDFLASVSWLRFGDIFGETEGFVCAIMDEVILTNNYRRHIMKDGTVDVCRACHRPGESIRHIVSGCSRLANGEYLHRHNQVARIIHQQLALKYKLVDSEVPYYKYVPDPVLENDHITLYWDRSIITDRTIVANKPDIVVIDRLARRTMIIDITIPHDENLVKAEKEKQIKYLDLAHEVVDMWNVSSAVIVPIVVSANGLMAESLDQHLSRLSLGGWVKGLIQKAVLLDTARIVREFLSLEP

SEQ ID NO: 28152 - protein, 904 aa, Mesoligia furuncula
MRFVRRAFSGTGISPREYISRVTERIDFLKQKVCAWASRIRRYKRRVDRYTQNRMFQSDERWVYRAWERPEQNVTDVYRPDDATTSAFWCSIWSVPVCHTEAGWMRDVERVCESVPEMETVLITPSDVAKAVRPLPNWKSPGLDGLHNFWLKWLISSHTCLASQFQSSLESGSLPQFLTTGVTHLLHKSGSPAEPKNYRPITCLSTVYKLLTSILRAKINTHIESNSIMSASQNGCRNGSRGTKELLLIDMAISQQVRRSRKDLSTCWIDYKKAYDSVPHTWLMKVLELYKIDATLRTFLESCMRQWKTVLRYPGCRQIQGNDEPVWIKRGIFQGDSLSPLWFCLALNPLSTLLEDSGLGYRLRRDGQVISHLLYMDDLKLFAPNKLRLMELLKVTETFSSAVRMEFGVDKCAVMHVKRGEIMESEGIQLSDSISLRSLSSSESYKYLGMSEALGINDADMKQSLKERFFCRLKKVLISLLSGGNKVRAFNGWVMPVLMYSFGILKWTQTELDALDRRVRTLLTANRMHHPRSSVMRLYIPRKSGDRGFLNAKTLHNREVCSLREYFLKAEVGMHRDVVAVDKGRTPLSMAKENWRKPVVLSTDDRKKVWQSKELHGRFYRAIHEPGVDFLASISWLRFGDLFGETEGFVCAIMDEVILTNNYRRHIMRDGTVDVCRACHRPGESIRHIISGCSRLANGEYLHRHNQVARIIHQQLALKYKLVDSEVPYYKYVPDPVLENDHVTLYWDRSIITDRTIVANKPDIVVIDRLARRTMIVDVTIPHDGNLVKAEKEKQIKYLDLAHEVVDMWNVSSAIIVPIVVSANGLMAESLDQHLSRLSLGGWIKGLIQKVLLDTARIVRRFLSLEPLPPVAWTLLPTPADNYFFIFLNVFYTYFLYFKKYLKM

SEQ ID NO: 28153 - protein, 1202 aa, Griposia aprilina
MLTRSATRRARPSPPDSSLSSASPPPVSSPTVSAVTTPAAVVASSSSDEYFSPPTSPTPVRRQGRGRPPKSLGLRGHPAPSRVPAAGGCVQRMKWTQSMNENVMRAYYRSTEGGTNLTAYRDRMLSLFQELEPTVNVSAQRLSDQVRVIQRSHRLDDAALDRLRSELSNHIASRPAQTAVQASTIDEIQPRSNHGVELEDDRVASVSSQCNARLRSALEDAFREYRSTPTEIRPRLPRLPMHKKNRALVCALDSHLKNVFESSENLVDTHSILYCAAVAACRLANVKFPNCDGATRQKPAVPAWQCRIERRIDEARVLIGKLYCFREGNTRPRVMRFVRRAFSGTEISPQENMSRVTDRIDFLKQKVCAWASRIRRYKRRVDRYTQNRMFQSDERWVYRAWERPEQNVTDECRPDDAATITFWRNIWSVPVCHVEADWIRDVEQVCETVPEMEAVLITPLDVTKAVRPLPNWKSPGPDGLHNFWLKWLISSHTCLASQFQASLESGSLPQFLTTGVTHLLHKSGSSTDPKNYRPITCLSTIYKLLTSILRAKINTHIDNNSIMSASQNGCRNGSRGTKELLLIDMAISQQVRRSCKDLSTCWIDYKKAYDSVPHTWLMRVLELYKIDTTLRTFLGSCMRQWRTVLRYPGCRQIQGNDEPVWIKRGIFQGDSLSPLWFCLALNPLSTLLEDSGLGYRLRRGGQLISHLLYTDDLKLFAPNKLQLMKLLKVTETFSSAIRMEFGVDKCAVMHVKQGEIMESEGIQLSDSIHLRSLSSSESYKYLGMSETLGINVADMKQSLKERFFGRLRKVLISLLSGGNKVRAFNGWVMPVLMYSFGVLKWTQTELDALDRRVRTLLTANRMHHPRSSVMRLYIPRKCGGRGFLNAKTLHNREVCSLREYFLKAEVGMHRDVVAVDKGLTPLSMAKENWRKPVVLTTDDRKEVWQSKELHGRFYRALHEPGVDFLASVSWLRFGDLFGETEGFVCAIMDEVILTNNYRRHIMKDGTVDVCRACHRPGESIRHIVSGCSRLANGEYLHRHNQVARIIHQQLALKYKLVDSEVPYYKYVPDPVLENDHITLYWDRSIITDRTIVANKPDIVVIDRLARRTMIIDITIPHDENLVKAEKEKQIKYLDLAHEVVDMWNVSSAVIVPIVVSANGLMAESLDQHLSRLSLGGWVKGLIQKAVLLDTARIVRKFLSLEP

SEQ ID NO: 28154 - protein, 1207 aa, Atethmia centrago
MLTRSRARRLRQDTHPTSSVPSLSSASQLPEPAPDVSPVIPAAAVASSSSDEYFSPPTTPPPVRPRGRGRPPASLGLRGPPASDRVPAPGGSVQRMRWTQALNENVMRAYFGATEGGSNLTAYRGRMLSLFQVLEPAVNVSAQRLSDQVRVIQRKHMLDDVVLDRLRIESRNSHVSPASPLVAVQMQNLPGGSPRPDHADEEDDDEAISVSSQCNVRLRSALDDAFREYRSTPPGLRPRLPRLPMHKKNKALVCALDSQLSNYFDSSKDLTDTHSILYCAAVAACRVAQVKFPNSDRAPRPKSAVPAWQSRIERRYGETRALIGKLICFREGNTRPRVMRFVKRAFAGTDIRSSRDYLTRVTERIDFLKQKICAWANRIRRYRRRSERYTQNRTFQNDERWVYRTWERPDQGVADTRLPDDDAICSFWRNIWSVPVNHTEGDWTKRIERACDLIPEMGALTILPQDVAHAVRPLPNWKSPGPDGLHNFWIKWFQRSHARLASQFQSALESGSLPLFLTTGITHLLHKSGSTAEPKNYRPITCLPTVYKVLTSILRAKINKHIETNLIMSASQNGCKNGSRGTKELLLIDIAISQQVRRSRKDLSTCWIDYKKAYDSVPHTWLMRVLELYKVVATLRTFLMSCMRQWRTVLCYPGCRYIQRNSEPIRIKRGIFQGDSLSPLWFCLALNPLSTLLENSGLGYRLRRGGQLISHLLYMDDLKLFAPNNLQLMELLKVTKTFSSAIRMEFGVDKCAVMHVKRGGIVESVGTQLSDSIHLRSLSSTETYKYLGMSEALGINAADMKQSLRERFFGRLNKVLNSLLSGGNKVRAFNGWVMPVLMYSFGILKWTQTELDALDRRVRTLLTANRMHHPRSSVMRLYIPRKCGGRGFLNAKTLHNREICSLREYFLETDVVMHRDVVSVDKGLTPLSLADENWRKPIILDTNDRREVWQSKELHGRFYRVLHGPDVDLLASVSWLRFGDHFGETEGFVFAIMDEVIMTNNYRKYIVKDGTVDICRACHRPGDPIRHIISGCSRLANGDYLHRHNFVAKIIHQQLALKYSLVESEVPYYRYAPDPVLENGNITLYWDRSIITDRTIVANKPDIVVIDRLTRRTMIIDIAVPHDENLVKAEKDKQIKYLDLAHEVVDMWDVDTAIIVPIVVTANGIIPKSLDQHLKRLSLGSWIKGLIQRAVLLDTARIVRRFLSQEP

SEQ ID NO: 28155 - protein, 1024 aa, Griposia aprilina
MRAYYRSTEGGTNLTAYRDRMLSLFQELEPTVNVSAQRLSDQVRVIQRSHRLDDAALDRLRSELSNHIVSRPAQTAVQASTIDEIQPRSNHGVELEDDRVASVSSQCNARLRSALEDAFREYRSTPTEIRPRLPRLPMHKKNRVLVCALDSHLKNVFESSENLVDTHSILYCAAVAACRLANVKFPNCDGATLQKPAVPAWQCRIERRIDEARVLIGKLYCFREGNTRPRVMRFVRRAFSGTEISPQEYMSRVTERIDFLKQKVCAWASRIRRYKRRVDRYTQNRMFQSDERWVYRAWERPEQNVTDECRPDDAATITFWRNIWSVPVCHVEADWIRDVEQVCETVPEMEAVLITHLDVTKAVRPLPNWKSPGPDGLHNFWLKWLISSHTCLASQFQASLESGSLPQFLTTGVTHLLHKSGSSTDPKNYRPITCLSTVYKLLTSILRAKINTHIDNNSIMSASQNGCRNGSRGTKALLLIDMAISQQVRRSCKDLSTCWIDYKKAYDSVPHTWLMRVLELYKIDTILRTFLGSCMRQWRTVLRYPGCQQIQGNDEPVWIKRGIFQGDSLSPLWFCLALNPLSTLLEDSGLGYRLRRGGQLISHLLYMDDLKLFAPNKLQLMKLLKVTETFSSAIRMEFGGDKCAVMHVKQGEIMESEGIQLSDSIHLRSLSSSESYKYLGMSETLGINVADMKQSLKERFFGRLRKVLISLLSGGNKVRAFNGWVMPVLMYSFGILKWTQTELDALDRRVRTLLIANRMHHPRSSVMRLYIPRKCGGRGFLNAKTLHNREVCSLREYFLKAEVGMHRDVVAVDKGLTPLSMAKENWRKPVVLTSDDRKEVWQSKELHGRFYRALHEPGVDFLASVSWLRFGDLFGETEGFVCAIMDEVILTNNYRRHIMKDGTVDVCRACHRPGESIRHIVSGCSRLANGEYLHRHNQVARIIHQQLALKYKLVDSEVPYYKYVPDPVLENDHITLYWDRSIITDRTIVANKPDIVVIDRLARRTMIIDITIPHDENLVKAEKE

SEQ ID NO: 28156 - protein, 962 aa, Chilo suppressalis
MHKKNRALMCALDSLLSNYIDSSEDLADTHSILYCAAITACRVAHVKFPNTDIATHPREAVPAWQCRIESRISEARVLIGKLSCFREGNSRPRVMRLVRRAFSGTGISPENYSSHVTERIDFLKQKICAWANRIRRYKLRVSRFTQNRMFERDQRCVYRSWERSNRSDIDMHRPDDEAMISFWRNIWSVPVTHSDGAWMTDVERSCELLPEMNDVTIDYEDVVCAVRSLPNWKSPGPDGLHNFWFKWLPSSHVCLASQFQRALSSRSLPEFMTTGITHLLHKSGSTADPKNYRPITCLPTIYKILTSILRSKISIHIDQNSITFASQNGCRNGARGTKELLLIDMAINQQVRRNRKTLSTSWIDYKKAYDSVPHSWLMRVLELYKINATLRTFLMSCMRQWRTVLFYPESRRTLGNGDPIKIERGIFQGDGLSPLWFCLALNPLSTLLESSGLGYRLRRNGQVISHLLYMDDLKLFAHSSSHLTALLKVTEDFSNAIRMEFGVDKCAIMHVKRGQVVESAGIQLSDSVHLRSLSVNETYKYLGMSQALGINDADMKQSLRERFLGRLSKVLKSLLSGGNKVRAYNGWVMPLLMYSFGILKWTQTELDALDRTVRTLLTAHRMHHPRSSTMRLYIPRKCGGRGFLNAKTLHNRELNNLREYFLNVDMGIHRDVVAVDNGLTPLFLAKENWRRPVVLSTLDRSIVWQSKELHGRFYRALHGPDVDLSASVSWLRYGDLFGETEGFICAIMDEVVMTKNYRRFILKDGTLDVCRACHRPGESLRHIISGCSRLANGEYLHRHNQVARIIHQQLALKYNLLASEVPYYRYAPEQVLENSHATLYWDRSIITDRTILANKPDIVLIDRHERRAVVVDVAVPHDDNLVKAEKDKENKYLDLAREIVDMWDIDSAIVVPIIISAHGLIAKSLDKHLKRLALGGWVKSQMQKAVLLDTARIVRRFLSLDP

SEQ ID NO: 28157 - protein, 1191 aa, Eilema sororculum
MLTRAQARNRNAQTTSPDSSLSSAAQPPAMEPAASSSSSSDEFFSPPTSPTPVRRPGRGRPPTCLGPRRPPASNRAPAAGGNVHRMRWTNSINENVMRAYFAATEGGTNLSAYRTRMLPLFQALEPSINTSAQRLSDQVRVIQRNRMLNETVLETLRQECLRNICVTPAPAPAPASTAEINNDTCVAPDDTPIPVSIQYNEEIKEALECALREYRSVPVHVRPRLPRLPIHRRNIALVSALDSLLPRYLENSENLGDTHSILYCTAVAACRMAGAKFPIKDPAIRPKSAIPAWQCRIERRVAEARVLIGKLICFRSGNTRPRVMRYVTRAFAGTDISPQDYTSRVTERIDFLKQKVYAWANRIRRYKRRVDRYTVNHMFQRDQRWVYRSWERTDESVDDVRRPDAEATNAFWRSIWSVPVSHTEGDWMREVERACETIPEMEEIYIDATDVDCAVHSLSNWKSPGPDGLHNFWLKWLRSSHVVLASQFQSAIESGTLPAFMTTGVTHLLHKTGSTLEPNNYRPITCLPTVYKLLTSILRAKINNHINNNSIMCASQNGCRNGARGTKELLLIDMAISQQARRNRKDLTACWIDYKKAFDSVPHTWLLRVLELYKVNTTLCTFLRSCMGQWRTVLFYPGYRQALGGGVPITIERGIFQGDSLSPLWFCLALNPLSTLLVNSGLGYRLRREGQMVSHLFYMDDLKLFAHTNSQLIALLKVTETFSNSIKMAFGVDKCAVIHVKRGRVVESEGIQLSDSTNLRSLLVNETYKYLGMSQALCINEVDMKQMLQERFFGRLKKVLNSLLSGGNKVRACNSWVMPLLMYSFGILRWTQTELDTIDRKVRTQLTAFRMHHPRSSVMRLYIPRKCGGRGFLNAKTLHNREVCNLRDYFLKSNVDMHRDVVNVDTGLTPLGLAKENWRRPTIVSTDSRREVWQSKELHGRFYRALHRPEVDLLASVSWLRFSDLFGETEGFVCAISDEVIKTNNYRKYIMRDGTIDICRACHQPGESLRHITSGCSRLANGEYLHRHNQVARIIHQRLALKYNLVEVEVPYYKYVPEPVLQNSHITLYWDRSIITDRTVVANKPDIVVIDRSERRALIVDVTIPHDENLVKAEKDKQVKYLDLAHEVVDMWNVDSAIIVPIVVSVNGLIAKSLDQHLKRLGLDGWVKGQMQKAVLLDTARIVRKFLSLEP

SEQ ID NO: 28158 - protein, 1074 aa, Chilo suppressalis
MRWTTSINESVMRAYFEATEAGTNLTAYRARMLSLFQALEPTVNVSAQRLSDQVRAIQRGHLLDDSTLDRLRTEVQSNHIISIASQAANLSPSITALQADVADGDDRDDVITTVSSQHNDVLRSTFDDVVREFRSTPLCLRSRLPRFPMHKRNRALMCALDSLLSNYIDSSEDLADTHSILYCAAVTACRVAHVKFPNTDIATRPRQAVPAWQCRIESRISEARVLIGKLSCFKEGNTRPRVMRFVRRAFSGTGISPENYSSRVTERIDLLKQKICAWANRIRRYKLRVSRFTQNRIFERDQHCVYRSWERSNQSDINMHRPDDEAMISFWRNIWSVPVTHSDGAWTGDVERSCELLPEMNDVTIDYEDVACAVRSLPNWKSPGPDGLHNFWFKWLPSSHVCLASQFQRALSSRSLPEFMTTGITHLLYKSGSTMDPKNYRPITCLPTIYKILTSILRSKISKHIDQNSIMFTSQNGCRNGARGTKELLLIDMAINQQVRRNRKTLSTSWIDYKKAYDSVPHSWLMRVLELYKINATLRTFLMSCMRQWRTVLFYPESRRTLGNGDPIKIERGIFQGDGLSPLWFCLALNPLSTLLESSGLGYRLRRNGQVISHLLYMDDLKLFAHSSSYLTALLKVTEDFSNAIRMEFGVDKCAIMHVKRGQVVESAGIQLSDSVHLRSLSVNETYKYLGMSQGLGINDADMKQSLRERFLGRLSKVLKSLLSGGNKVRAYNGWVMPLLMYSFGILKWTQTELDALDRTVRTLLTAHRMHHPRSSTMRLYIPRKCGGRGFLNAKTLHNREINNLREYFLNVDMGIHRDVVAVDNGLTPLFLAKENWRRPVVLSTLDRSIVWQSKELHGRFYRALHGPDVDLSASVSWLRYGDLFGETEGFICAIMDEVVMTKNYRRFILKDGTLDVCRACHRPGESLRHIISGCSRLANGEYLHRHNQVARIIHQQLALKYNLLASEVPYYRYAPEQVLENSHATLYWDRSIITDRTIVANKPDIVLIDRHERRAVVVDVAVPHDDNLVKAEKDKENKYLDLAREIVDMWDIDLAIVVPIIISAHGLIAQEPR

SEQ ID NO: 28159 - protein, 1043 aa, Griposia aprilina
MRWTQSINENVMRAYYGATEGGINLTAYRSRMLSLFQVLEPAVNVSAQRLSDQVRVIRHNHRLDDATLDRLRLEMQSSSASNPSPPQNFVHAPTVVPLRTNQQDEEEDTRAISADNLCNVELRSILEDAIREYRFTSSDLRPRLPRLPMNKKNRALVCALDALLPNLIENSADLCDTHSILYCTAVAACRIACVKFPNTGRTAQLKPAAPAWQCRIERRITEARVLIGKLTCFREGNTRPRVMRFVRQAFSGTNISPREYISCVTERIDFLKQKVYAWANRIRRYRRRVDRYTQNRMFQKDERWVYRAWERPIPTQGVTDVLPPDNDTVSAFWQSIWSVPVSHTEGDWMRVVEQACDSIPEMEAISISPLDVARAVRPLPNWKSPGPDALHHFWIKWLQRSHACLASQFQSSLETGSLPLFFTTGVTHLLHKSGSTAEPKNYRPITCLPTVYKVLTFILRAKIAEHIKNNSIMSVSQNGCKNGSRGTKELLLIDMAISQQVRRSRKDLSTCWIDYKKAYDSVPHTWLIRVLELYKIDATLRTFLISCMGQWRTILLYPGCQQIQRTDEPIRIERGIFQGDSLSPLWFCLALNPLSTLLEDSGLGYRLRRGGQVISHLLYMDDLKLFAPNNLRLMELLKVTETFSSAIRMEFGVDKCAVMHVKRGGIMESVGTQLSDSIHLRSLSSTETYKYLGMSEALGINAADMKQSLRERFFGRLNKVLNSLLSGGNKVRAFNGWVMPVLMYTFGILKWTQTELDALDRKVRTLLTAYRMHHPRSSVMRLYIPRKCGGRGFLNAKTLHNREICSLREYFLQTDVGMHRDVVAVDKGLTPLSLAKENWRKPAVLDTNDRKEVWQGKELHGRFFRALHGPDVDFLASVSWLRFGDLFGETEGFVCAIMDEVIMTNNNRKYIVKEGTVDICRACHRPGESIRHIVSGCSRLANGEYLHRHNLVARIIHQQLALQYNLLESEVPYYRYVPDPVLENGHTTLYWDRSIITDRTIVANKPDIVVIDRRERRAMIVDIAVPHDENLVKAEKDKKKQVS

SEQ ID NO: 28160 - protein, 1076 aa, Eilema sororculum
MLILFQDLEPTVNVSAQRLSDQVRAIQRCHLLDSSVLERLRSDLQNNDIIPPPPQAVMQEVPQETQPVHTDCELDNVATSVSTQYIDQIRNALECAVRDYRSMNYQIRPRLPRLPVHKRNIALVCALDSLLPNYLDNSEHLGDTHSILYCAAYAACRVAGVKFPECNTAIRPKSGKPRWQCRIERRIAETRALIGKLICFRSGNTRPRVMRFVNRVFSGTGVSPFDYTSRVTERIDFLKQKVYAWANRIKRYKKRCDRYTLNRTFQRDERWVYRNWERADSVGDEHFPDVAATNTFWRNIWSVPVAHTEGDWVRKVKRSCEAIETMEPIIISEDDIACVVRSLPNWKAAGPDGLHNFWLKWLRSSHARLASQFQSALESGSLPSFMTTGITHLLYKSGCAMNPKNYRPITCLPTVYKLLTSVLRVKITSHITRNSILSYSQNGCRSGARGTKELLIIDTAVNQQVRRNRRDMAICWIDYKKAYDSVPHTWLLRVLELYKVDTTLCTFLKACMGQWSTALRYPGCRHIPDDGELIKIERGIFQGDSLSPLWFCLALNPLSTMLEDSGLGYCLRRGSQVISQLLYMDDLKLFAPNNHQLMELLKITETFSTSIRVEFGVDKCAVMHVKKGEIVESEGIELSDSTKLRSLSVNDTYKYLGMSQALGVNESGMKQSLRERFFCHLKKVLKSLLSGGNKVRAYNDWVIPVLTYSFGILRWTQTELEALDRRVRTLLTAYRMHHPRSSVMRLYIPRKFGGRGFLNIKTLHNREICNLREYFLKVNVDVHRDVVAVDRGLTPLALAKENWRKPAILSINDRKEVWKSKELHERFHRALYGPDVDLKASVSWLRFGDLFGETEGFVCAITDEVVMTNNYRRYILKDGTADICRACHRPGESLRHIISGCSRLANGEYLHRHNQVARIVHQQLALKYKLVDSEVPYYRYVPDPVFDDGRVTLYWDRSIITDRTIVANKPDIVVIDRLERRAIIIDVTIPHDENLVKAEKDKQIKYLDLAHEVVDMWNVDSAIIVPIVVSVHGLIAKSLDQHLKRLALDSWVKGLMQKAVILDTARIVRRFLSLEP

SEQ ID NO: 28161 - protein, 1197 aa, Eilema sororculum
MLTRAKAKQATNYAQPTPSDSSCSSASQPPESTSPRPATVEASSSDEYFSPPTSPTPVRRPGRGRPPSSLGSRGPPASNRAPAAGGNVRRMRWTSSMNENVMRAYFAATGGGTNLTAYRDRMLILFQDLEPTVNVSAQRLSDQVRAIQRCHLLDSSVLERLRSDLQNNDIIPPLPQAVMQEVPQETQPVHTDCELDNIATSVSTQYIDQIRNALECAVRDYRSMNYQIRPRLPRLPVHKRNIALVCALDSLLPNYLDNSEHLGDTHSILYCAAYAACRVAGVKFPECNTAIRPKSGKPRWQCRIERRIAETRALIGKLICFRSGNTRPRVMRFVNRVFSGTGVSPSDYTSRVTERIDFLKQKVYAWANRIKRYKKRCDRYTLNRTFQRDERWVYRNWERADSVGDEHFPDVAATNTFWRNIWSVPVAHTEGDWVRKVKRSCEAIETMEPIIISEDDIACVVRSLPNWKAAGPDGLHNFWLKWLRSSHARLASQFQSALESGSLPGFMTTGITHLLYKSGCAMNPKNYRPITCLPTVYKLLTSVLRVKITSHITRNSILSYSQNGCRSGARGTKELLIIDTAVNQQVRRNRRDMATCWIDYKKAYDSVPHTWLLRVLELYKVDTTICTFLKACMGQWSTALRYPGCRHIPDDGELIKIERGIFQGDSLSPLWFCLALNPLSTMLEDSGLGYCLRRGSQVISHLLYMDDLKLFAPNNRQLMELLKITETFSTSIRMEFGVDKCAVMHVKKGEIVESEGIELSDSTKLRFLSVNNTYKYLGMSQALGVNESGMKQSLRERFFCRLKKVLKSLLSGGNKVRAYNDWVIPVLTYSFGILRWTQTELEALDRRVRTLLTAYRMHHPRSSVMRLYIPRKFGGRGFLNIKTLHNREICNLREYFLKVNVDVHRDVVAVDRGLTPLALAKENWRKPAILSINDRKEVWKSKELHGRFHRALYGPDVDLKASVSWLRFGDLFGETEGFVCAITDEVVMTNNYRRYILKDGTVDICRACHRPGESLRHIISGCSRLANGEYLHRHNQVARIVHQQLALKYKLVDSEVPYYRYVPDPVLDDGRVTLYWDRSIITDRTIVANKPDIVVIDRLERRAIIIDVTIPHDENLVKAEKDKQIKYLDLAHEVVDMWNVDSAIIVPIVVSVHGLIAKSLDQHLKRLALDSWVKGLMQKAVILDTARIVRRFLSLEP

SEQ ID NO: 28162 - protein, 1197 aa, Eilema sororculum
MLTRAKAKQTTNYAQPTPSDSSCSSASQPAESTSPRPATVEASSSDEYFSPPTSPTPVRRPGRGRPPSSLGSRGPPTSNRAPAAGGNVRRMRWTSSINENVMRAYFAATGGGANLTAYRDRMLILFQDLEPTVNVSAQRLSDQVRAIQRCHLLDSSVLERLRSDLQNNAIILPPPQTVMQVVPQETQPVHTDCGLDNVASSVSTQYIDQIRNALECAVRDYRSMNYQIRPRLPRLPVHKRNIALVCALDSLLPSYLDNSEHLGDTHSILYCAAYAACRVAGVKFPEYNTATRPKSGKPRWQCRIERRIAETRALIGKLICFRSGNTRPRVMRFVNRVFSGTGVSPFDYTSRVTERIDFLKQKVYAWANRIKRYKKRCDRYTLNRTFQRDERWVYRNWERADSVGDEHFPDVAATNTFWRNIWSVPVAHTEGDWVRKVKRSCEAIETMEPIIISEDDIACVVRSLPNWKAAGPDGLHNFWLKWLRSSHARLASQFQSALESGSLPSFMTTGITHLLYKSGCAMNPKNYRPITCLPTVYKLLTSVLRVKITSHITTNSILSYSQNGCRSGARGTKELLIIDTAVNQQVRRNRRDMATCWIDYKKAYDSVPHTWLLRVLELYKVDTTLCTFLKACMGQWSTALRYPGCRHIPDDGELIKIERGIFQGDSLSPLWFCLALNPLSTMLEDSGLGYCLRRGSQVISHLLYMDDLKLFAPNNRQLMELLKVTETFSTSIRMEFGVDKCAVMHVKKGEIVESEGIELSDSTKLRSLSVNDTYKYLGMSQALGVNESGMKQSLRERFFCRLKKVLKSLLSGGNKVRAYNDWVIPVLTYSFGILRWTQTELEALDRRVRILLTAYRMHHPRSSVMRLYIPRKFGGRGFLNIKTLHNREICNLREYFLKVNVDVHRDVVAVDRGLTPLALAKENWRKPAILSINDRKEVWKSKELHGRFHRALYGPDVDLKASVSWLRFGDLFGETEGFVCAITDEVVMTNNYRRYILKDGTVDICRACHRPGESLRHIISGCSRLANGEYLHRHNQVARIVHQQLALKYKLVDSEVPYYRYVPDPVLDDGRVTLYWDRSIITDRTIVANKPDIVVIDRLERRAIIIDVTIPHDENLVKAEKDKQIKYLDLAHEVVDMWNVDSAIIVPIVVSVHGLIAKSLDQHLKRLALDSWVKGLIQKAVILDTARIVRRFLSLEP

SEQ ID NO: 28163 - protein, 867 aa, Eilema sororculum
MRFVNRVFSGTGVSPSDYTSRVTERIDFLKQKVYAWANRIKRYKKRCDRYTLNRTFQRDERWVYRNWERADSVGDEHFPDVAATNTFWRNIWSVPVAHTEGDWVRKVKRSCEAIETMEPIIISEDDIACVVRSLPNWKAAGPDGLHNFWLKWLRSSHARLASQFQSALESGSLPSFMTTGITHLLYKSGCAMNPKNYRPITCLPTVYKLLTSVLRVKITSHITRNSILSYSQNGCRSGARGTKELLIIDTAVNQQVRRNRRDMATCWIDYKKAYDSVPHTWLLRVLELYKVDTTLCTFLKACMGQWSTALRYPGCRHIPDDGELIKIERGIFQGDSLSPLWFCLALNPLSTMLEDSGLGYCLRRGSQVISHLLYMDDLKLFAPNNRQLMELLKITETFSTSIRMEFGVDKCAVMHVKKGEIVESEGIELSDSTKLRSLSVNNTYKYLGMSQALGVNESGMKQSLRERFFCRLKKVLKSLLSGGNKVRAYNDWVIPVLTYSFGILRWTQTELEALDRRVRTLLTAYRMHHPRSSVMRLYIPRKFGGRGFLNIKTLHNREICKLREYFLKVNVDVHRDVVAVDRGLTPLALAKENWRKPAILSINDRKEVWKSKELHGRFHRALYGPDVDLKASVSWLRFGDLFGETEGFVCAITDEVVMTNNYRRYILKDGTVDICRACHRPGESLRHIISGCSRLANGEYLHRHNQVARIVHQQLALKYKLVDSEVPYYRYVPDPVLDDGRVTLYWDRSIITDRTIVANKPDIVVIDRLERRAIIIDVTIPHDENLVKAEKDKQIKYLDLAHEVVDMWNVDSAIIVPIVVSVHGLIAKSLDQHLKRLALDSWVKGLMQRAVILDTARIVRRFLSLEP

SEQ ID NO: 28164 - protein, 923 aa, Chilo suppressalis
MCALDSLLSNYIDSSEDLADTHSILYCAAVTACRVAHVKFPNTDIATRPRQAVPAWQCRIESRISEARVLIGKLSCFREGNTRPRVMRFVRRAFSGTGISPENYSSRVTERIDFLKQKICAWANRIRRYKLRVSRFTQNRMFERDQRCVYRSWERSNQSDIDMHRPDDEAMISFWRNIWSVPVTHSDGAWMRDVERSCELLPEMNDVTIDYEDVACAVRSLPNWKSPGPDGLHNFWFKWLSSSHVCLASQFQRALSSRSLPKFMTTGITHLLYKSGSTTDPKNYRPITCLPTIYKILTSILRSKISKHIDQNSIMFTSQNGCRNGARGTKELLLIDMAINQQVRRNRKTLSTSWIDYKKAYDSVPHSWLMRVLELYKINATLRAFLMSCMRQWRTVLFYPESRRTLGNGDPIKIERGIFQGDGLSPLWFCLALNPLSTLLESSGLGYRLRRNGQVISHLLYMDDLKLFAHSSSHLTALLKVTEDFSNAIRMEFGVDKCAIMHVKRGQVVESAGIQLSDSVHLRSLSVNETYKYLGMSQGLGINDADMKQSLRERFLGRLSKVLKSLLSGGNKVRAYNGWVMPLLMYSFGILKWTQTELDALDRTVRTLLTAHRMHHPRSSTMRLYIPRKCGGRGFLNAKTLHNRELNNLREYFLNVDMGIHRDVVAVDNGLTPLFLAKENWRRPVVLSTLDRSIVWQSKELHGRFYRALHGPDVDLLASVSWLRYGDLFGETEGFICAIMDEVVMTKNYRRFILKDGTLDVCRACHRPGESLRHIISGCSRLANGEYLHRHNQVARIIHQQLALKYNLLASEVPYYRYAPEQVLENSHATLYWDRSIITDRTIVANKPDIVLIDRHERRAVEQLGTIYIYIGSEAALSRNPEVESLKAAYNFASKACKKAYIRADAQRVARIGQELIPHPTLP

SEQ ID NO: 28165 - protein, 1109 aa, Myrinia binoculus
MRWTQSINENVMRAYYGATEGGTNLTAYRVRMLSLFQVLEPAVNVSAQRLSDQVRVILRNNRLSDTVLDRIRSEMCSSGVTPAPSQSVVQGPRPATPTGSNYNDVDVGDITTAVSKYSEELRSAMEVAIREYRTTPSELRPRLSRLPMNRRIRDLVGTMDSLLPNYFESSESLEDTHSILFCAAVAVCRVAGVRLGNTEQVTRPKPAVPAWQSRIEKRIDETRVLIGKLCCYKEGNTRPRVLRFVRRAFLGTGISPQEYPSHVVERIDFLKQKVYAWASRIRRYRRRVDRYHLNRKFQSDQRRVYRTWERLGQGVDDGHRPDDVATNTFWRNIWSVPVDHIEGDWMREVRQTCEPLEAMGEISIASEDVAAAVRSVPNWKSPGPDGLHSFWLKWLRSSHECLASQFQSALESGSLPQFLTTGITHLLHKTGSTTDPKNYRPITCLPTVYKLLTSILRDKINRHIHNNAIMSVSQNGCRGGSRGTKELLLIDMTISQQVRRSRKSLSTCWIDYKKAYDSVPHTWLLRVLELYKLDATLCAFLRSCMGQWRTVLRYPGCRTIRENEEPIRIERGIFQGDSLSPLWFCLALNPLSTLLESSGLGYRLRRGGKVISHLLYMDDLKLFAPSCSQLMELLKVTETFSNSIRMEFGVDKCAVMHVERGGIVESDGIQLSDSINFRSLSANESYKYLGMSEALGINGNDMKQSLRERFFGRLTKVLKSLLSGGNKVRAFNGWVMPVLVYSFGILKWTQSELDALDRKVRVLLTAYRMHHPRSSVMRLYIPRRCGGRGLLNAKTLHNREVYNLREYFLHTDLDMHRDVVAVDKGLTPLSLGKENWRKPVVLSTENRKEVWKSKELHGRFYRALNGPDVDFMASVSWLRFGNLFGETEGFVCAIMDEVIMTNNYRKYIVRDGTVDICRACHAPGESLRHIISGCSRLANGEYLHRHNQVAKIIHQQLALRYGLVESEVPYYRYVPDPVLENGHITLYWDRTIITDRTVVANKPDIVVIDRSERRTIIVDVTIPHDENLVKAEKDKQIKYLDLAHEVVDMWDVDTAVIVPIVVTANGLMAKSLDQHLKRLSLGSWVKGLMQKAVLLGTARIVRKFLSLEP

SEQ ID NO: 28166 - protein, 1096 aa, Eilema sororculum
MRAYFAATGGGANLTAYRDRMLILFQDLEPTVNVSAQRLSDQVRAIQRCHLLDSSVLERLRSDLQNNDIIPPPPQAVMQVVPQETQPVHTDCGLDNVASSVSTQYIDQIRNALECAVRDYRSMNYQIRPRLPRLPVHKRNIALVCALDSLLPSYLDNSEHLGDTHSILYCAAYAACRVAGVKFPEYNTATRPKSGKPRWQCRIERRIAETRALIGKLICFRSGNTRPRVMRFVNRVFSGTGVSPIDYTSRVTERIDFLKQKVYAWANRIKRYKKRCDRYTLNRTFQRDERWVYRNWERADYVGDEHLPDVATTNTFCRNIWSVPVAHTEGDWVRKIKRSCEAIETMEPVTISEDDIACVVRSLPNWKAAGPDGLHNFWLKWLRSSHARLAFQFQSALESGSLPSFMTTGITHLLYKSGCAMNPKNYRPITCLPTVYKLLTSVLRVKIASHITRNSILSYSQNGCRSGARGTKELLIIDTAVNQQVRRNRRDMATCWIDYKKAYDSVPHTWLLRVLELYKVDTTLCTFLKACMGQWSTALRYPGCRHIPDDGELIKIERGIFQGDSLSPLWFCLALNPLSTMLEDSGLGYCLQRGSQVISHLLYMDDLKLFAPNNRQLMELLKVTETFSTSIRMEFGVDKCAVMHVKKGEIVESEGIELSDFSKLRSLSVNDTYKYLGMSQALGVNESGMKQSLRERFFCRLKKVLKSLLSGGNKVRAYNDWVIPVLTYSFGILRWTQTELEALDRRVRTLLTAYRMHHPRSSVMRLYIPRKFGGRGFLNIKTLHNREICNLREYFLKVNVDVHRDVVAVDRGLTPLALAKENWRKPAILSINDRKEVWKSKELHGRFHRALYGPDVDLKASVSWLRFGDLFGETEGFVCAITDEVVMTNNYRRYILRDGTVDICRACHRPGESLRHIISGCCRLANGEYLHRHNQVARIVHQQLALKYKLVDSEVPYYRYVPDPVLDDGRVTLYWDRSIITDRTIVANKPDIVVIDRLERRAIIIDVTIPHDENLVKAEKDKQIKYLDLAHEVVDMWNVNSAIIVPIVVSVHGLIAKSLDQHLKRLALDSWVKGLMQKAVLLDTARIVRRFLSLEP

SEQ ID NO: 28167 - protein, 962 aa, Chilo suppressalis
MHKKNRALMCALDSLLSNYIDSSEDLADTHSILYCAAVTACRVAHVKFPNTDIATRVRQAVPAWQCRIESRISEARVLIGKLSCFREGNTRPRVMRFVRRAFSGTGISPENYSSRVTERIDFLKQKICAWANRIRRYKLRVSRFTQNRMFERDQRCVYRSWERSNQSDIDMHRPDDEAMISFWRNIWSVPVTHSDGAWMRDVERSCELLPEMNDVTIDYEDVACAVRSLPNWKSPGPDGLHNFWFKWLSSSHVCLASQFQRALSSRSLPEFMTTGITHLLYKSGSTTDPKNYRPITCLPTIYKILTSILRSKISKHIDQNSIMFTSQNGCRNGARGTKELLLIDMAINQQVRRNRKTLSTSWIDYKKAYDSVPHSWLMRVLELYKINATLRAFLMSCMRQWRTVLFYPESRRTLGNGDPIKIERGIFQGDGLSPLWFCLALNPLSTLLESSGLGYRLRRNGQVISHLLYMDDLKLFAHSSSHLTALLKVTEDFSNAIRMEFGVDKCAIMHVKRGQVVESAGIQLSDSVHLRSLSVNETYKYLGMSQGLGINDADMKQSLRERFLGRLSKVLKSLLSGGNKVRAYNGWVMPLLMYSFGILKWTQTELDALDRTVRTLLTAHRMHHPRSSTMRLYIPRKCGGRGFLNAKTLHNREINNLREYFLNVDMGIHRDVVAVDNGLTPLFLAKENWRRPVVLSTLDRSIVWQSKELHGRFYRALHGPDVDLSASVSWLRYGDLFGETEGFICAIMDEVVMTNNYRRFILKDGTLDVCRACHRPGESLRHIISGCSRLANGEYLHRHNQVARIIHQQLALKYNLLASEVPYYRYAPEQVLENSHATLYWDRSIITDRTIVANKPDIVLIDRHERRAVVVDVAVPHDDNLVKAEKDKENKYLDLAREIVDMWDIDSAIVVPIIISAHGLIAKSLDKHLKRLALGGWVKSQMQKAVLLDTARIVRRFLSLDP

SEQ ID NO: 28168 - protein, 1197 aa, Eilema sororculum
MLTRAKAKQATNYAQPTPSDSSCSSASQPPESTSPRPATVEASSSDEYFSPPTSPTPVRRPGRGRPPSSLGSRGPPASNRAPAAGGNVRRMRWTSSMNENVMRAYFAATGGGTNLTAYRDRMLILFQDLEPTVNVSAQRLSDQVRAIQRCHLLDSSVLERLRSDLQNNDIIPPLPQAVMQEVPQETQPVHTDCELDNIATSVSTQYIDQIRNALECAVRDYRSMNYQIRPRLPRLPVHKRNIALVCALDSLLPNYLDNSEHLGDTHSILYCAAYAACRVAGVKFPECNTAIRPKSGKPRWQCRIERRIAETRALIGKLICFRSGNTRPRVMRFVNRVFSGTGVSPSDYTSRVTERIDFLKQKVYAWANRIKRYKKRCDRYTLNRTFQRDERWVYRNWERADSVGDEHFPDVAATNTFWRNIWSVPVAHTEGDWVRKVKRSCEAIETMEPIIISEDDIACVVRSLPNWKAAGPDGLHNFWLKWLRSSHARLASQFQSALESGSLPGFMTTGITHLLYKSGCAMNPKNYRPITCLPTVYKLLTSVLRVKITSHITRNSILSYSQNGCRSGARGTKELLIIDTAVNQQVRRNRRDVATCWIDYKKAYDSVPHTWLLRVLELYKVDTTLCTFLKACMGQWSTALRYPGCRHIPDDGELIKIERGIFQGDSLSPLWFCLALNPLSTMLEDSGLGYCLRRGSQVISHLLYMDALKLFAPNNRQLMELLKITETFSTSIRMEFGLDKCAVMHVKKGEIVESEGIELSDSTKLRSLSVNNTYKYLGMSQALGVNESGMKQSLRERFFYRLKKVLKSLLSGGNKVRAYNDWVIPVLTYSFGILRWTQTELEALDRRVRTLLTAYRMHHPRSSVMRLYIPRKFGGRGFLNIKTLHNREICNLREYFLKVNVDVHRDVVAVDRGLTPLALAKENWRKPAILSINDRKEVWKSKELHGRFHRALYGPDVDLKASVSWLRFGDLFGETEGFVCAITDEVVMTNNYRRYILKDGTVDICRACHRPGESLRHIISGCSRLANGEYLHRHNQVARIVHQQLALKYKLVDSEVPYYRYVPDPVLDDGRVTLYRDRSIITDRTIVANKPDIVVIDRLERRAIIIDVTIPHDENLVKAEKDKQIKYLDLAHEVVDMWNVDSAIIVPIVVSVHGLIAKSLDQHLKRLALDSWVKGLMQKAVILDTARIVRRFLSLEP

SEQ ID NO: 28169 - protein, 867 aa, Eilema sororculum
MRFVNRVFSGTGVSPFDYTSRVTERIDFLKQKVYAWANRIKRYKKRCDRYTLNRTFQRDERWVYRNWERADSVGDEHFPDVAATNTFWRNIWSVPVAHTEGDWVRKVKRSCEAIETMEPIIISEDDIACVVRSLPNWKAAGPDGLHNFWLKWLRSSHARLASQFQSALESGSLPSFMTTGITHLLYKSGCAMNPKNYRPITCLPTVYKLLTSVLRVKITSHITTNSILSYSQNGCRSGARGTKELLIIDTAVNQQVRRNRRDMATCWIDYKKAYDSVPHTWLLRVLELYKVDTTLCTFLKACMGQWSTALRYPGCRHIPDDGELIKIERGIFQGDSLSPLWFCLALNPLSTMLEDSGLGYCLRRGSQVISHLLYMDDLKLFAPNNRQLMELLKVTETFSTSIRMEFGVDKCAVMHVKKGEIVESEGIELSDSTKLRSLSVNDTYKYLGMSQALGVNESGMKQSLRERFFCRLKKVLKSLLSGGNKVRAYNDWVIPVLTYSFGILRWTQTELEALDRRVRTLLTAYRMHHPRSSVMRLYIPRKFGGRGFLNIKTLHNREICNLREYFLKVNVDVHRDVVAVDRGLTPLALAKENWRKPAILSINDRKEVWKSKELHGRFHRALYGPDVDLKASVSWLRFGDLFGETEGFVCAITDEVVMTNNYRRYILKDGTVDICRACHRPGESLRHIISGCSRLANGEYLHRHNQVARIVHQQLALKYKLVDSEVPYYRYVPDPVLDDGRVTLYWDRSIITDRTIVANKPDIVVIDRLERRAIIIDVTIPHDENLVKAEKDKQIKYLDLAHEVVDMWNVDSAIIVPIVVSVHGLIAKSLDQHLKRLALDSWVKGLMQKAVILDTARIVRRFLSLEP

SEQ ID NO: 28170 - protein, 1197 aa, Eilema sororculum
MLTRAKAKQATNYAQPTPSDSSCSSASQPPESTSPRPATVEASSSDEYFSPPTSPTPVRRPGRGRPPSSLGSRGPPASNRAPATGGNVHRMRWTSSMNENVMRAYFAATGGGTNLTAYRDRMLILFQDLEPTVNVSAQRLSDQVRAIQRCHLLDSSVLERLRSDLQNNDIIPPLPQAVMQEVPQETQPVHTDCELDNIATSVSTQYIDQIRNALECAVRDYRSMNYQIRPRLPRLPVHKRNIALVCALDSLLPNYLDNSEHLGDTHSILYCAAYAACRVAGVKFPECNTAIRPKSGKPRWQCRIERRIAETRALIGKLICFRSGNTRPRVMRFVNRVFSGTGVSPSDYTSRVTERIDFLKQKVYAWANRIKRYKKRCDRYTLNRTFQRDERWVYRNWERADSVGDEHFPDVAATNTFWRNIWSVPVAHTEGDWVRKVKRSCEAIETMEPVIISEDDIACVVRSLPNWKAAGPDGLHNFWLKWLRSSHARLASQFQSALESGSLPSFMTTGITHLLYKSGCAMNPKNYRPITCLPTVYKLLTSVLRVKITSHITRNSILSYSQNGCRSGARGTKELLIIDTAVNQQVHRNRRDMATCWIDYKKAYDSVPHTWLLRVLELYKVDTTLCTFLKACMGQWSTALRYPGCRHIPDDGELIKIERGIFQGDSLSPLWFCLALNPLSTMLEDSGLGYCLRRGSQVISHLLYMDDLKLFAPNNRQLMELLKITETFSTSIRMEFGVDKCAVMHVKKGEIVESEGIELSDSTKLRSLSVNNTYKYLGMSQALGVNESGMRQSLRERFFCRLKKVLKSFLSGGNKVRAYNDWVIPVLTYSFGILRWTQTELEALDRRVRTLLTAYRMHHPRSSVMRLYIPRKFGGRGFLNIKTLHNREICNLREYFLKVNVDVHRDVVAVDRGLTPLALGKENWRKPVILSINDRKEVWKSKELHGRFHRALYGPDVDLKASVSWLRFGDLFGETEGFVCAITDEVVMTNNYRRYILKDGTVDICRACHRPGESLRHIISGCSRLANGEYLHRHNQVARIVHQQLALKYKLVDSEVPYYRYVPDPVLDDGRVTLYWDRSIITDRTIVANKPDIVVIDRLERRAIIIDVTIPHDENLVKAEKDKQIKYLDLAHEVVDMWNVDSAIIVPIVVSVHGLIAKSLDQHLKRLALDSWVKGLMQKAVLLDTARIVRRFLSLEP

SEQ ID NO: 28171 - protein, 1075 aa, Eilema sororculum
MNKGDNNKPTVNVSAQRLSDQVRAIQRCHLLDSSVLERLRSDLQNNDIIPPPPQAVMQEVPQETQPVHTDCELDNIATSVSTQYIDQIRNALECAVRDYRSMNYQFRPRLPRLPVHKRNIALVCALDSLLPNYLDNSEHLGDTHSILYCAAYAACRVAGVKFPECNTAIRPKSGKPRWQCRIERRIAETRALIGKLICFRSGNTRPRVMRFVNRVFSGTGVNPFDYTSRVTERIDFLKQKVYAWANRIKRYKKRCDRYTLNRTFQRDERWVYRNWERADSVGDEHFPDIAATNTFWRNIWSVPVAHTEGDWVRKVRRSCEAIETMEPIIISEDDIACVVRSLPNWKAAGPDGLHNFWLKWLRSSHARLASQFQSALESGSLPSFMTTGITHLLYKSGCAMNPKNYRPITCLPTVYKLLTSVLRVKITSHITRNSILSYSQNGCRSGARGTKELLIIDTAVNQQVRRNRRDMATCWIDYKKAYDSVPHTWLLRVLELYKVDTTLCTFLKACMGQWSTALRYPGCRHIPDDGELIKIERGIFQGDSLSPLWFCLALNPLSTMLEDSGLGYCLRRGSQVISHLLYMDDLKLFAPNNRQLMELLKITETFSTSIRMEFGVDKCAVMHVKKGEIVESEGIELSDSTKLRSLSVNDTYKYLGMSQALGVNESGMKQSLRERFFCRLKKVLQSLLSGGNKVRAYNDWVIPVLTYSFGILRWTQTELEAQDRRVRTLLTAYRMHHPRSSVMRLYIPRKFGGRGFLNIKTLHNREICNLREYFLKVNVDVHRDVVVVDRGLTPLALAKENWRKPAILSINDRKEVWKSKELHGRFHRALYGPDVDLKASVSWLRFGDLFGETEGFVCAITDEVVMTNNYRRYILKDGTVDICRACHRPGESLRHIISGCSRLANGGYLHRHNQVARIVHQQLALKYKLVDSEVPYYRYVPDPVLDDGRVTLYWDRSIITDRTIVANKPDIVVIDRLERRAIIIDVTIPHDENLVKAEKDKQIKYLDLAHEVVDMWNVDSAIIVPIVVSVHGLIAKSLDQHLKRLALDSWVKGLMQKAVILDTARIVRRFLSLEP

SEQ ID NO: 28172 - protein, 1107 aa, Eilema sororculum
MRWTSSMNENVMRAYFAATGGGTNLTAYRDRMLILFQDLEPTVNVSAQRLSDQVRAIQRCHLLDSSVLERLRSDLQNDDIIPPLPQAVMQEVPQETQPVHTDCELDNIATSVSTQYIDQIRNALKCAVRDYRSMNYQIRPRLPRLPVHKRNIALVCALDSLLPNYLDNSEHLGDTHSILYCAAYAACRVAGVKFPECNTAIRPKSGKPRWQCRIERRIAETRALIGKLICFRSCNTRPRVMRFVNRVFSGTGVSPFDYTSRVTERIDFLKQKVYAWANRIKRYKKRCDRYTLNRTFQRDERWVYRNWERADSVGDEHFPDVAATNTFWRNIWSVPVAHTEGDWVRKVKRSCEAIETMEPIIISEDDIACVVRSLPNWKAAGPDGLHSFWLKWLRSSHARLASQFQSALESGSLPSFMTTGITHLLYKSGCAMNPKNYRPITCLPTVYKLLTSVLRVKITSHITRNSILSYSQNGCRSGARGTKELLIIDTAVNQHVRRNRRDMATCWIDYKKAYDSVPHTWPLRVLELYKVDTTLCTFLKACMGQWSTALRYPGCRHIPDDGELIKIERGIFQGDSLSPLWFCLALNPLSTMLEDSGLGYCLRRGSQVISHLLYMDDLKLFAPNNRQLMELLKITETFSTSIRMEFGVDKCAVMHVKKGEIVESEGIELSDCTKLRSLSVNDTYKYLGMSQALGVNESGMKQSLRERFFCRLKKVLKSLLSGGNKVRAYNDWVIPVLTYSFGILRWTQTELEAMDRRVRTLLTAYRMHHPRSSVMRLYIPRKFGGRGFLNIKTLHNREICNLREYFLKVNVDVHRDVVAVDRGLTPLALAKENWRKPAILSINDRKEVWKSKELHGRFHRALYGPDVDLKASVSWLRFGDLFGETEGFVCAITDEVVMTNNYRRYILKDGTVDICRACHRPGESLRHIISGCSRLANGEYLHRHNQVARIVHQQLALKYKLVDSEVPYYRYVPDPVLDDGRVTLYWDRSIITDRTIVANKPDIVVIDRLERRAIIIDVTIPHDENLVKAEKDKQIKYLDLAHEVVDMWNVDSAIIVPIVVSVHGLIAKSLDQHLKRLALDSWVKGLMQKAVILDTARIVRRFLSLEP

SEQ ID NO: 28173 - protein, 1197 aa, Eilema sororculum
MLTRAKAKQTTNYAQPTPSDSSCSSASQPAESTSPRPATVEASSSDEYFSPPTSPTPVRRPGRGRPPSSLGSRGPPTSNRAPAAGGNVRRMRWTSSINENVMRAYFAATGGGANLTAYRDRMLILFQDLEPTVNVSAQRLSDQVRAIQRCHLLDSSVLERLRSDLQNNAIIPPPPQTVMQVVPQETQPVHTDCGLDNVASSVSTQYIDQIRNALECAVRDYRSMNYQIRPRLPRLPVHKRNIALVCALDSLLPSYLDNSEHLGDTHSILYCAAYAACRVADVKFPEYNTATRPKSGKPRWQCRIERRIAETRALIGKLICFRSGNTRPRVMRFVNRVFSGTGVSPFDYTSRVTERIDFLKQKVYAWANRIKRYKKRCDRYTLNRTFQRDERWVYRNWERADSVGDEHFPDVAATNTFWRNIWSVPVAHTEGDWVRKVKRSCEAIETMEPIIISEDDIACVVRSLPNWKAAGPDGLHNFWLKWLRSSHARLASQFQSALESGSLPSFMTTGITHLLYKSGCAMNPKNYRPITCLPTVYKLLTSVLRVKITSHITTNSILSYSQNGCRSGARGTKELLIIDTAVNQQVRRNRRDMATCWIDYKKAYDSVPHTWLLRVLELYKVDTTLCTFLKACMGQWSTALRYPGCRHIPDDGELIKIERGIFQGDSLSPLWFCLALNPLSTMLEDSGLGYCLRRGSQVISHLLYMDDLKLFAPNNRQLMELLKVTETFSTSIRMEFGVDKCAVMHVKKGEIVESEGIELSDSTKLRSLSVNDTYKYLGMSQALGVNESGMKQSLRERFFCRLKKVLKSLLSGGNKVRAYNDWVIPVLTYSFGILRWTQTELEALDRRVRTLLTAYRMHHPRSSVMRLYIPRKFGGRGFLNIKTLHNREICNLREYFLKVNVDVHRDVVAVDRGLTPLALAKENWRKPAILSINDRKEVWKSKELHGRFHRALYGPDVDLKASVSWLRFGDLFGETEGFVCAITDEVVMTNNYRRYILKDGTVDICRACHRPGESLRHIISGCSRLANGEYLHRHNQVARIVHQQLALKYKLVDSEVPYYRYVPDPVLDDGRVTLYWDRSIITDRTIVANKPDIVVIDRLERRAIIIDVTIPHDENLVKAEKDKQIKYLDLAHEVVDMWNVDSAIIVPIVVSVHGLIAKSLDQHLKRLALDSWVKGLMQKAVILDTARIVRRFLSLEP

SEQ ID NO: 28174 - protein, 868 aa, Calephelis perditalis
MRFVRRVFLGTGISPQEYPSHVVERIDFLKQKVYAWANRIRRYRQRVDRYNLNRMFQSDQRWVYRTWERLDQVVTDERRPDDDATNTFWRNIWSVPVDHMEGDWMREVEQACDSLEVMGKISITSEDVAHAVRSVSNWKSPGPDGLHSFWLKWLRSSHACLASQFQSALESGSLPQFLTTGITHLLHKTGSTTDPKNYRPITCLPTVYKLLTSILRDKIDSHINNNAIMSVFQNGCKGGSRGTKELLLIDMTISQQVRRCRKSLSTCWIDYKKAYDSVPHTWLLRVLELYKIDTTLCSFLSSCMRQWRTVLRYPGCRTICETDEPIRIRRGIFQGDSLSPLWFCLALNPLSTLLESSRLGYRLRRGSKVISHLLYMDDLKLFAPSDSQLMELLKITETFSNSIRMEFGVDKCAVMHVKRGLIVESEGIQLSDSITFRSLSANETYKYLGMSEALGINVTDMKQSLRERFFGRLTKVLKSLLSGGNKVRAFNGWVMPVLVYSFGILKWTQNELDALDRKVRVLLTAYRMHHPRSSVMRLYISRRCGGRGFLNAKTLHNREVYNLREYFLHTDLDMHRDVVAVDKGLTPLSLAKENWRKPVVLSTDNRKEIWKSKELHGRYYRALHGPEVDLMASVSWLRFGNLFGETEGFVCAIMDEVIMTNNYRKYIVKDGTVDICRACHSPGESLRHITSGCSRLANGEYLYRHNQVAKIIHQQLALRYGLVESEVPYYRYVPDPVLENGRVTLYWDRSIITDRTIVANKPDIVVIDRSERRTTIVDITVPHDENLVKAEKDKQIKYLDLAHEVVDMWDVDSAVVVPIVITANGLMAKSLDQHLKRLSLGSWVKGLMQKAVLLSTARIVRKFLSLGP

SEQ ID NO: 28175 - protein, 1197 aa, Eilema sororculum
MLTRAKAKLIINYAQPTPSDSSCSSASQPPESTSPRPATVEASSSDEYFSPPTSPTPVRRPGRGRPPSSLGSRGPPASNRAPATGGNVRRMRWTSSINENVMRAYFAATGGGANLTAYRDRMLILFQDLEPTVNVSAQRLSDQVRAIQRCHLLDSSVLERLRSDLQNNDITPSPPQAVMQVVPQETQPVQTDCELDNVATSVSTQYIEQIRNALECAVRDYRSMNYQIRPRLPRLPVHKRNIALVCALDSLLPNYLDNCEHLGDTHSILYCAAYAACRVAGVKFPECNTAIRPKSGKPRWQCRIERRIAETRALIGKLICFRSGNTRPRVMRFVNRVFSGTGVSPFDYTSRVTERIDFLKQKVYAWANRIKRYKKRCDRYTLNRTFQRDERWVYRNWERADSVGDELFPDVAATNTFWRNIWSVPVAHTEGDWVRKVKRSCEAIETMEPVIISEDDIACVVRSLPNWKAAGPDGLHNFWLKWLRSSHARLAFQFQSALESGSLPSFMTTGITHLLFKSGCAMNPKNYRPITCLPTVYKLLTSVLRVKIASHITRNSILSYSQNGCRSGARGTKELLIIDTAVNQQVRRNRRDMATCWIDYKKAYDSVPHTWLLRVLELYKVDTTLCTFLEACMGQWSTALRYPGCRHIPDDGELINIERGIFQGDSLSPLWFCLALNPLSTILEDSGLGYCLRRGSQVISHLLYMDDLKLFAPNNRQLMELLKVTQTFSTSIRMEFGVDKCAVMHVKKGEIVESEGIELSDSTKLRSLSVNDTYKYLGMSQALGVNESDMRQSLRERFFCRLKKVLKSLLSGGNKVRAYNDWVIPVLTYSFGILRWTQTELEALDRRVRTLLTAYRMHHPRSSVIWLYIPRKFGGRGFLNIKTLHNREICNLREYFLKVNVDVHRDVVAVDRGLTPLALAKENWRKPAILSINDRKEVWKSKELHGRFHRALYGPDVDLKASVSWLRFGDLFGETEGFVCAITDEVVMTNNYRRFILKDGTVDICRACHRPGESLRHIISGCSRLANGEYLHRHNQVARIVHQQLALKYKLVDSEVPYYRYVPDPVLDDGRVTLYWDRSVITDRTIVANKPDIVVIDRLERRAIIIDVTIPHDENLVKAEKDKQIKYLDLAHEVVDMWNVDSAIIVPIVVSVHGLIAKSLDQHLKRLALDSWVKGLMQKAVLLDTARIVRRFLSLEP

SEQ ID NO: 28176 - protein, 1199 aa, Hypena proboscidalis
MITRARAREVATAHPSSSDPSLSSASQPPTPATATSGNAETSSSSSDEYFSPLTSPLPVRRRGRPRLPTCLGPRSPPASNRAPAVGGSVQRMRWTQSMNESVMRAYYGATEGGTNLTVYRSRMLALFQALEPGTNVTAQRLSDQVRVILRNKMLDDAALDRLRSECSQTNHNTLTLSQVTQQVPQVNLLVNYNSAEDIMVTSVSTGSNEEVRDALECAIREYRFTSHDIRPRLPRLPMHRKNIALVSALDSLLYNYLESSENLGDTHSILYCTAIAACRMAGVRFLSNSSATRPKPAVPAWQCRIERRIAEARVLIGKLYCFRTGNTRPRVMRYVDQAFSGTGIDPREYSHRVTERIDFLKQKVYAWSNRVRRYKKRVSRYSINRAFQRDQRGLYRAWDRPEQGVGGGGLPDDTATNNFWRSIWSSPVNHTEGDWIRHVEIACSEILEMEGVVILAEDVACAVRPLSNWKSPGLDGLHNFWLKWLRSSHALLACQFQSAIDSGSLPDFMTKGITHLLHKTGSTTDPSNYRPITCLASIYKLLTSILAGKITKHLEINSIMSAAQNGCRKGSRGTKEHLLIDMAISQQVRRNRKDLATAWIDYKKAYDSVPHTWLLRVLELYKVNTNLCTFLRVCMGQWRTTLCYPGRRQIQEGDELIRIERGIFQGDSLSPLWFCLALNPLSTLLESSGLGYRLRRGGQVVSHLLYMDDLKLFAGTESRLMELLKITESFSSSIGMEFGVDKCAVMQVKRGRMEESEGIQLSDSIHLRSLLVTNTYKYLGMSQALGINEDGMKQSLQARFFGRLKKVLNSLLSGSNKVRAFNGWVMPLLLYSFGILKWSQTELDALDRKVRLQLTAFRMHHPRSSVMRLYIPRKCGGRGFLNAKTLHNREVNNLREYFLRMGERMHRDVVAVDKGLTPLSLAKENWRRPEVLSTDDRRAVWQGKELHGRFYRALHGSDVDLLPSVAWLRFGDLCGETEGFVCAIADEVIKTNNYRRYIMRDGTVDICRACHRPGESLRHIISGCSRLANGEYLHRHNLVARIIHQQLALKYRLVDTEVPYYRYVPEPVLENGHVILYWDRSIITDRTIIANRPDIVVVDRSERLAIIVDITIPHDENLVKAEKDKQIKYLDLAHEIVDMWEVDSAIIVPIVVSVNGLIAKSLDKHLKRLALGGWIKGLMQKAVLLDTARIVRRFLSMEP

SEQ ID NO: 28177 - protein, 1195 aa, Eilema sororculum
MLTRAKAKQATNYAQPTPSDSSCSSASQPPESTSPRPATVEASSSDEYFSPPTSPTPVRRPGRGRPPSSLGSRTWGRRAPATGGNVRRMRWTSSMNENVMRAYFAATGGGTNLTAYRDRMLILFQDLEPTVNVSAQRLSDQVRAIQRCHLLDSSVLERLRSDLQNNDIIPPLPQAVVQEVPQETQPVHTDCELDNIATSVSTQYIDQIRNALECAVRDYRSMNYQIRPRLPRLPVHKRNIALVCALDSLLPNYLDNSEHLGDTHSILYCAAYAACRVAGVKFPECNTAIRPKSGKPRWQCRIERRIAETRALIGKLICFRSGNTRPRVMRFVNRVFSGTGVSPSDYTSRVTERIDFLKQKVYAWANRIKRYKKRCDRYTLNRTFQRDERWVYRNWERADSVGDEHFPDVAATNTFWRNIWSVPVAHTEGDWVRKVKRSCEAIETMEPIIISEDDIACVVRSLPNWKAAGPDGLHNFWLKWLRSSHARLASQFQSALESGSLPSFMTTGITHLLYKSGCAMNPKNYRPITCLPTVYKLLTSVLRVKITSHITRNSILSYSQNGCRSGARGTKELLIIDTAVNQQVRRNRRDMATCWIDYKKAYDSVPHTWLLRVLELYKVDTTLCTFLKACMGQWSTALRYPGCRHIPDDGELIKIERGIFQGDSLSPLWFCLALNPLSTMLEDSGLGYCLRRGSQVISHLLYMDDLKLFAPNNRQLMELLKITETFSTSIRMEFGVDKCAVMHVKKGEIVESEGIELSDSTKLRSLSVNNTYKYLGMSQALGVNESGMKQSLRERFFYRLKKVLKSLLSGGNKVRAYNDWVIPVLTYSFGILRWTQTELEALDRRVRTLLTAYRMHHPRSSVMRLYIPRKFGGRGFLNIKTLHNREICNLREYFLKVNVDVHRDVVAVDRGLTPLALAKENWRKPAILSINDRKEVWKSKELHGRFHRALYGPDVDLKASVSWLRFGDLFGETEGFVCAITDEVVMTNNYRRYILKDGTFDICRACHRPGESLRHIISGCSRLANGEYLHRHNQVARIVHQQLALKYKLVDSEVPYYRYVPDPVLDDGRVTLYWDRSIITDRTIVANKPDIVVIDRLERRAIIIDVTIPHDENLVKAEKDKQIKYLDLAHEVVDMWNVDSAIIVPIVVSVHGLIAKSLDQHLKRLALDSWVKGLMQKAVILDTARIVRRFLSLEP

SEQ ID NO: 28178 - protein, 974 aa, Eilema sororculum
MNYQIRPRLPRLPVHKRNIALVCALDSLLPNYLDNSEHLGDTHSILYCAAYAAYRVAGVKFPECNTAIRPKSGKPRWQCRIERRIAETRALIGKLICFRSGNTRPRVMRFVNRVFSGTGVSPSDYTSRVTERIDFLKQKVYAWANRIKRYKKRCDRYTLNRTFQRDERWVYRNWERADSVGDEHFPDVAATNTFWRNIWSVPVAHTEGDWVREVKRSCEAIETMEPIIISEDDIACVVRSLPNWKAAGPDGLHNFWLKWLRSSHARLASQFQSALGSGSLPSFMTTGITHLLYKSGCAMNPKNYRPITCLPTVYKLLTSVLRVKITSHITRNSILSYSQNGCRSGARGTKELLIIDTAVNQQVRRNRRDMATCWIDYKKAYDSVPHTWLLRVLELYKVDTTLCTFLKACMGQWSTALRYPGCRHIPDDGELIKIERGIFQGDSLSPLWFCLALNPLSTMLKDSGLGYCLRRGSQVISHLLYMDDLKLFAPNNRQLMELLKITETFSTSIRMEFGVDKCAVMHVKKGEIVESEGIELSDSTKLRSLSVNNTYKYLGMSQALGVNESGMKQSLRERFFCRLKKVLKSLLSGGNKVRAYNDWVIPVLTYSFGILRWTQTELEALDRRVRTLLTAYRMHHPRSSVMRLYIPRKFGGRGFLNIKTLHNREICNLREYFLKVNVDVHRDVVAVDRGLTPLALAKENWRKPAILSINDRKEVWKSKELHGRFHRALYGPDVDLKASVSWLRFGDLFGETEGFVCAITDEVVMTNNYRRYILKDGTVDICRACHRPGESLRHIISGCSRLANGEYLHRHNQVARIVHQQLALKYKLVDSEVPYYRYVPDPVLDDGRVTLYWDRSIITDRTIVANKPDIVVIDRLERRAIIIDVTIPHDENLVKAEKDKQIKYLDLAHEVVDMWNVDSAIIVPIVVSVHGLIAKSLDQHLKRLALDSWVKGLMQKAVILDTARIVRRFLSLEP

SEQ ID NO: 28179 - protein, 868 aa, Oechydrus chersis
MRFVGRAFLGTGISPQEYPSHVVERIDFLKQKVYAWASRIRRYRRRVDRYYLNRKFQSDQRWVYRTWERLDQDVDDGRRPDDDATNTFWRNIWSVPVDHIEGDWMREVRQACEPLEAMGEISIASEDVAAAVRSIPNWKAPGPDGLHNYWLKWLRSSHGCLASQFQSALESGSLPQFLTTGITHLLHKTGSTTDPKNYRPITCLPTVYKLLTSILKDKIDRHIHNNAIMSVSQNGCRGGSRGTKELLLIDMTISQQVRRSRKSLSTCWIDYKKAYDSVPHTWLLRVLELYKLDTTLCSFLRSCMGQWRTVLRYPGCRTIRENEEPIRIERGIFQGDSLSPLWFCLALNPLSTLLESSGLGYRLRRGGKVISHLLYMDDLKLFAPSCSQLMELLKVTETFSNSIRMEFGVDKCAVMHVERGGIVESDGIQLSDSINFRSLSANESYKYLGMSEALGINGNDMKQSLRERFFGRLTKVLKSLLSGGNKVRAFNAWVMPVLVYSFGILKWTQSELDALDRKVRVLLTAYRMHHPRSSVMRLYIPRRCGGRGFLNAKTLHNCEVYKLREYFLHTDLDMHRDVVATDKGLTPLSLGKENWRKPVVLSTENRKEVWKSKELHGRFYRALHGPDVDFMASVSWLRFGNLFGETEGFVCAIMDEVIMTNNYRKYIVRDGTVDICRACHTPGESLRHIISGCSRLANGEYLHRHNQVAKIIHQQLALRYGLVESEVPYYRYVPDPVLENGRVTLYWDRSIITDRTVVANKPDIVVIDRSERRTIIVDVTIPHDENLVKAEKDKQIKYLDLAHEVVDMWDVDTAVIVPIVVTANGLMAKSLDQHLKRLSLGSWVKGLMQKAVLLGTARIVRKFLSLEP

SEQ ID NO: 28180 - protein, 962 aa, Nicephellus nicephorus
MNKRNGDLVCALDSLLENYFESSENLVDTHSILFCAAVAACRVAGVKFEDADRATRPKPAIPAWQRRIEKRIDETRVLIGKLCCFKEGNTRPRVMRSVRRAFLGTGIGLQEYPSHVVERIDFLKQKVYAWASRIRRYRRRVERYNLNRKFQSDQRWVYRTWERLDQGVSDGRRPDDDATNTFWRNIWSVPVDHMEGDWMRDVEQACEPLEAMEKISIASEDVANAVRSVSNWKSPGPDGLHNFWLKWLRSSHECLASQFQSALESGSLPQFLTTGITHLLHKTGSTTDPKNYRPITCLPTVYKLLTSILRDKINRHIHNNAIMSVSQNGCRGGSRGTKELLLIDMTISQQVRRSRKSLSTCWIDYKKAYDSVPHTWLLRVLELYKLDTTLCSFLRSCMRQWRTVLRYPGCRTIRENEEPIRIERGIFQGDSLSPLWFCLALNPLSTLLESSGLGYRLRRGGKVISHLLYMDDLKLFAPSRSQLMALLKVTETFSNSIRMEFGVDKCAVMHVERGGIVESDGIQLSDSINFRSLSANESYKYLGMSEALGINGNDMKQSLRERFFGRLTKVLKSLLSGGNKVRAFNGWVMPVLVYSFGILKWTQNELDALDRRVRVLLTAYRMHHPRSSVMRLYIPRRCGGRGFLNAKTLHNREVYKLREYFLHTDLDMHRDVVATDKGLTPLSLGKENWRKPVVLSADNRKEVWKSKELHGRFYRALHGPDVDFMASVSWLRFGNLFGETEGFVCAIMDEVIMTNNYRKYIVKDGTVDICRACHSPGESLRHVISGCSRLANGEYLHRHNQVAKIIHQQLALRYGLVESEVPYYMYVPDPVLENGRVTLYWDRSIITDRTVVANKPDIVVIDRSERRTIIVDVTIPHDENLVKAEKDKQIKYLDLAHEVVDMWDVDTAVIVPIVVTANGLMAKSLDQHLKRLSLGSWIKGLMQKAVLLGTARIVRKFLSLEP

SEQ ID NO: 28181 - protein, 1075 aa, Eilema sororculum
MLTRAKAKLIINYAQPTPSDSSCSSASQPPESTSPRPATVEASSSDEYFSPPTSPTPVRRPGRGRPPSSLGSRGPPASNRAPATGGNVRRMRWTSSINENVMRAYFAATGGGANLTAYRDRMLILFQDLEPTVNVSAQRLSDQVRAIQRCHLLDSSVLERLRSDLQNNDITPSPPQAVMQVVPQETQPVQTDCELDNVATSVSTQYIEQIRNALECAVRDYRSMNYQIRPRLPRLPVHKRNIALVCALDSQLPNYLDNCEHLGDTHSILYCAAYAACRVAGVKFPECNTAIRPKSGKPRWQCRIERRIAETRALIGKLICFRSGNTRPRVMRFVNRVFSGTGVSPFDYTSRVTERIDFLKQKVYAWANRIKRYKKRCDRYTLNRTFQRDERWVYRNWERADSVGDEHFPDVAATNTFWRNIWSVPVAHTEGDWVRKVKRSCEAIETMEPVIISEDDIACVVRSLPNWKAAGPDGLHNFWLKWLRSSHARLAFQFQSALESGSLPSFMTTGITHLLFKSGCAMNPKNYRPITCLPTVYKLLTSVLRVKIASHITRNSILSYSQNGCRSGARGTKELLIIDTAVNQQVRRNRRDMATCWIDYKKAYDSVPHTWLLRVLELYKVDTTLCTFLEACMGQWSTALRYPGCRHIPDDGELIKIERGIFQGDSLSPLWFCLALNPLSTILEDSGLGYCLRRGSQVISHLLYMDDLKLFAPNNRQLMELLKVTETFSTSIRMEFGVDKCAVMHVKKGEIVESEGIELSDSTKLRSLSVNDTYKYLGMSQALGVNESDMRQSLRERFFCRLKKVLKSLLSGGNKVRAYNDWVIPVLTYSFGILRWTQTELEALDRRVRTLLTAYRMHHPRSSVMRLYIPRKFGGRGFLNIKTLHNREICNLREYFLKVNVDVHRDVVAVDRGLTPLALAKENWRKPAILSINDRKEVWKSKELHGRFHRALYGPDVDLKASVSWLRFGDLFGETEGFVCAITDEVVMTNNYRRFILKDGTVDICRACHRPGESLRHIISGCSRLANGEYLHRHNQVARIVHQQLALKYKLVDSEVPYYRYVPDPVLDDGRVTLY

SEQ ID NO: 28182 - protein, 1199 aa, Eilema sororculum
MLTRAKAKQATNYAQPTPSDSSCSSASQPPEPASTSPRPATVEASSSDEYFSPLTSPTPVRRPGRGRPPSSLGSRGPPASNRAPATGGNVRRMRWTSSMNENVMRAYFAATGGGTNLTAYRDRMLILFQDLEPTVNVSAQRLSDQVRAIQRCHLLDSSVLERLRSDLQNNDIIPPLPQAVMQEVPQETQPVHTDCELDNIATSVSTQYIDQIRNALECAVRDYRSMNYQIRPRLPRLPVHKRNIALVCALDSLLPNYLDNSEHLGDTHSILYCAAYAACRVAGVKFPECNTAIRPKSGKPRWQCRIERRIAETRALIGKLICFRSGNTRPRVMRFVNRVFSGTGVSPSDYTSRVTERIDFLKQKVYAWANRIKRYKKRCDRYTLNRTFQRDERWVYRNWERAYSVGDEHFPDVAATNTFWRNIWSVPVAHTEGDWVRKVKRSCEAIETMEPIIISEDDIACVVRSLPNWKAAGPDGLHNFWLKWLRSSHARLASQFQSALESGSLPSFMTTGITHLLYKSGCAMNPKNYRPITCLPTVYKLLTSVLRVKITSHITRNSILSYSQNGCRSGARGTKELLIIDTAVNQQVRRNRRDMATCWIDYKKAYDSVPHTWLLRVLELYKVDTTLCTFLKACMGQWSTALRYPGCRHIPDDGELIKIERGIFQGDSLSPLWFCLALNPLSTMLEDSGLGYCLRRGSQVISHLLYMDDLKLFAPNNRQLMELLKITETFSTSIRMEFGVDKCAVMHVKKGEIVESEGIELSDSTKLRSLSVNNTYKYLGMSQALGVNESGMKQSLRERFFCRLKKVLKSLLSGGNKVRAYNDWVIPVLTYSFGILRWTQTELEALDRRVRTLLTAYRMHHPRSSVMRLYIPRKFGGRGFLNIKTLHNREICNLREYFLKVNVDVHRDVVAVDRGLTPLALAKENWRKPAILSINDRKEVWKSKELHGRFHRALYGPDVDLKASVSWLRFGDLFGETEGFVCAITDEVVMTNNYRRYILKDGTVDICRACHRPGESLRHIISGCSRLANGEYLHRHNQVARIVHQQLALKYKLVDSEVPYYRYVPDPVLDDGRVTLYWDRSIITDRTIVANKPDIVVIDRLERRAIIIDVTIPHDENLVKAEKDKQIKYLDLAHEVVDMWNVDSAIIVPIVVSVHGLIAKSLDQHLKRLALDSWVKGLMQKAVILDTARIVRRFLSLEP

SEQ ID NO: 28183 - protein, 962 aa, Nascus phocus
MNRRIRDLVGTMDSLLPDYFESSESLEDTHSILFCAAVAVCRVAGVALGNTEQVTRPKPAVPAWQSRIEKRIDETRVLIGKLCCYKEGNTRPRVLRFVRRAFLGTGIGPQEYPSHVVERIDFLKQKVYAWASRIRRYRRRVERYNLNRKFQSDQRGVYRTWERLDQGVDDGRRPDDDATNTFWRNIWSVPVNHIEGDWMREVRQACEPLEAMGEISIASEDVAAAVRSIPNWKAPGPDGLHNYWLKWLRSSHGCLASQFQSALESGSLPQFLTTGITHLLHKTGSTTDPKNYRPITCLPTVYKLLTSILRDKINRHIHNNAIMSVSQNGCRGGSRGTKELLLIDMTISQQVRRSRKSLSTCWIDYKKAYDSVPHTWLLKVLELYKLDTTLCSFLRSCMGQWRTVLRYPGCRTIRENEEPIRIERGIFQGDSLSPLWFCLALNPLSTLLESSGLGYRLRRGGKVISHLLYMDDLKLFAPSRSQLMALLKVTETFSNSIRMEFGVDKCAVMHVERGGIVESDGIQLSDSINFRSLSANESYKYLGMSEALGINGNDMKQSLRERFFGRLTKVLKSLLSGGNKVRAFNGWVMPVLVYSFGILKWTQSELDALDRKVRVLLTAYRMHHPRSSVMRLYIPRRCGGRGFLNAKTLHNREVNKLREYFLHTDLDMHRDVVATDKGLTPLSLGKENWRKPVVLSADNRKEVWKSKELHGRFYRALHGPEVDFMASVSWLRFGNLFGETEGFVCAIMDEVIMTNNYRKYIVKDGTVDICRACHCPGESLRHVISGCSRLANGEYLHRHNQVAKIIHQQLALRYGLVESEVPYYVYVPDPVLENGRVTLYWDRSIITDRTVAANKPDIVVIDRSERRTIIVDITIPHDENLVKAEKDKQIKYLDLAHEVVDMWDVDSAVVVPIVVTANGLMAKSLDKHLQRLSLGSWVKGLMQKAVLLGTARIVRKFLSLEP

SEQ ID NO: 28184 - protein, 1197 aa, Eilema sororculum
MLTRAKAKLIINYAQPTPSDSSCSSASQPPESTSPRPATVEASSSDEYFSPPTSPTPVRRPGRGRPPSSLGSRGPPASNRAPATGGNVRRMRWTSFINENVMRAYFAATGGGANLTAYRDRMLILFQDLEPTVNVSAQRLSDQVRAIQRCHLLDSSVLERLRSDLQNNDITPSPPQTVMQVVPQETQPVQTDCELDNVATSVSTQYIEQIRNALECAVRDYRSMNYQIRPRLPRLPVHKRNIALVCALDSLLPNYLDNCEHLGDTHSILYCAAYAACRVAGVKFPECNTAIRPKSGKPRWQCRIERRIAETRALIGKLICFRSGNTRPRVMRFVNRVFSGTGVSPFDYTSRVTERIDFLKQKVYAWANRIKRYKKRCDRYTLNRTFQRDERWVYRNWERADSVGDEHFPDVAATNTFWRNIWSVPVAHTEGDWVRKVKRSCEAIETMEPVIISEDDIACVVRSLPNWKAAGPDGLHNFWLKWLRSSHARLAFQFQSALESGSLPSFMTTGITHLLFKSGCAMNPKNYRPITCLPTVYKLLTSVLRVKIASHITRNSILSYSQNGCRSGARGTKELLIIDTAVNQQVRRNRRDMATCWIDYKKAYDSVPHTWLLRVLELYKVDTTLCTFLEACMGQWSTALRYPGCRHIPDDGELIKIERGIFQGDSLSPLWFCLALNPLSTILEDSGLGYCLRRGSQVISHLLYMDDLKLFAPNNRQLMELLKVTETFSTSIRMEFGVDKCAVMHVKKGEIVESEGIELSDSTKLRSLSVNDTYKYLGMSQALGVNESDMKQSLRERFFCRLKKVLKSLLSGGNKVRAYNDWVIPVLTYSFGILRWTQTELEALDRRVRTLLTAYRMHHPRSSVMRLYIPRKFGGRGFLNIKTLHNREICNLREYFLKVNVDVHRDVVAVDRGLTPLALAKENWRKPAILSINDRKEVWKSKELHGRFHRALYGPDVDLKASVSWLRFGDLFGETEGFVCAITDEVVMTNNYRRFILKDGTVDICRACHRPGESLRHIISGCSRLANGEYLHRHNQVATIVHQQLALKYKLVDSEVPYYRYVPDPVLDDGRVTLYWDRSVITDRTIVANKPDIVVIDRLERRAIIIDVTIPHDENLVKAEKDKQIKYLDLAHEVVDMWNVDSAIIVPIVVSVHGLIAKSLDQHLKRLALDSWVRGLMQKAVLLDTARIVRRFLSLEP

SEQ ID NO: 28185 - protein, 1198 aa, Eilema sororculum
MLTRAKAKQISNYAQPTPSDSSCSSASQPPESTSPRPATVEASSSDEYFSPPTSPTPVRRPGRDRPPSSLGSRGPPASNRAPATGGNVRRMRWTSSINENVMRAYFAATGGGGANLTAYRDRMLILFQDLEPTVNVSAQRLSDQVRAIQRCHLLDSSVLERLRSDLQNNDITPSPPQAVMQVVPQEAQPVQTDCELDNVATSVSTQYIEQIRNALECAVRDYRSMNYQIRPRLPRLPVHKRNIALVCALDSLLPNYLDNCEHLGDTHSILYCAAYAACRVAGVKFPECNTAIRPKSGKPRWQCRIERRIAETRALIGKLICFRSGNTRPKVMRFVNRVFSGTGVSPFDYTSRVTERIDFLKQKVYAWANRIKRYKKRCDRYTLNRTFQRDERWVYRNWERADSVGDKHFPDVAATNTFWRNIWSVPVAHTEGDWVRKVKRSCEAIETMEPVIISEDDIACVVRSLPNWKAAGPDGLHNFWLKWLRSSHARLAFQFQSALESGSLPSFMTTGITHLLFKSGCAMNPKNYRPITCLPTVYKLLTSVLRVKIASHITRNSILSYSQNGCRSGARGTKELLIIDTAVNQQVRRNRRDMATCWIDYKKAYDSVPHTWLLRVLELYKVDTTLCTFLEACMGQWSTALRYPGCRHIPDDGELIKIERGIFQGDSLSPLWFCLALNPLSTILEDSGLGYCLRRGSQVISHLLYMDDLKLFAPNNRQLMELLKVTETFSTSIRMEFGVDKCAVMHVKKGEIVESEGIELSDSTKLRSLSVNDTYKYLGMSQALGVNESDMRQSLRERFFCRLKKVLKSLLSGGNKVRAYNDWVIPVLTYSFGILRWTQTELEALDRRVRTLLTAYRMHHPRSSVMRLYIPRKFGGRGFLNIKTLHNREICNLREYFLKVNVDVHRDVVAVDRGLTPLALAKENWRKPAILSINDRKEVWKSKELHGRFHRALYGPDVDLKASVSWLRFGDLFGETEGFVCAITDEVVMTNNYRRYILKDGTVDICRACHRPGESLRHIISGCSRLANGEYLHRHNQVARIVHQQLALKYKLVDSEVPYYRYVPDPVLDDGRVTLYWDRSVITDRTIVANKPDIVVIDRLERRAIIIDVTIPHDENLVKAEKDKQIKYLDLAHEVVDMWNVDSAIIVPIVVSVHGLIAKSLDQHLKRLALDSWVKGLIQKAVLLDTARIVRRFLSLEP

SEQ ID NO: 28186 - protein, 1197 aa, Eilema sororculum
MLTRAKAKLIINYAQPTPSDSSCSSASQPPESTSPRPATVEASSSDEYFSPPTSPTPVRRPGRGRPPSSLGSRGPPASNRAPATGGNVRRMRWTSSINENVMRAYFAATGGGANLTAYRDRMLILFQDLEPTVNVSAQRLSDQVRAIQRCHLLDSSVLERLRSDLQNNDITPSPPQTVMQVVPQETQPVQTDCELDNVATSVSTQYIEQIRNALECAVRDYRSMNYQIRPRLPRLPVHKRNIALVCALDSLLPNYLDNCEHLGDTHSILYCAAYAACRVAGVKFPECNTAIRPKSGKPRWQCRIERRIAETRALIGKLICFRSGNTRPRVMRFVNRVFSGTGVSPFDYTSRVTERIDFLKQKVYAWANRIKRYKKRCDRYTLNRTFQRDERWVYRNWERADSVGDEHFPDVAATNTFWRNIWSVPVAHTEGDWVRKVKRSCEAIETMEPVIISEDDIACVVRSLPNWKAAGPDGLHNFWLKWLRSSHARLAFQFQSALESGSLPSFMTTGITHLLFKSGCAMNPKNYRPITCLPTVYKLLTSVLRVKIASHITRNSILSYSQNGCRSGARGTKELLIIDTAVNQQVRRNRRDMATCWIDYKKAYDSVPHTWLLRVLELYKVDTTLCTFLEACMGQWSTALRYPGCRHIPDDGELIKIERGIFQGDSLSPLWFCLALNPLSTILEDSGLGYCLRRGSQVISHLLYMDDLKLFAPNNRQLMELLKVTETFSTSIRMEFGVDKCAVMHVKKGEIVESEEIELSDSTKLRSLSVNDTYKYLGMSQALGVNESDMKQSLRERFFCRLKKVLKSLLSGGNKVRAYNDWVIPVLTYSFGILRWTQTELEALDRRVRTLLTAYRMHHPRSSVMRLYIPRKFGGRGFLNIKTLHNREICNLREYFLKVNVDVHRDVVAVDRGLTPLALAKENWRKPAILSINDRKEVWKSKELHGRFHRALYGPDVDLKASVSWLRFGDLFGETEGFVCAITDEVVMTNNYRRFILKDGTVDICRACHRPGESLRHIISGCSRLANGEYLHRHNQVARIVHQQLALKYKLVDSEVPYYRYVPDPVLDDGRVTLYWDRSVITDRTIVANKPDIVVIDRLERRAIIIDVTIPHDENLVKAEKDKQIKYLDLAHEVVDMWNVDSAIIVPIVVSFHRLIAKSLDQHLKRLALDSWVRGLMQKAVLLDTARIVRRFLSLEP

SEQ ID NO: 28187 - protein, 974 aa, Eilema sororculum
MNYQIRPRLPRLPVHKRNIALVCALDSLLPNYLDNCEHLGDTHSILYCAAYAACRVAGVKFPECNTAIRPKSGKPRWQCRIERRIAETRALIGKLICFRSGNTRPKVMRFVNRVFSGTGVSPFDYTSRVTERIDFLKQKVYAWANRIKRYKKRCDRYTLNRTFQRDERWVYRNWERADSVGDKHFPDVAATNTFWRNIWSVPVAHTEGDWVRKVKRSCEAIETMEPVIISEDDIACVVRSLPNWKAAGPDGLHNFWLKWLRSSHARLAFQFQSALESGSLPSFMTTGITHLLFKSGCAMNPKNYRPITCLPTVYKLLTSVLRVKIASHITRNSILSYSQNGCRSGARGTKELLIIDTAVNQQVRRYRRDVATCWIDYKKAYDSVPHTWLLRVLELYKVDTTLCTFLEACMGQWSTALRYPGCRHIPDDGELIKIERGIFQGDSLSPLWFCLALNPLSTILEDSGLGYCLRRGSQVISHLLYMDDLKLFAPNNRQLMELLKVTETFSTSIRMEFGVDKCAVMHVKKGEIVESEGIELSDSTKLRSLSVNDTYKYLGMSQALGVNESDMRQSLRERFFCRLKKVLKSLLSGGNKVRAYNDWVIPVLTYSFGILRWTQTELEALDRRVRTLLTAYRMHHPRSSVMRLYIPRKFGGRGFLNIKTLHNREICNLREYFLKVNVDVHRDVVAVDRGLTPLALAKENWRKPAILSINDRKEVWKSKELHGRFHRALYGPDVDLKASVSWLRFGDLFGETEGFVCAITDEVVMTNNYRRYILKDGTVDICRACHRPGESLRHIISGCSRLANGEYLHRHNQVARIVHQQLALKYKLVDSEVPYYRYVPDPVLDDGRVTLYWDRSVITDRTIVANKPDIVVIDRLERRAIIIDVTIPHDENLVKAEKDKQIKYLDLAHEVVDMWNVDSAIIVPIVVSVHGLIAKSLDQHLKRLALDSWVKGLIQKAVLLDTARIVRRFLSLEP

SEQ ID NO: 28188 - protein, 1202 aa, Griposia aprilina
MLTRSARTRARPPPPDSSLSSASPPPVSSPIVSAVTTPVAVVASSSSDEYFSPPTSPTPVRRQGRGRPPRSLGLRGHPAPSRVPAAGGCVQRMKWTQSMNENVMRAYYRSTEGGTNLTAYRDRMLSLFQELEPTINVSAQRLSDQVRVIQRSHRLDDAALDRLRSELNNHIISTPAQTAVQASTIDEIQPRSNHGVEVEDDRVASVSSQCNARLRSALEDAFREYRSTPTELRPRLPRLPMHKKNRALVCALDSQLKNVFESSENLIDTHSILYCAAVAACRLANVRFPNCDGATRPKPAVPAWQCRIKRRIDGARVLIGKLHCFREGNNRPRVMRFVRRAFSGTGISPREYMSHATERIDFLKQKVCAWASRIRRYKRRVDRYTQNRMFQSDERWVYRAWERPEQNVTDECRPDDATTSTFWRSIWSVPVCHVEADWMRDVGRACETVPEMDAVLITPLDVARAVRPLPNWKSPGPDGLHNFWLKWLISSHACLASQYQSSLESGSLPQFLTTGVTHLLHKSGSPTDPKNYRPITCLSTVYKLLTSILRAKINTHIESNSIMSASQNGCRNGSRGTKELLLIDMAISQQVRRSRRDLSTCWIDYKKAYDSVPHTWLMRVLELYKIDTTLRTFLRSCMGQWRTVLRYPGCRQIQANDEPVWIKRGIFQGDSLSPLWFCLALNPLSTLLEDSGLGYRLRKDGQVISHLLYMDDLKLFAPNKLQLMELLKVTETFSSTIRMEFGVDKCAVMHVKRGEVMEPEGIQLSDSIHLRSLSSSESYKYLGMSEALGINVADMKQSLRERFFGRLKKVLISLLSGGNKVRAFNGWVMPVLMYSFGILKWTQTELDALDRRVRTLLTANRMHHPRSSVMRLYIPRKCGGRGFLNAKTLHNREVCSLREYFLKAEVGMHRDVVAVDKGLTPLSMAKENWRKPVVLTTDDRKEVWQSKELHGRFYRALHEPGVDFLAFVSWLRFGDLFGETEGFVCAIMDEVILTNNYRRHIMKDGTVDMCRACHRPGESIRHIVSGCSRLANGEYLHRHNQVARVIHQQLALKYKLVDSEVPYYKYVPDPVLENDHITLYWDRSIITDRTIVANKPDIVVIDRLARRTMIIDITIPHDENLVKAEKEKQIKYLDLAHEVVEMWNVSSAVIVPIVVSANGLMAKSLDQHLSRLSLDGWVKGLIQKAVLLDTARIVRRFLSLEP

SEQ ID NO: 28189 - protein, 1057 aa, Hydraecia micacea
MLTRLAAKRARITPPDSSLSSASPPPEPSPIESAVTPTVAVASSSSDEYFSPPTSPTPVRRQGRGRPPRSLGLRGQPAPSRVPATGGCVQRMRWTQSMNENVMRAYYGSTEGGTNLTAYRDRMLSLFQELEPTVNVSAQRLSDHVRVIQRNHRLDDIALDRLRSEVLSNHIVSTPAQTAAQTSTVDAIPPRSNHVEEEDDRVDTVSSQCNVLLRSALEDAFHEYRLTPTELRPRLPRLPMQKKNRALVCALNSQLKNFFENSEDLVDTHSILYCAAVAACSLANVKFPICDGATRPKPAVPAWQHRIERRIDGARVLIGKLYCFREGNTRPRVMRFVKRAFSGTGISPREYISHVTERIDFLKQKVCAWASRIRRYKRRIDRYTQNRMFQSDERWVYRAWERPEQNMTDVCRPDDAATSAFWRSIWSVPVCHTEAGWIQDVERVCETVPEMETVLITPLDVARAVRPLPNWKSPGPDGLHNFWLKWLNSSHTCLASQFQSSLESGSLPQFLTTGVTHLLHKSGSPAEPNNYRPITCLSTVYKLLTSILRAKINTHIENNSIMSASQNGCRNGSRGTKELLLIDMAISQQVRRSRKDLSTCWIDYKKAYDSVPHTWLMRVLELYKIDSTLRTFLESCMGKWKTVLRYPGCRQIQGNDEPVWIKRGIFQGDSLSPLWFCLALNPLSTLLEDSGLGYRLKRGGQVISHLLYMDDLKLFAPTRLHLMELLKVTETFSSAIRMEFGVDKCAVMHVKRGEIMESEGIQLSDSINLRSLSSSESYKYLGMSEALGINVTDMKQSLKERFFCRLRKVLISLLSGGNKVRAFNGWVMPVLMYSFGILKWTQTELDALDRRVRTLLTANRMHHPRSSVMRLYIPRKCGGRGFLNAKTLHNREVCSLREYFLKAEVGMHRDVVAVDKGLTPLSMAKENWRKPVVLTTDDRRKVWQSKELHGRFYRALHEPGVDFLASVSWLRFGDLFGETEGFVCAIMDEVILTNNYRRHIMKDGTVDVCRACHRPGESIRHIISGCSRLANGEYLHRHNQVARIIHQQLALKYWVKF

SEQ ID NO: 28190 - protein, 1081 aa, Mamestra brassicae
MITRAAARRAHPPPPGSSLSSASPTPDIGSQVSPVVAVASSSSDEYFSPPTSRTPVRRQGRGRPPRSLGSRGQPAPSRVPAAGGCVQRMRWTQSMNENVMRAYYGSTEGGTNLTAYRVRMLSLFQDLEPTVNVSAQRLSDQVRVIQHNCRLDDAALERLRSEVLSNLIISTPTQTVVQAPASGAITPRPNNGSDEVDDRVVTVSSQCNDRLRSALEDALREYRLTPTELRPRLPRLPMHKKNRALVCALDSLLQNIFESSESLVDTHSILFCGAVAACRIANVKFPSCDEAIRPKPAAPAWQCRIERRIDEARALIGKLYCFREGNTRPRVMRFVRRAFSGTGISPREYTFRVTERIDFLKQKVCAWANRIRRYKRRVDRYSQNRMFQSDERWVYRAWERPEQSVTDVYRPDDVATSTFWRSIWSVPICHAEGGWMRDVERVCEAIPQMEKITITTLDVAKAVRPLPNWKSPGPDGLHNFWLKWYSSSHALLASQFQSSLESGSLPQFLTTGITHLLHKTGSPAEPKNYRPITCLSTVYKLLTSILRAKINEHIESNSIMSASQNGCRKGSRGTKELLLIDMAISQQVRRSRKDLSTCWIDYKKAYDSVPHTWLMKVLELYKIDATLRTFLESCMRQWKTVLRYPGCQPIQGSDEPVWIKRGIFQGDSLSPLWFCLALNPLSTLLEDSGLGYRLRRGGQAISHLLYMDDLKLFAPNNLRLMELLKVTETFSSAIRMEFGVDKCAVMHVKKGEIMESEGIQLSDSIQVRSLSSTESYKYLGMSQALGINGTDMKQSLRERFFGRLKKVLNSLLSGGNKVRAFNGWVMPVLMYTFGILKWTQTELDALDRRVRTLLTANRMHHPRSSVMRLYIPRKCGGRGFLNAKTLHNREMCSLREYFLKADVGMHQDVVAVDKGLTPLSMAKENWRKPVILTTDDRKEVWKGKELHGRFYRALYGSDVDFSASVAWLRFGDLFGETEGFVCAIMDEVILTNNYRKHIMKDGTVDVCRACHRPGESIRHIISGCSRLANGEYLHRHNQVARIIHQQLALKYKLVDSEVPYYKYVPDPVLENDHVTLYWDRN

SEQ ID NO: 28191 - protein, 1241 aa, Atethmia centrago
MLTRSAARARPPPPDSSLSSASPPPVPSPTVSAVTTPAAVVASSSSDEYFSPPTSPTPVRRQGRGRPPKSLGLRGQLAPSRVPAAGGCVQRMRWTQSMNENVMRAYYGSTEGGTNLTAYRVRMLSLFQELEPTVNVSAQRLSDQVRVIQRNHRLDDAALDRLRSEVLSNHIVSTPAQTATHTPIINAIPPRSNHDVEEEDDRVATVSSQCNVRLRSALEDAFREYRSTPTELRPRLPRLPMHKKNRALVCALDSLLKDFFESSEDLVDTHSIIYCAAVAACRLANVKFPNCDGATRPKPAVPAWQCRIERRIDGARALIGKLYCFREGNTRPRVMRFVRRAFSGTGISPREYMSRVTERIDFLKQKVCAWASRIRRYKRRVDRCTQNRMFQSDERWVYRSWERPEQNETDVCRPDDATTTAFWRSIWSVPVCHAEADWMRDVERVCETIPEMEVVVITPSDIARAVRPLPNWKSPGPDGLHNFWLKWLTSSHTCLASQFQSSLESGSLPQFLTTGITHLLHKSGSPAEPKNYRPITCLSTVYKLLTSILRAKINTHIDSNSIMSASQNGCRNGSRGTKELLLIDMAISQQVRRFRKDLSTCWIDYKKAYDSVPHTWLMRVLELYKIDTTLRTFLESCMGQWRTVLRYPGCRQIQGNDEPVWIKRGIFQGDSLSPLWFCLALNPLSTLLEDSGLGYRLRRGGQVISHLLYMDDLKIFAPNKLQLMELLKITETFSSAIRMEFGVDKCAVMHVKRGEIMESEGIQLSDSIHIRSLSSPESYKYLGMSEALGINVTDMKQSLKERFFGRLKKVLISPLSGGNKVRAFNGWVMPVLMYSFGILKWTQTELDALDRRVRTLLTANRMHHPRSSVMRLYIPRKCGGRGFLNAKTLHNREICSLREYFLKTEVGMHRDVVAVDKGLTPLSMAKENWCKPVILTTDDRKEIWQNKELHGRFYRALHEPDVDFLASVSWLRFGDLFGETEGFVCAIMDEVILTNNYRRRIMKDGTVDVCRACHRPGESIRHIISGCSRLANGEYLHRHNQVARIIHQQLALKYKLVNSEVPYYKYAPDPVLENDHVTLYWDRSIITDRTIVANKPDIVVIDRLARRAMIVDVTIPHDENLVKAEKEKQIKYLDLAHEVVDMWNVDSAVIVPIVVTANGLMAQSLNHHLSEALVRRLDQGPDSEGSTPRYGPHCEEVPVSGVLTTGSLDSAPDTGGPLFFIFLNVFFYTFFQEIFKNIFNM

SEQ ID NO: 28192 - protein, 1201 aa, Mesoligia furuncula
MLTRLAARRARLPPPDSSLSSAPPPPEPSPIESAVTPAVAVASSSSDEYFSPPTSPTPVRRQGRGRPPNSLGLRGHPAPSRVPATGGCVQRMRWTQSMNENVMRAYYGSTEGGINLTAYRDRMLSLFQELEPTVNVSAQRLSDQVRVIQRNHRLDDIALDRLRSEVLSNHIVTTSAQTAAQASTVDAIPPRFNHVEEEDDRVDTVSSQCNVRLRSALEDALREYRSTPTELRPRLPRLPIHKKNRALVCALDSQLKNFFESSEDLVDTHSILYCAAVAACRLANVKFPSCDGATRPKPAVPAWQRRIERRIDGARVLIGKLYCFREGNTRPRVMRFVRRAFSGTGISPREYMSRLTERIDFLKQKVCAWASRIRRYKRRVDRYTQNRMFQSDERWVYRAWERPEQNVTDVCRPDDAATSAFWCSIWSVPVCHTEAGWMQDVERVCESIPQMEKVLIMPSDVARAVRPLPNWKSPGPDGLHNFWLKWLISSHTCLASQFQSSLESGSLPQFLTTGVTHLLHKSGSPAEPKNYRPITCLSTVYKLLTSILRAKINTHIESNSIMSASQNGCRNGSRGTKELLLIDMAISQQVRRSRKDLSTCWIDYKKAYDSVPHTWLMRVLELYKIDATLRTFLESCMGQWKTVLRYPGCRQIQGNDEPVWIKRGIFQGDSLSPLWFCLALNPLSTLLEDSGLGYRLRRGGQVISHLLYMDDLKLFAPNKLRLMELLKVTETFSSAIRMQFGVDKCAVMHVKRGEIMESEGIQLSDSISLRSLSSSESYKYLGMSEALGINDADMKQSLKERFFCRLKKVLISLLSGGNKVRAFNGWVMPVLMYSFGILKWTQTELDALDRRVRTLLTANRMHHPRSSVMRLYIPRKCGGRGFLNAKTLHNREVCSLREYFLKAEVGMHRDVVAVDKGLTPLSMAKENWRKPVVLSTDDRKKVWQSKELHGRFYRALHEPGVDFIASVSWLRFGDLFGETEGFVCAIMDEVILTNNYRRHIMKDGTVDVCRACHRPGESIKHIISGCSRLANGEYLHRHNQVARIIHQQLALKYKLVDSEVPYYKYVPDPVLENDHVTLYWDRSIITDRTIVANKPDIVVIDRLARRTMIVDVTIPHDGNLVKAEKEKEIKYQDLAHEVVDMWNVSSAIIVPIVVSANGLMAESLDQHLSRLSLGGWIKGLIQKAVLLDTARIVRRFLSLEP

SEQ ID NO: 28193 - protein, 1199 aa, Xestia c-nigrum
MITRAALRRARLATPDSSLSSASPPPDPGSPVSPAVAVASSSSDEYFSPPTSPTPVRRAGRGRPPRSLGLRGQQAPSRVPATGGCVQRMRWTQSMNENVMRAYYGSTEGGTNLTVYRVRMLSMFQDLEPTVNASAQRLSDQVRVIQRNHLLDDAVLDRLRSEVLNNRIIFTQAQTAVQASAIHATPPRSNPAVIEEDDRVATISSQCNDRLWSALDNALREYRSISAELRPRLPRLPMHKKNRALVCALDSQLKNIFESSEDLVDTHSILFCGAVAACRLANVKFPNCDIATRPKPTVPAWQRRIERRIDGARVLIGKLYCFREGNTRPRVMRFVRRAFSGTEISPQEYMSRVTERIDFLKQKVYAWASRIRRYKRRVDRYSQNRMFQSDERWVYRAWERPQQNMTDVCRPDDAATSSFWRSIWSVPVCHSEADWMRDVERVCEPIPTMEPILITPLDIARAVRPLPNWKSPGPDGLHNFWLKWFSSSHTCLASQFQSSLESGSLPQFLTTGVTHLLHKSGSPAEPKNYRPITCLSTVYKLLTSILRTKINTHVDNNSIMSASQNGCRNGSRGTKELLLIDMAISQQVRRARKDLSTCWIDYKKAYDSVPHSWLKRVLELYKIDATLRAFLESCMGQWRTVLRYPGCRQIQGNDEPVWIKRGIFQGDSLSPLWFCLALNPVSTLLENSGLGYRLRKDGQVISHLLYMDDLKLFAPNKLQLMELLKVTETFSSAIGMEFGVDKCAVMYVKRGKIMGSEGLQLSDSIHLRSLSSSESYKYLGMSEALGINVTDMKQSLKERFFGRLKKVLNSLLSGGNKVRAFNGWVMPVLMYSFGILKWTQTELDALDRRVRTLLTENRMHHPRSSVMRLYISRKCGGRGFLNAKTLHNREVCSLREYFLKADVGMHRDVVAVDKGLTPLSMAKENWRKPVVLTTDDRKKEWQGKELHGRFYRAFHGPDVDFLASVSWLRFGDLFGETEGFVCAIMDEVMLTNNYRKYIMKDGTVDVCRACHCPGESIRHIISGCSRLANGEYLHRHNQVARIIHQQLALKFKLVESEVPYYKYVPDPVLVKDHVTLYWDQSIITDRTIVANKPDIVVIDRSARRVMIIDVTIPHDENLVKAEKEKQMKYLDLAHEVRDMWNMNSVIIVPIVVTANGLIAKSLDEHLSKLSLGGWIKGLIQKAVLLDTARIVRRFLSLQP

SEQ ID NO: 28194 - protein, 962 aa, Xestia c-nigrum
MHKKNRALVCALDSQLKNVFESSEDLVDTHSILFCGAVAACRLANVKFPNCDLATRPKPAVPVWQRRIERRIDGARVLIGKLYCFREGNTRPRVMRFVRRAFSGTEISPQEYMSRVTERIDFLKQKVYAWASRIRRYKRRVDRYSQNRMFQCDERWVYRAWERPDQNVTDVCHPGDAATSSFWRSIWSVPVCHSEADWMRDVERVCEPIPEMAPVVITSLDIARAVRPLPNWKSPGPDGLHNFWLKWLSSSHTCLASQFQSSLESGSLPQFLTTGVTHLLHKSGSFTEPQNYRPITCLSTVYKLLTSILRTKINTHIDNNSIMSASQNGCRNGSRGTKELLLIDMAISQQVRRSRKDLSTCWIDYKKAYDSVPHSWLMRVLELYKIDATLCTFLKSCMGQWRTVLRYPGCRQIQGNDESVWIKRGIFQGDSLSPLWFCLALNPLSTLLENSGLGYQLRKDGQVISHLLYMDDLKLFAPNKLRLMELLKVTETFSNAIRMEFGVDKCAVMYVKRGEIMESEGLQLSDSIYLRSLSSSESYKYLGMSEALGINVTDMKQSLRERFFGRLKKVLNSLLSGGNKVRAFNGWVMPVLMYSFGILKWTQTELDALDRRVRTLLTENRMHHPRSSVMRLYIPRKCGGRGFLNAKTLHNREVCSLREYFLKAEVGMHRDVVAVDKGLTPLSMAKENWRKPVILTTDDRKKEWQGKVLHGRFYRALHGPDVDFLASVSWLRFGDLFGETEGFVCAIMDEVMLTNNYRKYIMKDGTVDVCRACHCPGESIRHIISGCSRLANGEYLHRHNQVARIIHQQLALKFKLVESEVPYYKYVPDPVLVKDHITLYWDQSIITDRTIVANKPDIVVIDRSARRVMIIDVTIPHDENLVKAEKEKQIKYLDLAHEVRDMWNMNSVIIVPIVVTANGLIAKSLDEHLSKLSLGGWIKGLIQKAVLLDTARIVRRFLSLQP

SEQ ID NO: 28195 - protein, 1202 aa, Sesamia nonagrioides
MLTRQAARRARSPPPDSLPSSASPPSVPSANVSAVTTPAAVVASSSSDEYFSPPTSPRPVRRQGRGRPPKSLGLRGHPAPSRVPAAGGCVQRMRWTQTMNENVMRAYYRATEGGTNLTAYRERMLSLFQALEPTVNVSAQRLSDQVRVIQRNHRLDDIALDRLRSEVLSNQITPTLTQTAAQASIIDAAPPRSNRVEEEDDRVETVSSQYNDRLRNALEDAFRDYRSTPTDRRPRLPRLPMHKKNRVLVCALDSLLKNFFESSEDLIDTHSILYCAAVAACRLAKVKFPNCEEAARPKPAVPAWQRRIERRIDGTRVLIGKLYCFRDGNTRPRVMRFVRQAFSGTGISPREYINHLTERIDFLKQKVCAWASRIRRYKRRVDRYTQNRMFQSDERWVYRAWERPELNEADVCRPDDATTSAFWRGIWSVSVCHTEGDWIQNVEQMCETIPEMDTILITPSDVATAVRSLPNWKSPGPDGLHNFWLKWLSSSHTCLASQFQSSLESGSLPQCLTTGITHLLHKSGSTAEPKNYRPITCLPTVYKVLTSILKAKINKHLDSNSIMSVSQNGCKSGSRGTKELLLIDMAISQQVRRSHKDLSTCWIDYKKAYDSVPHTWLMRVLELYKINATLCTFLRSCMGQWKTALHYPGSRQIQGNDEPVWIKRGIFQGDSLSPLWFCLALNPLSTLLENSGLGYRLRRGGQVISHLLYMDDLKLFAPNELHLMKLLNVTETFSSGIRMEFGVDKCAVMHVKQGEIMESEGITLPDSIHLRSLSSFESYKYLGMSEALGINDADMKQMLKERFFGRLKKVLNSLLSGGNKVRAFNGWVMPVLMYSFGILKWTQTELDALDRRVRTLLTANRMHHPRSSVMRLYIPRKCGGRGFLNAKTLHNREVCSLREYFLQTVVGMHHDVVTVDKGLTPLSMAKENWHKPIILTTDDRRKVWQSKELHGRFYRALHEPDVDFLASVSWLRFSDLFGETEGFVCAIMDEVILTNNYRRYIMKDGTIDVCRACHHPGESIRHIISGCSRLANSEYLHRHNQVARIIHQQLALKYKLVDSEVPYYKYVPDPVLENDHATLYWDRSIITDRTIVANKPDIVVIDRLARLAMIVDVTIPHDGNLVKAEKEKQIKYLDLAHEIVDMWNVNSAVIVPIVVSANGLIAKSLDQHLLRLSLGSWIKGLIQKAVLLDTARIVRRFLSLEP

SEQ ID NO: 28196 - protein, 868 aa, Sesamia nonagrioides
MRFVRQAFSGTGISPREYINNVTERIDFLKQKVCAWASRIRRYKKRVDRYTQNRMFQSDERWVYRAWERPEQNEADECRPDDATTSAFWRGIWSVSVCHTEGDWTQDVEQVCEAIPEMDNILITPLDVATAVRSLPNWKSPGPDGLHNFWLKWLSSSHTCLASQFQSSLESGSLPQFLTTGITHLLHKSGSTAEPKNYRPITCLPTVYKVLTSILKAKINNHLDSNSIMSVSQNGCRSGSRGTKELLLIDMAISQQVRRSRKDLSTCWIDYKKAYDSVPHTWLMRVLELYKINATLRTFLRSCMGQWKTVLRYPGSRQIQGNDEPVWIKRGIFQGDSLSPLWFCLALNPLSTLLEDSGLGYRLKRDGQVISHLLYMDDLKIFAPNKLHLMKLLNVTETFSSGIKMEFGVDKCAVMHVKRGQIMESEGITLPDSIHLRSLSSIESYKYLGMSEALGINDADMKQSLKERFFGRLKKVLNSLLSGGNKVRAFNGWVMPVLMYSFGILKWTQTELDALDRRVRTLLTANRMHHPRSSVMRLYIPRKCGGRGFLNAKTLHNREVFSLREYFLKTVVGMHHDVVTVDKGLTPLSMAKENWHKPIILTTYDRKMVWQSKELHGRFYRALHGPDVDFLASVSWLRFGDLFGETEGFVCAIMDEVILTNNYRRYIMKDGTIDVCRACHHPGESIRHIISGCSRLANSEYLHRHNQVARIIHQQLALKYKLVDSEVPYYKYVPDPVLENDHVTLYWDRSIITDRTIVANKPDIVVIDRLARLAMIVDVTIPHDGNLVKAEKEKQMKYLDLAHEVVDMWNVNSAVIVPIVVSANGLIAKSLDQHLLRLSLGSWIKGLIQKAVLLDTARIVRRFLSLEP

SEQ ID NO: 28197 - protein, 962 aa, Sesamia nonagrioides
MHKKNRALVCALDSLLKNFFESSEDLIDTHSILYCAAVAACRLAKVKFPNCEEAARPKPAVPAWQRRIERRIDGTRVLIGKLYCFRDGNTRPRVMRFVRQAFSGTGISTREYINHLTERIDFLKQKVCAWASRIRRYKRRVDRYTQNRMFQSDERWVYRAWERPEQNEADVCRPDDATTSAFWRGIWSVSVCHTEGNWIQNVEQVCETIPEMDTILITPSDVAAAVRSLPNWKSPGPEGLHNFWLKWLSSSHTCLASQFQSSLESGSLPQFLTTGITHLLHKSGSTAEPKNYRPITCLPTVYKVLTSILKAKINKHLISNSIMSVSQNGCKSGSRGTKELLLIDMAISQQVRRSRKDLSTCWIDYKKAYDSVPHTWLMRVLELYKVNATLRTFLRSCMGQWKTVLRYPGSRRIQGNDEPVWIKRGIFQGDSLSPLWFCLALNPLSTLLEDSGLGYRLKRGGQVISHLLYMDDLKLFAPNKLHLMKLLNVTETFSSGIKMEFGVDKCAVMHVKRGQIMESEGITLPDSIHLRSLSSFESYKYLGMSEALGINDADMKQSLKERFFGRLKKVLKSLLSGGNKVRAFNGWVMPVLMYSFGILKWTQTELDALDRRVRTLLTANRMHHPRSSVMRLYIPRKCGGRGFLNAKTLHNREVCSLREHFFKTVVGMHHDVVTVDKGLTPLSMAKENWHKPIILTTDDRKLIWQSKELHGRFYRALHEPDVDFLASVSWLRFSDLFGETEGFVCAIMDEVILTNNYRRYIMKDGTIDVCRACHHPGESIRHIISGCSRLANSEYLHRHNQVARIIHQQLALKYKLVDSEVPYYKYVPDPVLENDHVTLYWDRSIITDRTIVANKPDIVVIDRLARLAMIVDVTIPHDGNLVKAEKEKQIKYLDLAHEIVDMWNVNSAVIVPIVVSANGLIAKSLDQHLLRLSLGSWIKGLIQKAVLLDTARIVRRFLSLEP

SEQ ID NO: 28198 - protein, 962 aa, Apamea monoglypha
MHKKNRALVCALDSQLKNFFEISEDLVDTHSILYCAAVAACRLANVKFPNCDGATRPKPAVPAWQYRIERRIDGARVLIGKLYCFREGNTRPRVMRFVRQAFSGTGISPREYISNVTERIDFLKQKVCAWASRIRRYKRRVDRYTQNRMFQSDERWVYRAWERPEQNVTDVCRPDDANTNAFWRSIWSVPVYHAEGGWMQDIERVCETIPEMDPVLITPLDVARAVRPLPNWKSPGPDGLHNFWLKWLISSHSRLASQFQSSLESGSLPQFLTTGVTHLLHKSGSPAEPKNYRPITCLSTVYKLLTSILRAKINTHIDNNSIMSASQNGCRNGSRGTKELLLIDMAISQQVRRSRKDLSTCWIDYKKAYDSVPHAWLMRVLELYKIDATLRTFLESCMGQWRTVLRYPGCRQIQGNDEPVWIKRGIFQGDSLSPLWFCLALNPLSTLLEDSGLGYRLKRGGQVISHLLYMDDLKLFAPNKLRLLELLKVTETFSSAIRMEFGVDKCAVMHVKRGEIMESEGIQLSDSIHLRSLSSSESYKYLGMSEALGINVADMKQTLRERFFGRLKKVLVSLLSGGNKVRAFNSWVMPVLMYSFGILKWTQTELDALDRRVRTLLTANRMHHPRSSVMRLYIPRKCGGRGFLNAKTLHNREVCNLREYFIKAEVGMHRDVVAVDKGLTPLSMAKENWRKPVILTTDDRKEVWQSKELHGRFYRALHEPGVDFLASVSWLRFGDLFGETEGFVCAIMDEVVLTNNYRRYIMKDGTVDVCRACHRPGESIRHIISGCSRLANGEYLHRHNQVARIIHQQLALKYKLVDSEVPYYKYVPDPVLENDHVTLYWDRSIITDRTIVANKPDIVVIDRLARRTMIVDVTIPHDGNLVKAEKEKQIKYLDLAHEVVDMWNVSSAIIVPIVVSANGLMAESLDQHLSKLSLGGWIKGLIQKAVLLDTARIVRRFLSLEP

SEQ ID NO: 28199 - protein, 1106 aa, Spodoptera frugiperda
MKWTRSINENVMRAYFRATEGGRNLTAYRVRMLALFQELEPTINVSAQRLSDQVRVIQRNRMLDDIVLDRLQSEELRSRVIIPLQQNIEEPTQIEPVVAPNDDRTTEVSTHKCSEELRRALEDAIREYRFISPSLRPRLPRLPMHKKNRALVCALDSELSNYFDSSEDLIDSHSILYCGAIAACRVANVKLLERENNSTRQKPAVPAWQCRIERRIDEARTLIAKLICFREGNTRPRVMRFVRRAFLGMDINPQDYVSHITERLDFLKQIIYAWANRIRRYKKRVERYTQNRTFQRDQRWVYRNWELKEQTRTDTCLPDADVTTSFWRSIWSAPVCHTEGDWIEKVRRKCELVPEMEQIFITTEDVSNAAYPLANWKAPGPDGLHNFWLRWFTSSHSRLASQFQSALESGSLPQFFTTGLTHLLHKSGSTAEPKNYRPITCLPTIYKLLTSILREKLNKHIEDNNIMSTSQNGCRNRSRGTKELLLIDMSICQQVRRSHKNLSTCWIDYKKAYDSVPHTWLMRVLELYKVDTALRAFLMSCMRQWRTVLRYPGCRQICENDEPIRIERGIFQGDSLSPLWFCLALNPLSTLLEDSGLGYRLRRGGEIISHLLYMDDLKLFAPNNSHLMKLLNVTETFSNAIRMEFGVDKCAIMHVKRGEIVESDETRNSDTTNFRLLSSTETYKYLGMSEALGIDVAVMKQSLRERFFGRLKKVLNSLLSGGNKVRAYNGWVMPVLMYSFGILKWTQTELDALDRKVRSLLTEHRMHHPRSSVMRLYIPRKCGGRGFLNAKTLHNSEVCSLRKYFFKMEVGIHRDVVSVDKGLTPLSLANKDWREPIILSTKDRKNVWQSKELHGRYYRALHGPDTDFLASVSWLRFGNLFGETEGFVCAIMDEVMLTNNYRKYIIKDGTADICRACHRPGESIRHIISGCSHLANGEYLHRHNLVARIIHQQLALKYKLVESEVPYYKYLPDPVLENGDVTLYWDRTIITDRTIVANKPDIVVIDRPSRRTMIIDITIPHDENLVKAEKDKASKYLDLAHEVVDMWDVDSAIIVPIVVSANGLIAKSLDQHLSRLTLDGWIKSLMQKAVLLDTARIVRKFLSLEP

SEQ ID NO: 28200 - protein, 1199 aa, Noctua janthe
MITRAAYRRARLTTPDSSLSSASPPPDPGSPVSPAAAVASSSSDEYFSPPTSPTPVRRQGRGRPPKSLGLRGHPAPSRVPAAGGCVQRMRWTQTINENVMRAYYGSTEGGTNLTAYRVRMLSLFQVLEPIVNVSAQRLSDQVRVIQRNHMLDDAALDRLRSEVLSNRIVLTPAQTAVQASTIDATPPRSNPAVVEEDDRVAMVSSQCNDRLRSALEDALREYRSTPTKLRPRLPRLPMHNKNRALVCALDSQLKNIFESSENLVDTHSILYCGAVAACRLANVKFPNYDVAIRPKPAVPTWQRRIECRIDEARVLIGKLHCFREGNTRPRVMRFVRRAFSGTGISPQEYMSRVTERIDFLKQKVYAWANRIRRYKRRVDRYSQNRIFQSDERWVYRAWERPEQNMTDVCRPDDAATSSFWRSIWSVPVCHTEADWMRDVERACEPIPEMEPILITSIDITRAVRPLPNWKSPGPDGLHNFWLKWLSSSHTCLASQFQSSLESGSLPQFLTTGVTHLLHKSGSPAEPKNYRPITCLSTVYKLLTSILRVKINTHIDKNFIMSASQNGCRNRSRGTKELLLIDMAISQQVRRSRKDLSTCWIDYKKAYDSVPHTWLMRVLELYKIDATLRAFLESCMGQWRTVLRYPGCRQIQGNDEPVWIKRGIFQGDSLSPLWFCLALNPLSTLLEDSGLGYRLRRGGQVISHLLYMDDLKLFAPNKLRLMELLKVTETFSNAIRMEFGVDKCAVMYVKRGEIMESEGIQLSDSIHLRSLSSSESYKYLGMSESLGINVTDMKQSLRERFFGRLNKVLNSLLSGGNKVRAFNGWVMPVLMYSFGVLKWTQTELDALDRRVRTLLTANRMHHPRSSVMRLYIPRKCGGRGFLNAKTLHNREICSLREYFLKTEMGMHRDVVAVDKGLTPLSMAKENWRKPVVLTTDDRKEVWQGKELHGRFYRALHGPDVDFLASVSWLRFGDLFGETEGFVCAIMDEVMLTNNYRKYIMKDGTVDVCRACHRPGESIRHIISGCSRLANGEYLHRHNQVARIIHQQLALKYKLVESEVPYYKYVPDPVLEKDHVTLYWDRSIITDRTIVANKPDIVVIDRLARRVMIVDVTIPHDENLVKAEKEKQIKYLDLAHEVVDMWNVNSAIIVPIVVTANGLIAKSLDDHLSRLSLGGWIKGLIQKAVLLDTARIVRRFLSLEP

SEQ ID NO: 28201 - protein, 1199 aa, Noctua janthe
MITRAAYRRARLTTPDSSLSSASPPPDPGSPVSPAAAVASSSSDEYFSPPTSPTPVRRQGRGRPPKSLGLRGHPAPSRVPAAGGCVQRMRWTQTINENVMRAYYGSTEGGTNLTAYRVRMLSLFQVLEPIVNVSAQRLSDQVRAIQRNHMLDDAALDRLRSEVLSNRIVLTPAQTAVQASTIDATPPRSNPAVVEEDDRVAMVSSQCNDRLRSALEDALREYRSTPTKLRPRLPRLPMHNKNRALVCALDSQLKNIFESSENLVDTHSILYCGAVAACRLANVKFPNYDVAIRPKPAVPTWQRRIVCRIDEARVLIGKLHCFREGNTRPRVMRFVRRAFSGTGISPQEYMSRVTERIDFLKQKVYAWANRIRRYKRRVDRYSQNRIFQSDERWVYRAWERPEQNMTDVCRPDDAATSSFWRSIWSVPVCHTEADWMRDVERACEPIPEMEPILITSIDITRAVRPLPNWKSPGPDGLHNFWLKWLSSSHTCLASQFQSSLESGSLPQFLTTGVTHLLHKSGSPAEPKNYRPITCLSTVYKLLTSILRVKINTHIDKNFIMSASQNGCRNRSRGTKELLLIDMAISQQVRRSRKDLSTCWIDYKKAYDSVPHTWLMRVLELYKIDATLRAFLESCMGQWRTVLRYPGCRQIQGNDEPVWIKRGIFQGDSLSPLWFCLALNPLSTLLEDSGLGYRLRRGGQVISHLLYMDDLKLFAPNKLRLMELLKVTETFSNAIRMEFGVDKCAVMYVKRGEIMESEGIQLSDSIHLRSLSSSESYKYLGMSESLGINVTDMKQSLRERFFGRLNKVLNSLLSGGNKVRAFNGWVMPVLMYSFGVLKWTQTELDALDRRVRTLLTANRMHHPRSSVMRLYIPRKCGGRGFLNAKTLHNREICSLREYFLKTEVGMHRDVVAVDKGLTPLSMAKENWRKPVVLTTADRKEVWQGKELHGRFYRALHGPDVDFLASVSWLRFGDLFGETEGFVCAIMDEVMLTNNYRKYIMKDGTVDVCRACHRPGESIRHIISGCSRLANGEYLHRHNQVARIIHQQLALKYKLVESEVPYYKYVPDPVLEKDHVTLYWDRSIITDRTIVANKPDIVVIDRLARRVMIVDVTIPHDENLVKAEKEKQIKYLDLAHEVVDMWNVNSAIIVPIVVTANGLIAKSLDDHLSRLSLGGWIKGLIQKAVLLDTARIVRRFLSLEP

SEQ ID NO: 28202 - protein, 1199 aa, Noctua pronuba
MITRAAYRRARQPTPDSSLSSASPPPDIGSPVLPAVAVASSSSDEYFSPPTSPTPVRRQGRGRPPRSLGLRGHPAPSRVPATGGCVQRMRWTHPINENVMRAYYGSTEGGTNLTAYRVRMLSLFQVLEPTVNVSAQRLSDQVRVIQRNHMLDDAALDRLRSEVLSNRFVLTSSQTVVQASAIDITPPRSNPAVVEEDDRVATVSSQCNDRLRSALEDALREYRYTPTELRPRLPRLPMHKKNRALVCALDSQLKNLFESSEDLVDSHSILYCGAVAACRLANVKFTNSDTATRPKPAVPAWQCRIERRIDGARVLIGKLHCFREGNTRPRVMRFVRRAFSGTGISPQEYMSRVTERIDFLKQKVYAWANRIRRYKRRVDRYSQNRMFQSDERWVYRAWEQPKQNMADVCRPDDATTSSFWSSIWSVPVCHTEADWMRDVERMCEPIPEMEPILITPPDIARAVRPLPNWKSPGPDGLHNFWLKWLSSSHTCLASQFQSSLESGSLPQFLTTGVTHLLHKSGSPAEPKNYRPITCLSTVYKLLTSILRAKINTHIDKNSIMSASQNGCRNGSRGTKELLLIDMAISQQVRRSRKDLSTCWIDYKKAYDSVPHTWLMRVLELYKVDATLRAFLESCMGQWRTVLRYPGCRQIQGNNEPVWIKRGIFQGDSLSPLWFCLALNPLSTLLEDSGLGYRLRRGGQVISHLLYMDDLKLFAPNKLRLMELLKVTETFSSAIRMEFGVDKCAVMYVKRGEIMESEGIQLSDSIHLRSLSSSESYKYLGMSEALGINVTDMKQSLRERFFGRLKKVLNSLLSGGNKVRAFNGWVMPVLMYSFGILKWTQTELDALDRRVRTLLTANRMHHPRSSVMRLYIPRKCGGRGFLNAKTLHNREVCSLREYFLKAEVGMHRDVVAVDKGFTPLSMAKENWRKPVVLTTDDRKEVWQGKELHGRFYRALHGPDVDFLASVSWLRFGDLFGETEGFVCAIMDEVMLTNNYRKYIMKDGTVDVCRACHRPGESIRHIISGCSRLANGEYLHRHNQVARIIHQQLALKYKLVESEVPYYKYVPDPVLEKDHVTLYWDRSIITDRTIVANKPDIVVIDRSARRVMIVDVTIPHDENLVKAEKEKQIKYLDLAHEVVDMWNVNSAVIVPIVVTANGLMAKSLDDHLSRLSLGGWIKGLIQKAVLLDTARIVRRFLSLEP

SEQ ID NO: 28203 - protein, 1202 aa, Noctua pronuba
MLTRAAARRARLSPPDSSLSSASPLPESSPIVGAVTPAVAVASSSSDEYFSPPTSPTPVRRQGRGRPPTSLGLRGQPAPSRVPATGGCVQRMRWTHSINENVMRAYYGSTEGGTNLTAYRVRMLSLFQVLEPTVNVSAQRLSDQVRVIQRNHMLDDAVLDRLRSEVLSNRIVLTPSQTVVQTTAIDVSPPRSNPAVVEEDDRVATVSSQCNDRLRSALEDALREYRYTPTELRPRLPRLPMHKKNRALVCALESQLKNLFESSEDLVDTHSILYCGAVAACRLANVKFTNSDAATRPKPAVPAWQCRIERRIDGARVLIGKLHCFREGNTRPRVMRFVRRAFSGTGISPQEYMSRVTEHIDFLKQKVYAWANRIRRYKRRVDRYSQNRMFQSDERWVYRAWERPEQNMTDVCRPDDATTSSFWSSIWSVPVCHTEGDWMRAVERVCEPIPEMEPILITSLDVARSVRPLPNWKSPGPDGLHNFWLKWLSSSHTCLASQFQSSLESGALPQFLTTGVTHLLHKSGNPAEPKNYRPITCLSTVYKLLTSILRAKINTHIDKNSIMSASQNGCRNGSRGTKELLLIDMAISQQVRRSRKDLSTCWIDYKKAYDSVPHTWLMRVLELYKIDATLRTFLESCMGQWRTVLRYPGCRQIQGNDEPVWIKRGIFQGDSLSPLWFCLALNPLSTLLEDSGLGYRLRRGGQVISHLLYMDDLKLFAPNKLRLMELLKVTETFSSAIRMEFGVDKCAVMYVKRGEIMESEGIQLSDSIHLRSLSSSESYKYLGMSEALGINVTDMKQSLRERFFGRLKKVLNSLLSGGNKVRAFNGWVMPVLMYSFGILKWTQTELDALDRRVRTLLTANRMHHPRSSVMRLYIPRKCGGRGFLNAKTLHNRELCSLREYFLKAEVGMHRDVVAVDKGLTPLSMAKENWRKPVVLTTDDRKEVWQGKELHGRFYRALHGPDVDFLASVSWLRFGDLFGETEGFVCAIMDEVMLTNNYRKYIMKDGTVDVCRACHRPGESIRHIISGCSRLANGEYLHRHNQVARIIHQQLALKYKLVESEVPYYKYVPDPVLEKDHVTLYWDRSIITDRTIVANKPDIVVIDRSARRVMIVDVTIPHDENLVKAEKEKQIKYLDLAHEVVDMWNVNSAIIVPIVVTANGLIAKSLDDHLSRLSLGGWIKGLIQKAVLLDTARIVRRFLSLEP

SEQ ID NO: 28204 - protein, 1207 aa, Ochropleura plecta
MLTRRRAQEQQALPSSPGSSLSSASQPPGRATRVSAVSPVAAVASSSSDEFFSLPSSPPPPPTRQRRGRGRPPAGLGSRGQQAPIRVPAAGGNVSRMRWTSFINANVMRAYYGSTEGGTNLTAYRVRMLSLFQDLEPTINVSAQRLSDQVRVIQRNHLLDDAALDRLRSEVLSNRVILTTPQTAVQASAIDVTQPRSNPAVVEEDDRVATVSSQCNDRLRSALEDALRDYRSTPAELRPRLPRLPMHKKNRALVCALDSQLKNLFESSEDLVDTHSILYCGAVAVCRLANVKFPNCDVATRPKPSVPAWQCRIERRIDEARALIGKLYCFREGNTRPRVMRFVRRAFSGTGTSPQEYMSRTTERIDFLKQKVYAWANRIQRYKRRVDRYSQNRMFRSDERWVYRAWERPEQSVTDVCRPDDVATSSFWHSIWSVRVCHTEAGWMRDVERVCETIPEMEPILITSLDIASAVRPLPNWKSPGPDGLHNFWLKWLSSSHTRLASQFQSCLESGSLPQFLTTGVTHLLYKSGSPAEPKNYRPITCLSTVYKLLTSILRAKINSHIVKNSIISASQNGCRNGSRGTKELLLIDMAISQQVRRSRKDLSTCWIDYKKAYDSVPHTWLKRVLELYKIDTTLRTFLESCMGQWRTVLRYPGCRQIQGNDEPVWIKRGIFQGDSLSPLWFCLALNPLSTLLEDSGLGYRLRRGGQVISHLFYMDDLKLFAPNKLRLMELLKVTETFSNAIRMEFGVDKCAVMYVKRGEIMESEGIHLSDSIHLRSLSSSENYKYLGMSEALGINVADMKQLLRERFFGRLKKVLKSLLSGGNKVRAFNSWVMPVLMYSFGILKWTQTELDALDRRVRTLLTANRMHHPRSSVMRLYIPRKCGGRGFLNAKTLHNREVCSLREYFLKTDVGMHRDVVAVDKGLTPLSMAKENWCKPVVLTTDYRKEVWQGKELHGRFYKALHGPDVDFLASVSWLRFGDLFGETEGFVCAIMDEVMLTNNYRKYIMKDGTVDVCRACHRPGESIRHIISGCSRLADGEYLHRHNQVARIIHQQLALKYNLVESEVPYYKYVPDPVLEKDHVTLYWDRSIITDRTIVANKPDIVVIDRSARRVMIIDVTIPHDENLVKAEKEKQLKYLDLAHEVVDMWNVNSAIIVPIVITANGLIAKSLDEHLSKLSLGGWIKGLIQKAVLLNTARIVRRFLSLEP

SEQ ID NO: 28205 - protein, 1205 aa, Ochropleura plecta
MLTRRRAQEQQALPPSPGSSLSSASQSPGRATHVSAVSPVAAVASSSSDEFFSPPSSPPPTRQRRGRGRPPAGLGSRGQQAPIRVPAAGGNVSRMRWTSSINANVMRAYYGSTEGGTNLTAYRVRMLSLFQDLEPTINVSAQRLSDQVRVIQRNHMLDDAALDRLRSEVLSNRIILTTPQTAVQASVIDGMQPRSDPAVVEEDDRVATVSSQCNERLRSALEDALRDYRSTPAELRPRLPRLPMHKKNRALVCALDSQLKNLFESNEDLVDTHSILYCGAVAVCRLANVKFPSCDVATRPKPSVPTWQCRIERRIDEARVLIGKLYCFREGNTRPRVMRFVRRAFSGTGISPQEYMSRTTERIDFLKQKVYAWANRIRRYKRRVDRYSQNRIFRSDERWVYRAWERPEQSVTDVCRPDDVATSSFWHSIWSVPVCHTEADWMRDVERVCETIPDMEPILITSLDIASAVRPLPNWKSPGPDGLHNFWLKWLTSSHTRLASQFQSCLESGSLPQFLTTGVTHLLYKSGSPAEPKNYRPITCLSTVYKLLTSILRAKINSHIDKNSIMSASQNGCRNGSRGTKELLLIDMAISQQVRRSRKDLSTCWIDYKKAYDSVPHTWLKRVLELYKIDATLRAFLESCMGQWRTVLRYPGCRQIQGNDKPVWIKRGIFQGDSLSPLWFCLALNPLSTLLEDSGLGYRLRRGGQVISHLLYMDDLKLFASNKLRLMELLKVTETFSNAIRMEFGVDKCAVMYVKRGEIMESEGIQLSDSIHLRSLSSSESYKYLGMSEALGINVADMKQLLRERFFGRLKKVLKSLLSGGNKVRAFNSWVMPVIMYSFGILKWTQTELDALDRRVRTLLTGNRMHHPRSSVMRLYIPRKCGGRGFLNAKTLHNREVCSLREYFLKTDVGMHQDVVAVDKGLTPLSMAKENWRKPVVLTTDDRKVVWQGKELHGRFYKALHGPDVDFLASVSWLRFGDLFGETEGFVCAIMDEVMLTNNYRKYIMKDGTVDVCRACHRPGESIRHIISGCSRLANSEYLHRHNQVARIIHQQLALKYNLVESEVPYYKYVPDPVLENDHVTLYWDRSIITDRTIVANKPDIVVIDRSARRVMIIDVTIPHDENLVKAEKEKQLKYLDLAHEVVDMWNVNSAIIVPIVVTANGLIAKSLDEHLSKLSLGGWIKGLIQKAVLLDTARIVRRFLSLEP

SEQ ID NO: 28206 - protein, 1206 aa, Ochropleura plecta
MLTRRRAQEQQTLPPSPGSSLSSASQPPGRATRVSAVSPVAAVASSSSDEFFSPPSSPPPPTRQRRGRGRPPAGLGSRGQQVPIRVPAAGGNVSRMRWTSFINENVMRAYYGSTEGGTNLTAYRVRMLSLFQDLEPTINVSAQRLSDQVRVIQRNHLLDDAALDRLRSEVLSNRVILTTPQTAVQASAIDVTQPRSNPAVVEEDDRVATVSSQCNERLRSALEDALRDYRSTPTELRPRLPRLPMHKKNRALVCALDSQLKNLFESSENLVDTHSILYCGAVAVCRVANVKFQNSDVATRPKPSVPVWQCRIERRIDEARVLIGKLYCFREGNTRPRVMRFVRRAFSGTGISPQEYLSCTTERIDFLKQKVYAWANRIRRYKRRVDRYSQNRMFRSDERWVYRAWERPEQSVTDVCRPDDVATSSFWHSIWSVPVCHTEADWMRDVERVCETIPEMEPILITSIDIASAVRPLPNWKSPGPDGLHNFWLKWLSSSHTRLASQFQSCLESGSLPQFLTTGITHLLYKSGSPAEPKNYRPITCLSTVYKLLTSILRAKINSHIDKNSIMSASQNGCRNGSRGTKELLLIDMAISQQVRRSRKDLSTCWIDYKKAYDSVPHTWLKRVLELYKIDATLRAFLESCMGQWRTVLRYPGCRQIQGNDEPVWIKRGIFQGDSLSPLWFCLALNPLSTLLEDSGLGYRLRRGGKVISHLLYMDDLKLFAPNKLRLMELLKVTETFSNAIRMEFGVDKCAVMYVKRGEIMESEGIQLSDSIHLRSLSSSESYKYLGMSEALGINVADMKQLLRERFFGRLKKVLKSLLSGGNKVRAFNSWVMPVLMYSFGILKWTQTELDALDRRVRTLLTGNRMHHPRSSVMRLYIPRKCGGRGFLNAKTLHNREVCSLREYFLKTDVGMHRDVVAVDKGLTPLSMAKENWRKPVVLTTNDRKVVWQGKELHGRFYKALHGPDVDFLASVSWLRFGDLFGETEGFVCAIMDEVMLTNNYRKYIMKDGTVDVCRACHRPGESIRHIISGCSRLANSEYLHRHNQVARVIHQQLALKYNLVESEVPYYKYVPDPVLEKDHVTLYWDRSIITDRTIVANKPDIVVIDRSARRVMIIDVTIPHDENLVKAEKEKQLKYLDLAHEVVDMWNVNSAIIVPIVITANGLIAKSLDEHLSKLSLGGWIKGLIQKAVLLNTARIVRRFLSLEP

SEQ ID NO: 28207 - protein, 1206 aa, Ochropleura plecta
MLTRRRAQEQKALPPSPGSPLSSASQPPGRATCVSAVSPVAAVASSSSDEFFSPPSSPPPPTRQRRGRGRPPAGLGSRSQQAPIRVPAAGGNVSRMRWTSSINANVMRAYYGSTEGGTNLTAYRVRMLSLFQDLEPTINVSAQRLSDQVRVIQRNHMLDDAALDRLRSEVLGNRIILTTPQTAMQASVIDGMQPRSDPAVVEEDDRVATVSSQCNERLRSALEDALRDYRSTPAELRPRLPRLPMHKKNRALVCALDSQLKNLFESSEDLVDTHSILYCGAVAVCRLANVKFPSCDVATRPKPSVPAWQCRIERRIDEARVLIGKLYCFREGNTRPRVMRFVRRAFSGTGISPQEYMSRTTERIDFLKQKVYAWANRIRRYKRRVDRYSQNRMFRSDERWVYRAWERPEQSVTDVCRPDDVATSSFWHSIWSVPVCHTEADWMRDVERVCETIPEMEPILITSLDIASAVRPLPNWKSPGPDGLHNFWLKWLSSSHTRLASQFQSCLESGSLPQFLTTGVTHLLYKSGSPAEPKNYRPITCLSTVYKLLTSILRAKINSHIDNNSIMSASQNGCRNGSRGTKELLLIDMAISQQVRRSRKDLSTCWIDYKKAYDSVPHTWLKRVLELYKIDATLRAFLESCMGQWRTVLRYPGCRQIQGNDEPVWIKRGIFQGDSLSPLWFCLALNPLSTLLEDSGLGYRLRRGGQVISHLLYMDDLKLFAPNKLRLMEILKVTETFSNAIRMEFGVDKCAVMYVKRGEIMESEGIQLSDSIHLRSLSSSESYKYLGMSEALGINVADMKQLLRERFFGRLKKVLKSLLSGGNKVRAFNSWVMPVIMYSFGILKWTQTELDALDRRVRTLLTGNRMHHPRSSVMRLYIPRKCGGRGFLNAKTLHNREVCSLREYFLKTDVGMHRDVVAVDKGLTPLSMAKENWRKPVVLTTDDRKVVWQGKELHGRFYKALHGPDVDFLASVSWLRFGDLFGETEGFVCAIMDEVMLTNNYRKYIMKDGTVDVCRACHRPGESIRHIISGCSRLANSEYLHRHNQVARIIHQQLALKYNLVESEVPYYKYVPDPVLEKDHVTLYWDRSIITDRTIVANKPDIVVIDRSARRVMIIDVTIPHDENLVKAEKEKQLKYLDLAHEVVDMWNVNSAIIVPIVVTANGLIAKSLDEHLSKLSLGGWIKGLIQKAVLLDTARIVRRFLSLEP

SEQ ID NO: 28208 - protein, 1199 aa, Hecatera dysodea
MITRAASRRARPPPPDPSLSSASPPPDVEPPVSPAAAVASSSSDEYFSPPTSPTPVRRQGRGRPPRGLGPRSQPAPSRVPAAGGCVQRMKWTQSINENVMRAYYGSTEGGTNLTAYRARMLSMFQDLEPTVDVSAQRLSDQVRVIQRNHRLDDAALDRLRSEVLDNPIISTSTQTVVPVPSSGAITSRTINVCDEVDDRIVTVSSQCNDRLRSALEDALREYRSTPTELRPRLPRLPMHKRNRALVCALDSLLQNIFESSENLVDTHSILYCGAVAACRVANVKFTNSDGATRPKTAAPAWQCRIERRIDEARVLIGKLYCFREGNTRPRVMRFVRRAFSGTEISPQEYISRVTERIDFLKQKVCAWANRIRRYKRRVDRYSQNRIFQSDERWVYRSWERPEQSVTDVCRPDDIVTSTFWRSIWSVPVRHTEGDWMRGIERVCEAIPQMEKITITPTDVATAVRPLPNWKSPGPDGLHNFWLKWYSSSHAVLASQFQSSLESGSLPQFLTTGVTHLLHKTGSPAEPKNYRPITCLSTVYKLLTSILRVKINEHIESNSIMSSSQNGCRKGSRGTKELLLIDMAISQQVRRTRKDLSTCWIDYKKAYDSVPHTWLMKVLELYKIDATLRTFLESCMRQWKTVLCYPGCRPIQGNDEPVWIKRGIFQGDSLSPLWFCLALNPLSTLLEDSGLGYRLRRGGQAISHLLYMDDLKLFAHNKLRLMELLKITETFSSAIRMEFGVDKCAVMHVKKGEIMESEGVQLSDSIQVRSLSSTETYKYLGMSEALGINVADMKQSLKERFFGRLKKVLNSLLSGGNKVRAFNGWVIPVLMYSFGILKWTQTELDALDRRVRTLLTANRMHHPRSSVMRLYIPRKCGGRGFLNAKTLHNREMCSLREYFLKVDVGMHRDVVAVDKGLTPLSMANENWRKPVIHTTDDRKEVWKGKELHGRFYRALYGSDVDFSASVAWLRFGDLFGETEGFVCAIMDEVILTNNYRRHIMKDGTVDVCRACHRPGESIRHIISGCSRLANGEYLHRHNQVARIIHQQLALKYKLVDSEVPYYKYVPDPVLENGRVTLYWDRSIITDRTIVANKPDIVVIDRLARRTMIIDVTIPHDENLVKAEKEKQIKYLDLAHEVVDMWDVDSAVIVPIVITANGLMAKSFDDHLSKLALHGWLKGLIQKAVLLDTARIVRRFLSLEP

SEQ ID NO: 28209 - protein, 962 aa, Hecatera dysodea
MHKKNRALVCALDSLLKNIFESSENLVDTHSILYCGAVAACRVANVKFSNSDGATRPKNAAPAWQCRIERRIDEARVLIGKLYCFREGNTRPRVMRFVRRAFLGTEISPQEYMSRVTERIDFLKQKVCAWANRIRRYKRRVDRYSQNRMFQSDERWVYRAWERPEQSVTDVCRPDDVTTNTFWRSIWSVPVCHAEGGWMRDVERVCEAIPQMEKITITTVDIATAVRPLPNWKSPGPDGLHNFWLKWYSSSHALLASQFQSSLDSGSLPQFLTTGITHLLHKTGSPAEPKNYRPITCLSTVYKLLTSILRVKINEHIESNSIMSYSQNGCRKGSRGTKELLLIDMAISQQVRRSRKDLSTCWIDYKKAYDSVPHTWLLKVLELYKVDATLHTFLESCMRQWKTVLRYPGCRPIQGNEEPVWIKRGIFQGDSLSPLWFCLALNPLSTLLEDSGLGYRLRRGGQTISHLLYMDDLKLFAPNNLRLMELLKVTETFSSAIRMEFGVDKCAVMHVKKGEIMESEGIQLSDSIQVRSLSSTETYKYLGMSEALGINGADMKQSLKERFFGRLKKVLNSLLSGGNKVRAFNGWVMPVLMYSFGILKWTQTELDALDRRVRTLLTANRMHHPRSSVMRLYIPRKCGGRGFLNAKTLHNREMCSLREYFLKADVGMHRDVVAVDKGFTPLSMAKENWRKPVIPTTDDRREVWRGKELHGRFYRALHGSDVDFSASVAWLRFGDLFGETEGFVCAIMDEVILTNNYRRHIMKDGTVDVCRACHRPGESIRHIISGCSRLANGEYLHRHNQVARIIHQQLALKYKLVDSEVPYYKYVPDPVLENDHATLYWDRSIITDRTIIANKPDIVVIDRLARRTMIIDVTIPHDENLVKAEKEKQIKYLDLAHEVVDMWNVDSAVIVPIVVTANGLMAKSFDEHLSKLALHGWLKGLIQKAVLLDTARIVRRFLSLEP

SEQ ID NO: 28210 - protein, 1200 aa, Mythimna impura
MLTRTAARRARHPPPGSPLSSASPPPVLGSPMSPPAAVASSSSDEYFSPPTSPTPVRRPGRGRPPKSLGPRGQPAPSRVPAAGGCVQRMRWTQSMNENVMRAYYGSTEGGTNLTAYRVRMLSLFQELEPTVKVTTQRLSDQVRVIQRNHRLDDAALDRLRSEVLSNRIISTPIQTQAAALRATDATLPQSNHVDDEADDRVVTVSSQCNDRLRSALEDALREYRSTPIALRPRLPRLPMHKKNRALVCALDSLLENVFESSVNLADTHSILYCGAIAACRLANVKLPSCDGATRPKPAAPAWQCRIERRIDGARALIGKLYCFREGNTRPRVMRYVRRAFSGTGISPREYLSRVTERIDFLKQKVCAWANRIRRYKRRVDRYSQNRMFQSDERWVYRAWERPEQNVTDVTRPDAVATNTFWRNIWSVPVCHTEDGWMREVERVCEAIPEMEKVVISPTDVATAVRPLPNWKSPGPDGLQNFWLKWYSSSHALLASQFQSSLESGSLPQFLTTGVTHLLHKTGSTAEPKNYRPITCLSTVYKLLTSILRTKINKHIETNSIMSASQNGCRNGSRGTKELLLIDMAISQQVRRSRKDLSTCWIDYKKAYDSVPHTWLMRVLELYKIDATLRTFLESCMGQWNTVLRYPGCRSIRRDDEPIWIKRGIFQGDSLSPLWFCLALNPLSTLLEESGLGYRLRRGGQVLSHLLYMDDLKLIAPNKLRLMELLKVTETFSSAIRMEFGVDKCAVMHVKRGEIMESEGIQLSDSIYLKSLSSTETYKYLGMSEALGINVADMKQSLKERFFDRLKKVLNSLLSGGNKVRAFNGWVMPVLMYSFGILKWTQTELDALDRRVRTLLTANRMHHPRSSVMRLYIPRKCGGRGFLNAKTLHNREVCSLREYFHKTDVGMHRDVVAVDKGLTPLSMAKENWRKPVVLTTDDRREVWKSKELHGRFYRALHESDVDFAASVAWLRFSNLFGETEGFICAIMDEVILTNNYRRYIMKDGTVDVCRACHRPGESIRHIISGCSRLANGEYLHRHNQVARIIHQQLALKYNLVYSEVPYYSYVPDPVLENDHVTLYWDRSIITDRTIVANKPDIVVIDRLARRVMIVDVTIPHDENLVKAEKEKQIKYLDLAHDVVDMWNVDSAIIVPIVVTANGLMAKSLDDHLSKLSLRGWIKGLIQKAVLLDTARIVRRFLSLQP

SEQ ID NO: 28211 - protein, 1202 aa, Mythimna impura
MIMLTRAATRRARPSPLGSSLSSASPPPDLGSPVSPTAAVASSSSDEYFSPPTSPTPVRRPGRGRPPKSLGPRGQPAPSRVPATGGCVQRMKWTQSMNENVMRAYYGSTEGGTNLTAYRVRMLSLFQELEPTVNVTAQRLSDQVRVIQRSHRLDGAALDRLRSEVLSNRIISTPSQTQTEAPQATDAILPRSNHIDDEADDRVVTVSSQCNDRLRSALEDALREYRSTPIALRPRLPRLPMHKKNRALVCALDSLLENVFESSVNLADTHSILYCGAIAACRLANVKLPSCDGATRPKPAAPAWQCRIERRIDEARALIGKLYCFREGNTRPRVMRYVRRAFSGTEISPREYLSRVTERIDFLKQKVCAWANRIRRYKRRVDRYSQNRMFQSDERWVYRAWERPEQNVTDVTRPDAVATNTFWRNIWSVPVCHTEDGWMREVERVCEAIPEMEKVIISPIDVARAVRPLPNWKSPGPDGLQNFWLKWYSSSHALLASQFQSSLESGSLPQFLTTGVTHLLHKTGSTAEPKNYRPITCLSTVYKLLTSILRTKINKHIDINSIMSASQNGCRNGSRGTKELLLIDMAISQQVRRSRKDLSTCWIDYKKAYDSVPHTWLMRVLELYKIDATLRTFLESCMGQWNTVLRYPGCRSIRRDDEPIWIKRGIFQGDSLSPLWFCLALNPLSTLLEESGLGYRLRRGGQVLSHLLYMDDLKLIAPNKLRLMELLKVTETFSSAIRMEFGVDKCAVMHVKRGEIMESEGIQLSDSIHFRSLSSTETYKYLGMSEALGINVADMKQSLKERFFGRLKKVLNSLLSGGNKVRAFNGWVMPVLMYSFGILKWTQTELDAVDRRVRTLLTANRMHHPRSSVMRLYIPRKCGGRGFLNAKTLHNREVCSLREYFHKTDVGMHRDVVAVDKGLTPLSMAKENWRKPVVLTTDDRKEVWKSKELHGRFYRALHESDIDFAASVAWLRFSNLFGETEGFICAIMDEVILTNNYRRYIMKDGTVDVCRACHRPGESIRHIISGCSRLANGEYLHRHNQVARIIHQQLALKYNLVDYEVPYYRYVPDPVLENDHVTLYWDRSIITDRTIVANKPDIVVIDRLARRVMIVDVTIPHDENLVKAEKEKQIKYLDLAHEVVDMWNVDSAVIVPIVVTANGLIAKSFDDHLSKLSLRGWIKGLIQKAVLLDTARIVRRFLSLEP

SEQ ID NO: 28212 - protein, 1200 aa, Mythimna impura
MLTRAAARRARHPPPGSPLSSASPPPDLESPVSPAAAVASSSSDEYFSPPTSPTPVRRPGRGRPPRSLGSRGQPAPSRVPAAGGCVQRMRWTQSMNENVMRAYYGSTKGGTNLTAYRVRMLSLFQVLEPTVNVTTQRLSDQVRVIQRNHRLDNAALDRLRSEVLSNRIISTPIQTQTAAPRATDGILPQSNHVDDEADDRVVTVSSQCNDRLRSALEDALREYRSTPIDLRPRLPRLPMHKKNRALVCALDSLLENVFESSVNLADTHSILYCGAIAACRLANVKLPSCDGATRPKSVAPAWQCRIEKRIDGARALIGKLYCFREGNTRPRVMRYVRRAFSGTGISPPEYLSRVTERIDFLKQKVCAWANRIRRYKRRVDRYSQNRMFQSDERWVYRAWERPEQNVTDVTRPDAVATNAFWRNIWSVPVCHTEDGWMREVERVCEAIPEMEKVIISPTDVARAVRPLPNWKSPGPDGLQNFWLKWYSSSHALLASQFQSSLESGSLPQFLTTGVTHLLHKTGSTAEPKNYRPITCLSTVYKLLTSILRTKINQHIDNNSIMSASQNGCRNGSRGTKELLLIDMTISQQVRRSRKDLSTCWIDYKKAYDSVPHTWLMRVLELYKIDATLRTFLESCMGQWNTVLRYPGCRSIRRDDEPIWIKRGIFQGDSLSPLWFCLALNPLSTLLEESGLGYRLRRDGQVLSHLLYMDDLKLIAPNKLRLMELLKVTETFSSAIRMEFGVDKCAVMHVKRGEIMESEGIQLSDSIHLRSLSSTETYKYLGMSEALGINVADMKQSLKERFFGRLKKVLNSLLSGGNKVRAFNGWVMPVLMYSFGILKWTQTELDALDRRVRTLLTANRMHHPRSSVMRLYIPRKCGGRGFLNTKTLHNREVCSLREYFHKTDVGMHRDVVAVDKGLTPLSMAKENWRKPVVLTTDDRKEVWKSKELHGRFYRALHESDVDFAASVAWLRFSNLFGETEGFICAIMDEVILTNNYRRYIMKDGTVDVCRACHRPGESIRHIISGCSRLANGEYLHRHNQVARIIHQQLALKYNLVYSEVPYYRYVPDPVLENDHVTLYWDRSIITDRTIVANKPDIVVIDRLARRAMIVDVTIPHDENLVKAEKEKQIKYLDLAHEVVDMWNVDSAVIVPIVVTANGLIAKSFDDHLSKLSLRGWIKGLIQKAVLLDTARIVRRFLSLEP

SEQ ID NO: 28213 - protein, 1111 aa, Phlogophora meticulosa
MRWTQSMNENVMRAYYGSTEGGTNLTAYRARMLSLFQVLEPTVNVSAQRLSDQVRVIQRNHRLDDTALDRLRSEVLNNHIVLTSTQTAVQASIINATPSPSNHVSEEADDRVVTVSSQCNEKLRSALEDALREYRSTPTELRPRLPRLPMHKKNRALVCNLDSLLKDLFESSGDLVDTHSILYCAAVAACRLANVKFPNNDVAIRPKPAVPAWQSRIERRIDGARVLIGKLYCFREGNTRPRVMRFVRRAFAGTGISPREYMSRIVERIDFLKQKVYAWANRIRRYKRRVDRYSQNRMFQSDERWVYRAWERPEQDVADVHRPDDTTTNTFWRNIWSVPVCHTEAHWIRDVERVCETITEMEKIIITPLDVATAVRPLPNWKAPGPDGLHNFWLKWLGSSHTRLASQFQSCLESGSLPQFLTTGITHLLYKSGSTTEPKNYRPITCLSTVYKLLTSILRAKIAEHIVGNSIMSASQNGCRNGSRGTKELLLIDMAISQQVRRSHKDLSTCWIDYKKAYDSVPHAWLMRVLELYKIDATLRTFLESCMGQWRTVLRYPGCRQIQGNDEPIWIKRGIFQGDSLSPLWFCLALNPLSTLLEDSGLGYRLRRGGQVISHLLYMDDLKLFASNNLQLMELLKITESFSSTIRMEFGVDKCAVMHVKRGEIVESEGIQLPDSIQLRSLSSSDNYKYLGMSEALGINVTDMKQSLKERFFGRLKKVLNSLLSGGNKVRAFNGWVMPVLMYSFGILKWTQTELDALDRRVRTLLTANRMHHPRSSVMRLYIPRKCGGRGFLNAKTLYNREVCNLRDYFLKTEVGMHRDVVAVDKGLTPLSMAKENWRKPVVLTTDDRKQVWQSKELHGRFYRALHGPDVDFIASVSWLRFGDLFGETEGFVCAIMDEVILTNNYRKHIMKDGTVDMCRACHRPGESIRHIISGCSRLANGEYLHRHNQVARIIHQQLALRYKLVESEVPYYKYVPDPVLEDDHVTLYWDRSIITDRTIVANKPDIVVIDRLARRAMIVDVTIPHDENLVKAEKEKQIKYLDLAHEVVDMWNVDSAVIVPIVVTANGLLAKSLDDHLSRLSLHGWIKGLIQKAVLLDTARIVRRFLSLQP

SEQ ID NO: 28214 - protein, 1037 aa, Phlogophora meticulosa
MLSNHIVLTSTQTAVQAPAFNAILPRSNHVSNEADDRVDTVCSQYNDRLRSALEDALREYRSTPTELRPRLPRLSMHRKNRALVCALDSLLKNFFESSEDLVDTHSILYCAAVAACRLANVKFPKNDLAIRPKPAVPAWQSRIERRIDGARVLIGKLYCFREGNTRPRVMRFVRRAFSGTGISPREYMSRIVERIDFLKQKVCAWANRIRRYKRRVDRYSQNRMFQSDERWVYRAWERPEQDVAGEHRLDDVATNAFWRSIWSVPAHHVEAHWMSDYESVCETIPEMEKIIITPEDVATAVRPVPNWKSPGPDGLHNFWLKWLSSSHTRLASQFQSCLESGSLPQFLTTGITHLLYKSGSTTEPKNYRPITCLSTVYKLLTSILRAKITEHIVGNSIMSASQNGCRNGSRGTKELLLIDMAISQQVRRSRKDLSTCWIDYKKAYDSVPHAWLTRVLELYKIHATLRTFLASCMGQWKTVLRYPGCRQIQGNDEPIWIKRGIFQGDSLSPLWFCLALNPLSTLLEDSGLGYRLKRGGQVISHLLYMDDLKLFAPNNLRLMELLKITESFSSAIRMEFGVDKCAVMHVKRGEIVESEGIQLSDSIHLRSLSSSENYKYLGMSEALGINATDMKQSLKERFFGRLKKVLNCLLSGGNKVRAFNGWVMPVLMYSFGILKWTQTELDALDRRVRTLLTANRMHHPRSSVMRLYIPRKCGGRGFLNAKTLHNREVCNLREYFLKTEVGMHRDVVAVDKGLTPLSMAKENWRKPVVLTTDDRKQVWQSKELHGRFYRALHGPDVDFLASVSWLRFGDLFGETEGFVCAIMDEVILTNNYRKHIMKDGTVDMCRACHRPGESIRHIISGCSRLANGEYLHRHNQVARIIHQQLALRYKLVESEVPYYKYVPDPVLEDDHVTLYWDRSIITDRTIVANKPDIVVIDRLARRAMIVDVTIPHDENLVKAEKEKQIKYLDLAHEVVDMWNVDSAVIVPIVVTANGLLAKSLDDHLSRLSLHGWIKGLIQKAVLLDTARIVRRFLSLQP

SEQ ID NO: 28215 - protein, 1201 aa, Xestia xanthographa
MMLTRAAAARRAHLPTPDSSLSSASPPPDPRSPVSPVAAVASSSSDEYFSPPTSPPPVRRAGRGRPPTSLGLRGRQAPSRVPATGGCVQRMKWTQSMNENVMRAYYGSTEGGTNLTAYRVRMLSLFQDLEPTVIVSAQRLSDQVRVIQRSHRLDDAALDRLRSEVLSNLIVLTPTQTAVQVSAVDATPPRLNPAVVEEDDGVATVSSQCNDRLRSALENALHEYRSTPTELRPRLPRLPMHKKNRALVCALDSQLKNIFESSENLVDTHSILFCGAVAACRIANVKFPNCDVATRPKPAVPAWQRRIERRIDGARVLIGKLYCFREGNTRPRVMRFVRRAFSGTEISPQEYMSRATERIDFLKQKVYAWANRIRRYKRRVDRYSQNRMFQSDERWVYRAWERPEQNMTDVCRPDDAATSSFWRSIWSVPVCHTEADWMRDVERVCEPIPEMEPIFITPVDVARAVRPLPNWKSPGPDGLHNFWLKWFSSSHTCLASQFQSSLESGSLPQFLTTGVTHLLHKSGSPAEPKNYRPITCLSTIYKLLTSILRVKINTHIDKNSIMSASQNGCRNGSRGTKELLLIDMAISQQVRRSRKDLSTCWIDYKKAYDSVPHTWLMRVLELYKVDTTLRTFLESCMGQWKTVLRYPGCRQIQGSDEPVWIKRGIFQGDSLSPLWFCLALNPLSTLLENSGLGCRLRKDGQVISHLLYMDDLKLFAPNKLRLMELLKVTETFSSAIRMEFGVDKCAVMYVKRGEIMESEGLQLSDSIHLKSLSSSETYKYLGMSEALGINVTDMKQSLRERFFGRLRKVLNSLLSGGNKVRAFNGWVMPVLMYSFGILKWTQTELDALDRRVRTLLTESRMHHPRSSVMRLYIPRKCGGRGFLNAKTLHNREVCSLREYFLKAEVGMHRDVVAVDKGLTPLSMAKENWHRPEVLTTDDRKEVWQGKVLHGRFYRALHGPDVDFIASVSWLRFGDLFGETEGFVCAIMDEVMLTNNYRKYIMKDGTVDVCRACHLPGESIRHIISGCSRLANGEYLHRHNQVARIIHQQLALKYKLVESEVPYYKYVPDPVLENDHVTLYWDRSIITDRTIVANKPDIVMMDRSARRVMIIDVTIPHDENLVKAEKEKQIKYLDLAHEVRGMWNMNSVIIVPIVVTANGLIAKSFDDHLSKLSLGGWIKGLIQKAVLLDTARIVRRFLSLQP

SEQ ID NO: 28216 - protein, 1199 aa, Xestia xanthographa
MLTRAAARRARLPSPESSLSSASPPPDPGSPVSPVAAVASSSSDEYFSPPTSPPPVRRAGRGRPPTSLGLRGQQAPSRVPATGGCVQRMKWTQSINENVMRAYYGSTEGGTNLTAYRVRMLSLFQDLEPTVNVSAQRLSDQVRVIQRNHRLDDAALDRLRSEVLSNLIILTPTQTAVHTSVNNVTLPRSNPDVVEEDDRVATVSSQCNYRLRSALEDAFREYRSTPTELRPRLPRLPMHKKNRALVCALDSQLKNIFESSENLVDTHSILFCGAVAACRLANVKFPNCDVATRPKPAVPAWQCRIERRIDEARVLIGKLYCFREGNTRPRVMRFVRRAFSGTEISPQEYMSRVTERIDFLKQKVYAWANRIRRYKRRVDRYSQNRMFQSDERWVYRAWERPEQNMTDVCRPDDAATSSFWRSIWSVPVCHTESDWMRDVERVCEPIPEMEPILITPLDIAKAVRPLPNWKSPGPDGLHNFWLKWFSSSHTCLASQFQSSLESGSLPQFLTTGVTHLLHKSGSPAEPKNYRPITCLSTIYKLLTSILRVKINTHIDKNSIMSASQNGCRNGSRGTKELLLIDMAISQQVRRSRKDLSTCWIDYKKAYDSVPHTWLMRVLELYKIDTTLRAFLESCMGQWKTVLRYPGCRQIQGSDEPVWIKRGIFQGDSLSPLWFCLALNPLSTLLENSGLSCRLRKDGQVISHLLYMDDLKLFAPNKLRLMELLKVTETFSSAIRMEFGVDKCAVMYVKRGEIMESEGLQLSDSIHLRSLSSSETYKYLGMSEALGINVTDMKQSLKERFFGRLRKVLNSLLSGGNKVRAFNGWVMPVLMYSFGILKWTQTELDALDRRVRTLLTETRMHHPRSSVMRLYIPRKCGGRGFLNAKTLHNREVCSLREYFLKAEMGMHRDVVAVDKGLTPLSMAKENWHKPEVLTTDDRKEVWQGKELHGRFYRALHGPDVDFLASVFWLRFGDLFGETEGFVCAIMDEVMLTNNYRKYIMKDGTVDVCRACHLPGESIRHIISGCSRLANGEYLHRHNQVARIIHQQLALKYKLVESEVPYYKYVPDPVLEKDHVTLYWDRSIITDRTIVANKPDIVMIDRSARRVMIIDVTIPHDENLVKAEKEKQIKYLDLAHEVRDMWNMNSVIIVPIVVTANGLIAKSFDDHISKLSLGGWIKGLIQKAVLLDTARIVRRFLSLQP

SEQ ID NO: 28217 - protein, 1202 aa, Cosmia trapezina
MLTRSAARARPPPPDSSLSSASPPPVSSPTVSAVTTPAAVVASSSSDEYFSPPTSPIPVRRQGRGRPPKSLGLGGQPAPSRVPAAGGCVQRMRWTQSMNENVMRAYYGSTEGGTNLTAYRVRMLSLFQELEPTVNVSAQRLSDQVRVIQRNHRLDDAALDRLRSEILSDRIVSTQAQTAVQDSIIDALPPRSNHVVEEEDDRVATVSSQSNDRLRSALEDAFREYRSTPTELRPRLPRLPMHKKNRALVCALDSHLKDFFESSEDLVDTHSILYCAAVAACRLANVKFPNCDGANRSKPAVPAWQCRIERRIDGARVLIGKLYCFREGNTRPRVMRFVRRAFSGTGISPPEYMSRVTERIDFLKQKVCAWASRIRRYKRRVDRYTQNRMFQSDERWVYRAWERPEQNVTDVCRPDDAATSAFWRSIWSVPVCHAEAGWMQDVERVCETIPEMETVLITPLDVARAVRPFPNWKSPGPDGLHNFWLKWLISSHTCLASQFQSSLESGSLPQFLTTGVTHLLHKSGSPVEPKNYRPITCLSTVYKLLTSILRAKINTHIASNSIISASQNGCRTGSRGTKELLLIDMAISQQVRRSRKDLSTCWIDYKKAYDSVPHTWLLKVLELYKIDATLRTFLESCMGQWRTVLRYPGCQQIRGSDEPVWIKRGIFQGDSLSPLWFCLALNPLSTLLEDSGLGYRLRRGGQVISHLLYMDDLKLFAPNELRLMELLKVTETFSGAIRMEFGVDKCAVMHVKRGEIMESEGIQLTDSIYLRSLSSSETYKYLGMSEALGINVADVKQSLRERFFGRLKKVLISLLSGGNKVRAFNGWVMPVLMYSFGILKWTQTELDALDRRVRTLLTANRMHHPRSSVMRLYIPRKCGGRGFLNAKTLHNREVCSLREYFLKADVGMHRDVVAVDKGLTPLSMAKENWRKPVLLTTDDRRKVWQSKELHGRFYRALHEPGVDFLASVSWLRFSDLFGETEGFVCAIMDEVILTNNYRRYIMKDGTVDVCRACHRPGESIRHIISGCSRLANGEYLHRHNQVARIIHQQLALKYKLVDSEVPYYKYVPDPVLENDHVTLYWDRSIITDRTIVANKPDIVVIDRLARRAMIVDVTIPHDGNLVKAEKEKQIKYLDLAHEVVDMWNVDSAVIVPIVVTANGLIADSLDQHLSRLSLGGWIKGQIQKAVLLDTARIVRRFLSLQP

SEQ ID NO: 28218 - protein, 868 aa, Cosmia trapezina
MRFVRRAFSGTGISPPEYMSRVTERIDFLKQKVCAWASRIRRYKRRVDRYTQNRMFQSDERWVYRAWERPEQNVTDVCRPDDAATSAFWRSIWSVPVCHAEAGWMQDVERVCETIPEMETVLITPLDVARAVRPFPNWKSPGPDGLHNFWLKWLISSHTCLASQFQSSLESGSLPQFLTTGVTHLLHKSGSPVEPKNYRPITCLSTVYKLLTSILRAKINTHIASNSIISASQNGCRTGSRGTKELLLIDMAISQQVRRSRKDLSTCWIDYKKAYDSVPHTWLLKVLELYKIDATLRTFLESCMGQWRTVLRYPGCRQIRGNDEPVWIKRGIFQGDSLSPLWFCLALNPLSTLLEDSGLGYRLRRGGQVISHLLYMDDLKLFAPNELRLMELLKVTETFSGAIRMEFGVDKCAVMHVKRGEIMESEGIQLTDSIYLRSLSSSETYKYLGMSEALGINVAGVKQSLKERFFGRLKKVLISLLSGGNKVRAFNGWVMPVLMYSFGILKWTQTELDALDRRVRTLLTANRMHHPRSSVMRLYIPRKCGGRGFLNAKTLHNREVCSLREYFLKADVGMHRDVVAVDKGLTPLSMAKENWRKPVLLTTDDRRKVWQSKELHGRFYRALHEPGVDFLASVSWLRFSDLFGETEGFVCAIMDEVILTNNYRRYIMKDGTVDVCRACHRPGESIRHIISGCSRLANGEYLHRHNQVARIIHQQLALKYKLVDSEVPYYKYVPDPVLENDHVTLYWDRSIITDRTIVANKPDIVVIDRLARRAMIVDVTIPHDGNLVKAEKEKEIKYLDLAREVVDMWNVDSAVIVPIVVTANGLIADSLDQHLSRLSLGGWIKGQIQKAVLLDTARIVRRFLSLQP

SEQ ID NO: 28219 - protein, 1199 aa, Mamestra brassicae
MITRAAARRAHPPPPGSSLSSASPTPDIGSQVSPVVAVASSSSDEYFSSPTSPTPVRRQGRGRPPRSLGSRGQPAPSRVPAAGGCVQRMRWTQSMNENVMRAYYGSTEGGTNLTAYRVRMLSLFQDLEPTVNVSAQRLSDQVRVIQHNCRLDDAALERLRSEVLSNLIISTPTQTVVQAPASGAITPRPNNGSDEVDDRVVTVSSQCNDRLRSALEDALREYRLTPTELRPRLPRLPMHKKNRALVCALDSLLQNIFESSESLVDTHSILFCGAVAACRIANVKFPSCDEAIRPKPAAPAWQCRIERRIDEARALIGKLYCFREGNTRPRVMRFVRRAFSGTGISPREYTFRVTERIDFLKQKVCAWANRIRRYKRRVDRYSQNRMFQSDERWVYRAWERPEQSVTDVYRPDDVATSTFWRSIWSVPICHAEGGWMRDVERVCEAIPQMEKITITTLDVAKAVRPLPNWKSPGPDGLHNFWLKWYSSSHALLASQFQSSLESGSLPQFLTTGITHLLHKTGSPAEPKNYRPITCLSTVYKLLTSILRTKINEHIESNSIMSASQNGCRKGSRGTKELLLIDMAISQQVRRSRKDLSTCWIDYKKAYDSVPHTWLMKVLELYKIDATLRTFLESCMRQWKTVLRYPGCQPIQGSDEPVWIKRGIFQGDSLSPLWFCLALNPLSTLLEDSGLGYRLRRGGQAISHLLYMDDLKLFAPNNLRLMELLKVTETFSSAIRMEFGVDKCAVMHVKKGEIMESEGIQLSDSIQVRSLSSTESYKYLGMSEALGINGTDMKQSLRERFFGRLKKVLNSLLSGGNKVRAFNGWVMPVLMYTFGILKWTQTELDALDRRVRTLLTANRMHHPRSSVMRLYIPRKCGGRGFLNAKTLHNREMCSLREYFLKADVGMHRDVVAVDKGLTPLSMAKENWRKPVILTTDDRKEVWKGKELHGRFYRALYGSDVDFSASVAWLRFGDLFGETEGFVCAIMDEVILTNNYRKHIMKDGTVDVCRACHRPGESIRHIISGCSRLANGEYLHRHNQVARIIHQQLALKYKLVDSEVPYYKYVPDPVLENDHVTLYWDRSIITDRTIVANKPDIVVIDRLARRTMIIDVTIPHDENLVKAEKEKQIKYLDLAHEVVDMWNVDSAVIVPIVITANGLMAKSFDDHLSKLALRGWIKGLIQKAVLLDTAHIVRRFLSLEP

SEQ ID NO: 28220 - protein, 1199 aa, Mamestra brassicae
MLTRAALQRARPPPPDPSLSSASPPPDIGSPLSPAVAVASSSSDEYFSPPTSPTPVRRQGRGRPPRGLGPRGQPAPSRVPATGGCVQRMRWTQSMNENVMRAYYGSTEGGTNLTAYRVRMLSLFQDLEPTVNVSAQRLSDQVRVIQRNHRLDDAALDRLRSEILNNLIISTPTQTAVQAPVNGRITPRPNNVSDEVDDRVVTVSSQCNDRLRSALEDALREYRSTPTELRPRLPRLPMHKKNRALVCALDSLLQNIFESSESLVDTHSILYCGAVAACRIANVKFPGCDEAIRPKPAAPAWQRRIERRIDETRALIGKLYCFREGNTRPRVMRFVRRAFSGTEISPRDFTSRVTERIDFLKQKVCAWASRIRRYKRRVDRYSQNRMFQSDERWVYRAWERPEQSVTDVCRPDDVATSIFWRSIWSVPICHAEGGWMRDVERVCEAIPQMEKNTITTLDVAKAVRPLPNWKSPGPDGLHNFWLKWYSSSHALLASQFQSSLDSGSLPQFLTTGVTHLLHKTGSPTEPKNYRPITCLSTVYKLLTSILRAKINEHIESNSIMSASQNGCRKGSRGTKELLLIDMAISQQVRRSRKDLSTCWIDYKKAYDSVPHTWLMKVLELYKIDATLRTFLESCMRQWKTVLRYPGCRPIQGSDEPVWIKRGIFQGDSLSPLWFCLALNPLSTLLEDSGLGYRLRRGGQAISHLLYMDDLKLFAPNNLRLMELLKVTETFSSAIRMEFGVDKCAVMHVKKGEIMESEGIHLSDSIQVRSLSSTETYKYLGMLEALGINGTDMKQSLRERFFGRLKKVLNSLLSGGNKVRAFNGWVMPVLMYTFGILKWTQTELDALDRRVRTLLTANRMHHPRSSVMRLYIPRKCGGRGFLNAKTLHNREMCSLREYFLKADAGMHRDVVAVDKGLTPLSMAKENWRTPVILTTDDRKEVWKGKELHGRFYRALHGSDVDFSASVAWLRFEDLFGETEGFVCAIMDEVILTNNYRRHIMKDGTVDMCRACHRPGESIRHIISGCSRLANGEYLHRHNQVARIIHQQLALKYNLVDSEVPYYKYVPDPVLENDHVTLYWDRSIITDRTIVANKPDIVVIDRLARRTMIIDVTIPHDENLVKAEKEKQIKYLDLAHEVVDMWNVESAVIVPIVVTANGLMAKSFDDHLSKLALRSWVKGLIQKAVLLDTARIVRRFLSPEP

SEQ ID NO: 28221 - protein, 1199 aa, Mamestra brassicae
MITRAAARRAHPPPPGSSLSSASPTPDIGSQVSPVVAVASSSSDEYFSPPTSPTPVRRQGRGRPPRSLGSRGQPALSRVPAAGGCVQRMRWTQSMNENVMSAYYGSTEGGTNLTAYRVRMLSLFQDLEPTVNVSAQRLSDQVRVIQHNCRLDDAALERLRSEVLSNLIISTPTQTVVQAPASGAITPRPNNGSDEVDDRVVTVSSQCNDRLRSALEDALREYRLTPTELRPRLPRLPMHKKNRALVCALDSLLQNIFESSESLVDTHSILFCGAVAACRIANVKFPSCDEAIRPKPAAPAWQCRIERRIDEARALIGKLYCFREGNTRPRVMRFVRRAFSGTGISPREYTFRVTERIDFLKQKVCAWANRIRRYKRRVDRYSQNRMFQSDERWVYRAWERPEQSVTDVYRPDDVATSTFWRSIWSVPICHAEGGWMRDVERVCEAIPQMEKITITTLDIAKAVRPLPNWKSPGPDGLHNFWLKWYSSSHALLASQFQSSLESGSLPQFLTTGITHLLHKTGSPAEPKNYRPITCLSTVYKLLTSILRAKINEHIESNSIMSASQNGCRKGSRGTKELLLIDMAISQQVRRSRKDLSTCWIDYKKAYDSVPHTWLMKVLELYKIDATLRTFLESCMRQWKTVLRYPGCQPIQGSDEPVWIKRGIFQGDSLSPLWFCLALNPLSTLLEDSGLGYRLRRGGQAISHLLYMDDLKLFAPNNLRLMELLKVTETFSSAIRMEFGVDKCAVMHVKKGEIMESEGIQLSDSIQVRSLSSTESYKYLGMSEALGINGTDMKQSLRERFFGRLKKVLNSLLSGGNKVRAFNGWVMPVLMYTFGILKWTQTELDALDRRVRTLLTANRMHHPRSSVMRLYIPRKCGGRGFLNAKTLHNREMCSLREYFLKADVGMHRDVVAVDKGLTPLSMAKENWRKPVILTTDDRKEVWKGKELHGRFYRALYGSDVDFSASVAWLRFGDLFGETEGFVCAIMDEVILTNNYRKHIMKDGTVDVCRACHRPGESIRHIISGCSRLANGEYLHRHNQVARIIHQQLALKYKLVDSEVPYYKYVPDPVLENDHVTLYWDRSIITDRTIVANKPDIVVIDRLARRTMIIDVTIPHDENLVKAEKEKQIKYLDLAHEVVDMWNVDSAVIVPIVITANGLMAKSFDDHLSKLALRGWIKGLIQKAVLLDTARIVRRFLSLEP

SEQ ID NO: 28222 - protein, 1199 aa, Mamestra brassicae
MITRAAARRAHPPPPGSSLSSASPTPDIGSQVSPVVSVASSSSDEYFSPPTSPTPVRRQGRGRPPRSLGSRGQPALSRVPAAGGCVQRMRWTQSMNENVMRAYYGSTEGGTNLTAYRVRMLSLFQDLEPTVNVSAQRLSDQVRVIQHNCRLDDAALERLRSEVLSNLIISTPTQTVVQAPASGAITPRPNNGSDEVDDRVVTVSSQCNDRLRSALEDALREYRLTPTELRPRLPRLPMHKKNRALVCALDSLLQNIFESSESLVDTHSILFCGAVAACRIANVKFPSCDEAIRPKPAAPAWQCRIERRIDEARALIGKLYCFREGNTRPRVMRFVRRAFSGTGISPREYTFRVTERIDFLKQKVCAWANRIRRYKRRVDRYSQNRMFQSDERWVYRAWERPEQSVTDVYRPDDVATSTFWRSIWSVPICHAEGGWMRDVERVCEAIPQMEKITITTLDIAKAVRPLPNWKSPGPDGLHNFWLKWYSSSHALLASQFQSSLESGSLPQFLTTGITHLLHKTGSPAEPKNYRPITCLSTVYKLLTSILRAKINEHIESNSIMSASQNGCRKGSRGTKELLLIDMAISQQVRRSRKDLSTCWIDYKKAYDSVPHTWLMKVLELYKIDATLRTFLESCMRQWKTVLRYPGCQPIQGSDEPVWIKRGIFQGDSLSPLWFCLALNPLSTLLEDSGLGYRLRRGGQAISHLLYMDDLKLFAPNNLRLMELLKVTETFSSAIRMEFGVDKCAVMHVKKGEIMESEGIQLSDSIQVRSLSSTESYKYLGMSEALGINGTDMKQSLRERFFGRLKKVLNSLLSGGNKVRAFNGWVMPVLMYTFGILKWTQTELDALDRRVRTLLTANRMHHPRSSVMRLYIPRKCGGRGFLNAKTLHNREMCSLREYFLKADVGMHRDVVAVDKGLTPLSMAKENWRKPVILTTDDRKEVWKGKELHGRFYRALYGSDVDFSASVAWLRFGDLFGETEGFVCAIMDEVILTNNYRKHIMKDGTVDVCRACHRPGESIRHIISGCSRLANGEYLHRHNQVARIIHQQLALKYKLVDSEVPYYKYVPDPVLENDHVTLYWDRSIITDRTIVANKPDIVVIDRLARRTMIIDVTIPHDENLVKAEKEKQIKYLDLAHEVVDMWNVDSAVIVPIVITANGLMAKSFDDHLSKLALRGWIKGLIQKAVLLDTARIVRRFLSLEP

SEQ ID NO: 28223 - protein, 1199 aa, Mamestra brassicae
MLTRAALQRARPPPPDPSLSSASPPPDIGSPLSPAVAVASSSSDEYFSPPTSPTPVRRQGRGRPPRGLGPRGQPAPSRVPATGGCVQRMRWTQSMNENVMRAYYGSTEGGTNLTAYRFRMLSLFQDLEPTVNVSAQRLSDQVRVIQRNHRLDDAALDRLRSEVLNNLIISTPTQTAVQAPVNGRITPRPNNVSDEVDDRVVTVSSQCNDRLRSALEDALREYRSTPTELRPRLPRLPMHKKNRALVCALDSLLQNIFESSESLVDTHSILYCGAVAACRIANVKFPGCDEAIRPKPAAPAWQRRIERRIDETRALIGKLYCFREGNTRPRVMRFVRRAFSGTEISPRDFTSRVTERIDFLKQKVCAWASRIHRYKRRVDRYSQNRMFQSDERWVYRAWERPEQSVTDVCRPDDVATSIFWRSIWSVPICHAEGGWMRDVERVCEAIPQMEKITITTLDVAKAVRPLPNWKSPGPDGLHNFWLKWYSSSHALLASQFQSSLDSGSLPQFLTTGVTHLLHKTGSPAEPKNYRPITCLSTVYKLLTSILRAKINEHIESNSIMSASQNGCRKGSRGTKELLLIDMAISQKVRRSRKDLSTCWIDYKKAYDSVPHTWLMKVLELYKIDATLRTFLESCMRQWKTVLRYPGCRPIQGSDEPVWIKRGIFQGDSLSPLWFCLALNPLSTLLEDSGLGYRLRRGGQAISHLLYMDDLKLFAPNNLRLMELLKVTETFSSAIRMEFVVDKCAVMHVKKGEIMESEGIHLSDSIQVRSLSSTETYKYLGMLEALGINGTDMKQSLRERFFGRLKKVLNSLLSGGNKVRAFNGWVMPVLMYTFGILKWTQTELDALDRRVRTLLTANRMHHPRSSVMRLYIPRKCGGRGFLNAKTLHNREMCSLREYFLKADVGMHRDVVAVDKGLTPLSMAKENWRTPVILTTDDRKEVWKGKELHGRFYRALHGSDVDFSASVAWLRFGDLFGETEGFVCAIMDEVILTNNYRRHIMKDGTVDMCRACHRPGESIRHIISGCSRLANGEYLHRHNQVARIIHQQLALKYNLVDSEVPYYKYVPDPVLENDHVTLYWDRSIITDRTIVANKLDIVVIDRLARRTMIIDVTIPHDENLVKAEKEKQIKYLDLAHEVVDIWNVESAVIVPIVVTANGLMAKSFDDHLSKLALRSWVKGLIQKAVLLDTARIVRRFLSLEP

SEQ ID NO: 28224 - protein, 1199 aa, Noctua fimbriata
MITRAAYRRARLTTPDSPLSSASPPPDPGSPVLPAAAVASSSSDEYFSPPTSPTPVRRQGRGRPPRSLGLRGHPAPSRVPAAGGCVQRMRWTHSINENVMRAYYGSTEGGTNLTAYRVRMLSLFQVLEPTVNVSAQRLSDQVRVIQRNHMLDDAVLDRLRSEVLSNRVILTPAQTAVQASVIDATPPRFNPAVVEEDDRVAVVSNQCNDRLRSALEDALCEYRSTPTELRPRLPRLPMHNKNRALVCALDSQLKNIFESSENLVDTHSILYCGAVAACRLANVKFPNCDVATRPKPAVPAWQYRIERRIDGARVLIGKLHCFREGNTRPRVMRFVRRAFSRTGISPQEYMSRVTERIDFLKQKVYAWANRIRRYKRRVDRYSQNRMFQSDEKWVYRAWERPELNMTDVCRPDDAATSSFWRSIWSVPVCHTEADWMRDVERVCEPMPEMEPILITPLDIARAVRPLPNWKSPGPDGLHNFWLKWLSSSHTCLASQFQSSLESGSLPQFLTTGVTHLLHKSGSPAEPKNYRPITCLSTVYKLLTSILRAKINTHIDKNSIMSASQNGCRNGSRGTKELLLIDMAISQQVRRSRKDLSTCWIDYKKAYDSVPHTWLMRVLELYKIDATLRAFLESCMGQWRTVLRYPGCRQIQGNDEPVWIKRGIFQGDSLSPLWFCLALNPLGTLLEDSGLGYRLRRGGQVISHLLYMDDLKLFAPNKLQLMELLKVTENFSSAIRMEFGVDKCAVMYVKQGEIMESEGIQLSDSIHLRTLSSTESYKYLGMSEALGINVTDMKQSLKERFFGRLNKVLHSLLSGGNKVRAFNGWVMPVLMYSFGVLKWTQTELDALDRRVRTLLTANRMHHPRSSVMRLYIPRKCGGRGFLNAKSLHNREMCSLREYFLKVEVGMHRDVVAVDKGLTPLSMAKENWRKPEVLTTDDRKEVWQGKELHGRFYRALHGPDVDFLASVSWLRFGDLFGETEGFVCAIMDEVMLTNNYRKYIMKDGTVDVCRACHRPGESIRHIISGCSRLANGEYLHRHNQVARIIHQQLALKYKLVESEVPYYKYVPDPVLEKDHVTLYWDQSIITDRTIVANKPDIVVIDRSARRVMIVDVTIPHDENLVKAEKEKQIKYLDLAHEVVDMWNVNSAIIVPIVVTANGLIAKSLDDHLSKLSLGGWIKGLIQKAVLLDTARIVRRFLSLEP

SEQ ID NO: 28225 - protein, 1206 aa, Noctua fimbriata
MITRSRAKQLQEAHTPSPGSSLSSASQPPRRATSVSTVSPVAAVASSSSDEFFSPPSTPPPSPRRRGRGRPPAGLGPRGQPAPNRVPAAGGNVSRMRWTQSINEQVMRAYYGATEGGTNLTAYRVGMLSLFQVLEPTVNVSAQRLSDQVRVIQRNHMLDDAVLDRLRSEVLNNRIVLTPAQTAVQASVIDATPPRFNPAVVEEDDRVAVVSSQCNDRLRSALEDALREYRSTPTELRPRLPRLPMHNKNRALVCALDSQLENIFESSENLVDTHSILYCGAVAACRLANVKFPNCDVATRPKPAVPAWQRRIERRIDGARVLIGKLHCFREGNTRPRVMRFVRRAFSGTGISPQEYMSRVTERIDFLKQKVYAWANRIRRYKRRVDRYSQNRMFQSDERWVYRAWERPELNMTDVCRPDDAATSSFWRSIWSVPVCHTEADWMRDVERVCEPIPEMEPILITPLDIARAVRPLPNWKSPGPDGLHNFWLKWLSSSHTCLASQFQSSLESGSLPQFLTTGVTHLLHKSGSPAEPKNYRPITCLSTVYKLLTSILRAKINTHIDKNSIMSASQNGCRNGSRGTKELLLIDMAISQQVRRSRKDLSTCWIDYKKAYDSVPHTWLMRVLELYKIDATLRAFLESCMGQWRTVLRYPGCRQIQGNDEPVWIKRGIFQGDSLSPLWFCLALNPLSTLLEDSGLGYRLRRGGQVISHLLYMDDLKLFAPNKLRLMELLKVTETFSSAIRMEFGVDKCAVMYVKQGEIMESEGIQLSDSIHLRILSSTESYKYLGMSEALGINVTDMKQSLKERFFGRLNKVLHSLLSGGNKVRAFNGWVMPVLMYSFGVLKWTQTELDALDRRVRTLLTANRMHHPRSSVMRLYIPRKCGGRGFLNAKSLHNREMCSLREYFLKVEVGMHRDVVAVDKGLTPLSMAKENWRKPEVLTTDDRKEVWQGKELHGRFYRALHGPDVDFLASVSWLRFGDLFGETEGFVCAIMDEVMLTNNYRKYIMKDGTVDVCRACHRPGESIRHIISGCSRLANGEYLHRHNQVARIIHQQLALKYKLVESEVPYYKYVPDPVLEKDHVTLYWDQSIITDRTIVANKPDIVVIDRSARRVMIVDVTIPHDENLVKAEKEKQIKYLDLAHEVVDMWNVNSAIIVPIVVTANGLIAKSLDDHLSRLSLGGWIKGLIQKVVLLDTARIVRRFLSLEP

SEQ ID NO: 28226 - protein, 1111 aa, Noctua fimbriata
MRWTHSINENVMRAYYGSTEGGTNLTAYRVGMLSLFQVLEPTVNVSAQRLSDQVRVIQRNHMLDDAVLDRLRSEVLSNRIVLTPAQTALQALVIDATPPRFNPAVVEEDDRVAVVSSQCNDRLRSALEDALREYRSTPTELRPRLPRLPMHNKNRALVCALDSQLENIFESSENLVDTHSILYCGAVAACRLANVKFPNCDVATRPKPAVPAWQRRIERRIDGARVLIGKLHCFREGNTRPRVMRFVRRAFSGTGSSPQEYMSRVTERIDFLKQKVYAWANRIRRYKRRVDRYSQNRMFQSDERWVYRAWERSELNMTDVCRPDDAATSSFWRSIWSVPVCHTEADWMRDVERVCEPIPEMEPILITHLDIARAVRPLPNWKSPGPDGLHNFWLKWLSSSHTCLASQFQSSLETGSLPQFLTTGVTHLLHKSGSPAEPKNYRPITCLSTVYELLTSILRAKINTHIDKNSIMSASQNGCRNGSRGTKELLLIDMAISQQVRRSRKDLSTCWIDYKKAYDSVPHTWLMRVLELYKIDATLRAFLESCMGQWRTVLRYPGCRQIQGNDEPVWIKRGIFQGDSLSPLWFCLALNPLSTLLEDSGLGYRLRRGGQVISHLLYMDDLKLFAPNKLQLMELLKVTETFSSAIRMEFGVDKCAVMYVKRGEIMESEGIQLSDSIHLRSLSSSESYKYLGMSEALGINVTDMKQSLKERFFGRLNKVLHSLLSGGNKVRALNGWVMPVLMYSFGVLKWTQTELDALDRRVRTLLTANRMHHPRSSVMRLYIPRKCGGRGFLNAKSLHNREMCSLREYFLKVEVGMHRDVVAVDKGLTPLSMAKENWRKPEVLTTDDRKEVWQGKELHGRFYRALHGPDVDFLASVSWLRFGDLFGETEGFVCAIMDEVMLTNNYRKYIMKDGTVDVCRACHRPGESIRHIISGCSRLANGEYLHRHNQVARIIHQQLALKYKLVESEVPYYKYVPDPVLEKDHVTLYWDQSIITDRTIVANKPDIVVIDRSARRVMIVDVTIPHDENLVKAEKEKQIKYLDLAHEVVDMWHMNSAVIVPIVVTANGLIAKSLDDHLSKLSLGGWIKGLIQKAVLLDTARIVRRFLSLEP

SEQ ID NO: 28227 - protein, 928 aa, Atethmia centrago
MRFASIGPLRPNLDPDYHAYPCTRKIGRWYVPWTRCLRISSRAARIFAACRLANVKFPNCDGATRPKPAVPAWQCRIERRIDGARVLIGKLYCFREGNTRSRVMRFVRRAFSGTGISPREYMSRVTERIDFLKQKVCAWASRIRRYKRRVDRYTQNRMFQSDERWVYRAWERPEQNETDVCRPDDATTTAFWRSIWSVPVCHAEADWMRDVERVCETIPEMEVVIITPSDIARAVRPLPNWKSPGPDGLHNFWLKWLTSSHTCLASQFQSSLESGSLPQFLTTGIIHLLHKSGSPTEPKNYRPITCSSTVYKVLTSILRAKINTHIDSNSIMSASQNGCRNGSRGTKELLLIDMAISQQVRRFRKDLSTCWIDYKKAYDSVPHTWLMRVLELYKIDTTLRTFLESCMGQWRTVLRYPGCRQIQGNDEPVWIKRGIFQGDSLSPLWFCLALNPLSTLLEDSGLGYRLRRGGQVISHLLYMDDLKIFAPNKLQLMELLKVNETFSSAIRMEFGVDKCAVMHVKRGEIMESEGIQLSDSIHLRSLSSPESYKYLGMSEALGINVTDMKQSLKERFFGRLKKVLISPLSGGNKVRAFNGWVMPVLMYSFGILKWTQTELDALDRRVRTLLTANRMHHPRSSVMRLYIPRKCGGRGFLNAKSLHNREICSLREYFLKTEVGMHRDVVAVNKGLTPLSMAKENWCKPVIFTTDDRKEIWQNKELHGRFCRALHEPDVDFLASVSWLRFGDLFGETEGFVCAIMDEVILTNNYRRHIMKDGTVDVCRACHRPGESIRHIISGCSRLANGEYLHRHNQVARIIHQQLALKYKLVNSEVPYYKYAPDPVLENDHVTLYWDRSIITDRTIVANKPDIVVIDRLARRAMIVDVTIPHDENLVKAEKEKQIKYLDLAHEVVDMWNVNSARIVRRFLSLEP

SEQ ID NO: 28228 - protein, 1187 aa, Atethmia centrago
MSLSSASPPPVPSATVSAMTTPTAAVASSSSDEYFSPPSSPTPVRRQERSRPPKSLGLRGHPAPSRVPAAGGCVQRMKWTQSMNENVMRAYYRSTEGGTNLTAYRVKMLSLFQELEPAVSVSAQRLSDQVRVIQRNRRLDDATLDRLRSEVLSNYIISTPVQTAVHTPIIDVIPPRSNHGVEEEDDRAATVSSQCNVRLRSALEDAFREYRSTPTELRPRLPRLPMHKKNRALMCALDSQLKVFFESSEDLVDTHSILYCAAVAACRLANVKFPNSDGATRPKPAVLAWQCRIERRIDKARVLIGKLYCFREGNTRPRVMRFVRRAFPGTGISPREYMSHITERIDFLKQKVCAWASRIRRYKRRVDRYTQNRMFQSDERWVYRAWERPKQNVTDVCRPDDATTTAFWRSIWSVPVCHVEADWMRDVERVCETIPEMEVVIITPSDIARAVRPLPNWKSPGPDGLHNFWLKWLTSSHTCVASQFQSSLESGSLPQFMTTGITHLLHKSGSPAEPKNYRPITCLSTVYKLLTSILRAKINTHIDSNSIMSASQNGCRNGSRGTKELLLIDMAISQQVRRSRKDLSTCWIDYKKAYDSVPHTWLMRVLELYKIDTTLRTFLESCMGQWRTVLRYPGCRQIQGNDEPVWIKQGIFQGDSLSPLWFCLALNPLSMQLEDSGLGYRLRRGGQVISHLLYMDDLKIFAPNKLQLMKLLKVTETFSSAIRMEFGVDKCAVMHVKRGEIMESEGIQLSDSIHLRSLSSPESYKYLGMSEALGINVTDMKQSLKERFFGRLKKVLISLLSGGNKVRAFNGWVMPVLMYSFGILKWTQTELDALDRRVRILLTANRMHHPRSSVMRLYIPRKCGGRGFLNAKTLHNREICSLREYFLKTEVGMHRDVVAVDKGLTPLSMAKENWCKPVVLTTDDRKEIWQSKELHGRFYRALHEPDVDFLASVSWLRFGDLFGETEGFVCAIMDEVILTNNYRRHIMKDGTVDVCRACHRPGESIRHIISGCSRLVNGEYLHRHNQVARIIHQQLALKYKLVNSEVPYYKYVPDPVLENDHVTLYWDRSIITDRTIVANKPDIVVIDRLARRAMIVDVTIPHDDNLVKAEKEKQIKYLDLAHEVVDMWNVNSAVIVPIVVTANGLMARSLNHHLSRLALDGWIKGLIQKAVLLDTARIVRRFLSLEP

SEQ ID NO: 28229 - protein, 868 aa, Atethmia centrago
MRFVRRAFSETGISPREYMSHITERIDFLKQKVCAWASRIRRYKRRVDRYTQNRMFQTDERWVYRAWERPKQNETDVCRPDDATTTAFWRSIWSVPVCHVEADWMQDVERVCETIPEMEVVIITPSDIARAVRPLPNWKSRGPDGLHNFWLKWLTSSHTCLASQFQSSLESGSLPQFMTTGITHLLYKSGSPAEPKNYRPITCLSTVYKLLTSILRAKINTHIDSNSIMSASQNGCRNGSRGTKELLLIDMAISQQVRRSRKDLSTCWIDYKKAYDSVPHTWLMRVLELYKIDMTLRTFLESCMGQWRTVLRYPGCRQIQGNDESVWIKRGIFQGDSLSPLWFCLALNPLSMQLEDSGLGYRLRRGGQVISHLLYMDDLKIFAPNKLQLMELLKVTETFSSAIRMEFGVDKCAVMHVKRGGNLESEGIQLSDSIHLRSLSSPESYKYLGMSEALGINVTDMKQSLKEHFFGRLKKVLISLLSGGNKVRAFNGWVMPVLMYSFGILKWTQTELDALDRRVRTLLTANRMHHPRSSVMRLYIPRKCGGRGFLNAKTLHNREICSLREYFLKTEVGMYRDVVAVDKGLTPLSMAKENWCKPVVLTTDDRKEIWQNKELHGRFYRALHDTDVDFLASVSWLRFGDLFGETEGFVCAIMDEVILTNNYRRHIMKDGTVDVCRACHRPGESIRHIISGCSRLANGEYLHRHNQVARIIHQQLALKYKLVNSEVPYYKYVPDPVLENDHVTLYWDRSIITDRTIVANKPDIVVIDRLARRAMIVDVTIPHDDNLVKAEKEKQIKYLDLAHEVVDMWNVNSAVIVPIVVTANGLMARSLNHHLSRLTLDGWIKGLIQKAVLLDTARIVRRFLSLEP

SEQ ID NO: 28230 - protein, 1203 aa, Atethmia centrago
MLTRAASKRARPPPPDSSLSSASPPPVSSPTVSAVITPAAVVASSSSDEYFSPPTSPTPVRRQGRDRPPKSLGLRGHPAPSRVPAAGGCVQRMRWTQSMNENVMRAYYGSTEGGTNLTAYRVRMLSLFQELEPTVNVSAQRLSDQVRVIQRNRRLDDATLDRLRSEVLSNYIISTPAQTAVHTPIIDVIPPRSNHGVEEEDDRAATVSSQCNVRLRSALEDAFREYRSTPTELRPRLPRLPMHKKNRALMCALDSQLKVFFESSEDLVDTHSILYCAAVAACRLANVKFPNSDGATRPKPAVPAWQCRIERRIDKARVLIGKLYCFREGNTRPRVMRFVRRAFSGTGISPREYMSHITERIDFLKQKVCAWASRIRRYKRRVDRYTQNRMFQSDERWVYRAWERPKQNVTDVCRPDDATTTAFWRSIWSVPVCHVEADWMRDVERVCETIPEMEVVIITPSDIARAVRPLPNWKSPGPDGLHNFWLKWLTSSHTCLASQFQSSLESGSLPQFMTTGITHLLHKSGSPAEPKNYRPITCLSTVYKLLTSILRAKINTHIDSNSIMSASQNGCRNGSRGTKELLLIDMAISQQVRRSRKDLSTCWIDYKKAYDSVPHTWLMRVLELYKIDTTLRTFLESCMGQWRTVLRYPGCRQIQGNDEPVWIKRGIFQGDSLSPLWFCLALNPLSMQLEDSGLGYRLRRGGQIISHLLYMDDLKIFAPNKLQLMKLLKVTETFSSAIRMEFGVDKCAVMHVKRGEIMESEGIQLSDSIHLRSLSSPESYKYLGMSEALGINVTDMKQSLKERFFGRLKKVLISLLSGGNKVRAFNSWVMPVLTYSFGILKWTQTELDALDRRVRTLLTANRMHHPRSSVMRLYIPRKCGGRGFLNAKTLHNREICSLREYFLKTEVGMHRDVVAVDKGLTPLSMAKENWCKPVVLTTDDRKEIWQSKELHGRFYRALHEPDVDFLASVSWLRFGDLFGETEGFVCAIMDEVILTNNYRRHIMKDGTVDVCRACHRPGESIRHIISGCSRLANGEYLHRHNQVARIIHQQLALKYKLVNSEVPYYKYVPDPVLENDHVTLYWDRSIITDRTIVANKPDIVVIDRLARRAMIVDVTIPHDDNLVKAEKEKQIKYLDLAHEVVDMWNVNSAVIVPIVVTANGLMARSLNHHLSRLALDGWIKGLIQKAVLLDTARIVRRFLSLEP

SEQ ID NO: 28231 - protein, 1203 aa, Atethmia centrago
MLTRAASKRARPPPPDSSLSSASPPPVSSPTVSAVITPAAVVASSSSDEYFSPPTSPTPVRRQGRDRPPKSLGLRGHPAPSRVPAAGGCVQRMRWTQSMNENVMRAYYGSTEGGTNLTAYRVRMLSLFQELEPTVNVSAQRLSDQVRVIQRNRRLDDATLDRLRSEVLSNYIISTPAQTAVHTPIIDVIPPRSNHGVEEEDDRAATVSSQCNVRLWSALEDAFREYRSTPTELRPRLPRLPMHKKNRALMCALDSQLKVFFESSEDLVDTHSILYCAAVAACRLANVKFPNSDGATRPKPAVPAWQCRIERRIDKARVLIGKLYCFREGNTRPRVMRFVRRAFSGTGISPREYMSHITERIDFLKQKVCAWASRIRRYKRRVDRYTQNRMFQSDERWVYRAWERPKQNVTDVCRPDDATTTAFWRSIWSVPVCHVEADWMRDVERVCETIPEMEVVIITPSDIARAVRPLPNWKSPGPDGLHNFWLKWLTSSHTCLASQFQSSLESGSLPQFMTTGITHLLHKSGSPAEPKNYRPITCLSTVYKLLTSILRAKINTHIDSNSIMSASQNGCRNGSRGTKELLLIDMAISQQVRRSRKDLSTCWIDYKKAYDTVPHTWLMRVLELYKIDTTLRTFLESCMGQWRTVLRYPGCRQIQGNDEPVWIKRGIFQGDSLSPLWFCLALNPLSMQLEDSGLGYRLRRGGQIISHLLYMDDLKIFAPNKLQLMKLLKVTETFSSAIRMEFGVDKCAVMHVKRGEIMESEGIQLSDSIHLRSLSSPESYKYLGMSEALGINVTDMKQSLKERFFGRLKKVLISLLSGGNKVRAFNSWVMPVLTYSFGILKWTQTELDALDRRVRTLLTANRMHHPRSSVMRLYIPRKCGGRGFLNAKTLHNREICSLREYFLKTEVGMHRDVVAVDKGLTPLSMAKENWCKPVVLTTDDRKEIWQSKELHGRFYRALHEPDVDFLASVSWLRFGDLFGETEGFVCAIMDEVILTNNYRRHIMKDGTVDVCRACHRPGESIRHIISGCSRLANGEYLHRHNQVARIIHQQLALKYKLVNSEVPYYKYVPDPVLENDHVTLYWDRSIITDRTIVANKPDIVVIDRLARRAMIVDVTIPHDDNLVKAEKEKQIKYLDLAHEVVDMWNVNSAVIVPIVVTANGLMARSLNHHLSRLALDGWIKGLIQKAVLLDTARIVRRFLSLEP

SEQ ID NO: 28232 - protein, 962 aa, Atethmia centrago
MHKKNRALVCTLDSLLKDFFESSEDLVDTHSILYCAAVAACRLANVKFPNCDGATRPKPAVPAWQCRIERRIDGARVLIGKLYCFREGNTRPRVMRFVRRAFSGTGISPREYMSRVTERIDFLKQKVCAWASRIRRYKRRVDRYTQNRMFQSDERWVYRAWERPEQNETDVCRPDDATTTAFWRSIWSVPICHAEADWMRDVERVCETIPEMEVVIITPSDIARAVRPLPNWKSPGPDGLHNFWLKWLTSSHTCLASQFQSSLESGSLPQFLTTGITHLLHKSGSPAEPKNYRPITCLSTVYKLLTSILRAKINTHIDSNSIMSAFQNGCRNGSRGTKELLLIDMAISQQVRRFRKDLSTCWIDYKKAYDSVPHTWLMRVLEFYKIDTTLRTFLESCMGQWRTVLRYPGCRQIQGNDEPVWIKRGIFQGDSLSPLWFCLALNPLSTLLEDSGLGYRLRRGGQVISHLLYMDDLKIFAPNKLQLMELLKVTETFSSAIRMEFGVDKCAVMHVKRGEIMESEGIQLSDSIHLRSLSSPESYKYLGMSEALGINVTDMKQSLKERFFGRLKKVLISPLSGGNKVRAFNGWVMPVLMYSFGILKWTQTELDALDRRVRTLLTANRMHHPRSSVMRLYIPRKCGGRGFLNAKTLHNREICSLREYFLKTEVGMHRDVVAVDKGLTPLSMAKENWCKPVILTTDDRKEIWQNKELHGRFYRALHEPDVVFLASVSWLRFGDLFGETEGFVCAIMDEVILTNNYRRHIMKDGTVDVCRACHRPGESIRHIISGCSRLANGEYLHRHNQVARIIHQQLALKYKLVNSEVPYYKYALDPVLENDHVTLYWDRSIITDRTIVANKPDIVLIDRLARRAMIVDVTIPHDENLVKAEKEKQIKYLDLAHEVVDMWNVDSAVIVPIVVTANGLMAESLNHHLSRLSLGGWIKGLIQKAVLLDTARIVRRFLSLES

SEQ ID NO: 28233 - protein, 1111 aa, Atethmia centrago
MRWTQSMNENVMRAYYGSTEGGTNLTAYRVRMLSLFQELEPTVNVSAQRLSDQVRVIQRNRRLDDATLDRLRSEVLSNYIISTPAQTAVHTPIIDVIPPRSNHGVEEEDDRAATVSSQCNVRLRSALEDAFREYRSTPTELRPRLPRLPMHKKNRALMCALDSQLKVFFESSEDLVDTHSILYCAAVAACRLANVKFPNSDGATRPKSAVPAWQCRIERRIDKARVLIGKLYCFREGNTRPRVMRFVRRAFSGTRISPREYMSHITERIDFLKQKVCAWASRIRRYKRRVDRYTQNRMFQSDERWVYRAWERPKQNVTDVCRPDDATTTAFWRSIWSVPVCHVEADWMRDVERVCETIPEMEVVIITPSDIARAVRPLPNWKSPGPDGLHNFWLKWLTSSHTCLASQFQSSLESGSLPQFMTTGITHLLHKSGSPAEPKNYRPITCLSTVYKLLTSILRAKINTHIDSNSIMSASQNGCRNGSRGTKELLLIDMAISQQVRRSRKDLSTCWIDYKKAYDSVPHTWLMRVLELYKIDTTLRTFLESCMGQWRTVLRYPGCRQIQGNDEPVWIKRGIFQGDSLSPLWFCLALNPLSMQLEDSGLGYRLRRGGQIISHLLYMDDLKIFAPNKLQLMKLLKVTETFSSAIRMEFGVDKCAVMHVKRGEIMESEGIQLSDSIHLRSLSSPESYKYLGMSEALGINVTDMKQSLKERFFGRLKKVLISLLSGGNKVRAFNSWVMPVLTYSFGILKWTQTELDALDRRVRTLLTANRMHHPRSSVMRLYIPRKCGGRGFLNAKTLHNREICSLREYFLKTEVGMHRDVVAVDKGLTPLSMAKENWCKPVVLTTDDRKEIWQSKELHGRFYRALHEPDVDFLASVSWLRFGDLFGETEGFVCAIMDEVILTKNYRRHIMKDGTVDVCRACHRPGESIRHIISGCSRLANGEYLHRHNQVARIIHQQLALKYKLVNSEVPYYKYVPDPVLENDHVTLYWDRSIITDRTIVANKPDIVVIDRLARRAMIVDVTIPHDDNLVKAEKEKQIKYLDLAHEVVDMWNVNSAVIVPIVVTANGLMARSLNHHLSRLALDGWIKGLIQKAVLLDTARIVRRFLSLEP

SEQ ID NO: 28234 - protein, 1032 aa, Atethmia centrago
MYRTLETKILLFHIIIIIITRSNHDVEEEDDRVATVSSQCNVRLRSALEDAFREYRSTPTELRPRLPRLPMHKKNRALVCTLDSLLKDFFESSEDLVDTHSILYCAAVAACRLANVKFPNCDGATRPKPAVPAWQCRIERRIDGARVLIGKLYCFREGNTRPRVMRFVRRAFSGTGISPREYMSRVTERIDFLKQKVCAWASRIRRYKRRVDRYTQNRMFQSDERWVYRAWERPEQNETDVCRPDDATTTAFWRSIWSVPVCHAEADWMRDVERVCETITEMDVVIITPSDIARAVRPLPNWKSPGPDGLHNFWLKWLTSSHTCLASQFQSSLESGSLPQFLTTGITHLLHKSGSPAEPKNYRPITCLSTVYKLLTSILRAKINTHIDSNSIMSASQNGCRNGSRGTKELLLIDMAISQQVRRFRKDLSTCWIDYKKAYDSVPHTWLMRVLEFYKIDTTLRTFLESCMGQWRTVLRYPGCRQIQGNDEPVWIKRGIFQGDSLSPLWFCLALNPLSTLLEDSGLGYRLRRGGQVISHLLYMDDLKIFAPNKLQLMELLKVTETFSSAIRMEFGVDKCAVMHVKRGEIMESEGIQLSDSIHLRSLSSPESYKYLGMSEALGINVTDMKQSLKERFFGRLKKVLISPLSGGNKVRAFNGWVMPVLMYSFGILKWTQTELDALDRRVRTLLTANRMHHPRSSVMRLYIPRKCGGRGFLNAKTLHNREICSLREYFLKTEVGMHRDVVAVDKGLTPLSMAKENWCKPVILTTDDRKEIWQNKELHGRFYRALHEPDVDFLASVSWLRFGDLFGETEGFVCAIMDEVILTNNYRRHIMKDGTVDVCRACHRPGESIRHIISGCSRLANGEYLHRHNQVARIIHQQLALKYKLVNSEVPYYKYAPDPVLENDHVTLYWDRSIITDRTIVANKPDIVVIDRLARRAMIVDVTIPHDENLVKAEKEKQIKYLDLAHEVVDMWNVDSAVIVPIVVTANGLMAESLNHHLSRLSLGGWIKGLIQKAVLLDTARIVRRFLSLES

SEQ ID NO: 28235 - protein, 1201 aa, Mesoligia furuncula
MLTRSAARRAHLPPPDSSLSPAPPPPEPSPIESAVTPAVAVASSSSDEYFSPPTSPTPVRRQGRGRPPNSLGLRGHPAPSRVPATGGCVQRMRWTQSMNENVMRAYYGSTEGGINLTAYRDRMLSLFQELEPTVNVSAQRLSDQVRVIQRNHRLDDIALDRLRSEVLSNHIVSTSAQTAAQVSTVDAIPPRFNRVEEEDDRVDTVSSQCNVRLRSALEDALREYRSTPTELRPRLPRLPMHKKNRALVCALDSQLKNFFESSEDLVDTHSILYCAAVAACRLANVKFSSCDGATRPKPAVPAWQHRIERRIDGARVLIGKLYCFREGNTRPRVMRFVRRAFSGTGISPREYMSRVTERIDFLKQKVCAWASRIRRYKRRVDRYTQNRMFQSDERWVYRAWERPEQNVTDVCRPDDAATSAFWCSIWSMPVCHTEAGWMQDVERVCESVPEMEKVLITPSDVARAVRPLSNWKSPGPDGLHNFWLKWLISSHTCLASQFQSSLESGSLPQFLTTGVTHLLHKSGSPAEPKNYRPITCLSTVYKLLTSILRAKINKHIESNSIMSASQNGCRNGSRGTKELLLIDMAISQQVRRSRKDLSTCWIDYKKAYDSVPHTWLMRVLELYKIDATLRTFLESCMGQWKTVLRYPGCRQIQGNDEPVWIKRGIFQGDSLSPLWFCLALNPLSTLLEDSGLGYRLRRGGQVISHLLYMDDLKLFAPNKLRLMELLKVTKTFSSAIKMEFGVDKCAVMHVKRGEIMESEGIQLSDSISLRSLSSSESYKYLGMSEALGINDADMKQSLKERFFCRLKKVLISLLSGGNKVRAFNGWVMPVLMYSFGILKWTQTELDALDRRVRTLLTANRMHHPRSSVMRLYIPRKCGGRGFLNAKTLHNREVCSLREYFLKAEVGMHRDVVAVDKGLTPLSMAKENWRKPVVLSTDDRKRVWQSKELHGRFYRALHEPGVDFIASVSWLRFGDLFGETEGFVCAIMDEVILTNNYRRHIMKDGTVDVCRACHRPGESIRHIISGCSRLANGEYLHRHNQVARIIHQQLALKYKLVDSEVPYYKYVPDPVLENDHVTLYWDRSIITDRTIVANKPDIVVIDRLARRTMIVDVTIPHDGNLVKAEKEKQIKYLDLAHEVVDMWNVSSAIIVPIVVSANGLMAESLDQHLSRLSLGGWIKGLIQKAVLLDTARIVRRFLSLEP

SEQ ID NO: 28236 - protein, 962 aa, Mesoligia furuncula
MHKKNRALVCALDSQLNNFFESSVDLVDTHSILYCAAVAACRLANVKFPSCDGATRPKPAVPAWQRRVERRIDGARVLIGKLYCFREGNTRPRVMRFVRRAFSGTGISPREYMSRVTERIDFLKQKVCAWASRIRRYKRRVDRYTQNRMFQSDERWVYRAWERPEQNVTDVCRPDDAATSAFWCSIWSVPVCHTEAGWMQDVERVCESVPEMETVLITPSDVARAVRPLSNWKSPGPDGLHNFWLKWLISSHTCLASQFQSSLESGSLPQFLTTGVTHLLHKSGSPAEPKNYRPITCLSTVYKLLTSILRAKINKHIESNSIMSTSQNGCRNGSRGTKELLLIDMAISQQVRRSRKDLSTCWIDYKKAYDSVPHTWLMRVLELYKIDATLRTFLESCMGQWKTVLRYPGCRQIQGNDEPVWIKRGIFQGDSLSPLWFCLALNPLSTLLEDSGLGYRLRRGGQVISHLLYMDDLKLFAPNKLRLMELLKVTKTFSSAIRMEFGVDKCAVMHVKRGEIMESEGIQLSDSISLRSLSSSESYKYLGMSEALGINDADMKQSLKERFFCRLKKVLISLLSGGNKVRAFNGWVMPVLMYSFGILKWTQTELDALDRRVRTLLTANRMHHPRSSVMRLYIPRKCGGRGFLNAKTLHNREVCSLREYFFKTEVGMHRDVVAVDKGLTPLSMAKENWRKPVVLSTDDRKKVWQSKELHGRFYRALHEPGVDFIASVSWLRFGDLFGETEGFVCAIMDEVILTNNYRRHIMKDGTVDVCRACHRPGESIRHIIFGCSRLANGEYLHRHNQVARIIHQQLALKYKLVDSEVPYYKYVPDPVLENDHVTLYWDRSIITDRTIVANKPDIVVIDRLARRTMIVDVTIPHDGNLVKAEKEKKIKYLDLAHEVVDMWNVSSAVIVPIVVSANGLMAESLDQHLSRLSLGGWIKGLIQKAVLLDTARIVRRFLSLKP

SEQ ID NO: 28237 - protein, 868 aa, Mesoligia furuncula
MRFVRRAFSGTGISPREYMSRVTERIDFLKQKVCAWASRIRRYKRRVDRYTQNRMFQSDERWVYRAWERPEQNVTDVCRPDDAATSAFWCSIWSVPVCHTEAGWMQDVERVCESVPEMEKVLITPSDVARAVRPLSNWKSPGPDGLHNFWLKWLISSHTCLASQFQSSLESGSLPQFLTTGVTHLLHKSGSPAEPKNYRPITCLSTVYKLLTSILRAKINKHIESNSIMSASQNGCRNGSRGTKELLLIDMAISQQVRRSRKDLSTCWIDYKKAYDSVPHTWLMRVLELYKIDATLRTFLESCMGQWKTVLRYPGCRQIQGNDEPVWIKRGIFQGDSLSPLWFCLALNPLSTLLEDSGLGYRLRRGGQVISHLLYMDDLKLFAPNKLRLMELLKVTKTFSGAIKMEFGVDKCAVMHVKRGEIMESEGIQLSDSISLRSLSSSESYKYLGMSEALGINDADMKQSLKERFFCRLKKVLISLLSGGNKVRAFNGWVMPVLMYSFGILKWTQTELDALDRRVRTLLTANRMHHPRSSVMRLYIPRKCGGRGFLNAKTLHNREVCSLREYFLKAEVGMHRDVVAVDKGLTPLSMAKENWRKPVVLSTDDRKRVWQSKELHGRFYRALHESGVDFIASVSWLRFGDLFGETEGFVCAIMDEVILTNNYRRHIMKDGTVDVCRACHRPGESIRHIISGCSRLANGEYLHRHNQVARIIHQQLALKYKLVDSEVPYYKYVPDPVLENDHVTLYWDRSIITDRTIVANKPDIVVIDRLARRTMIVDVTIPHDGNLVKAEKEKQIKYLDLAHEVVDMWNVSSAIIVPIVVSANGLMAESLDQHLSRLSLGGWIKGLIQKAVLLDTARIVRRFLSLEP

SEQ ID NO: 28238 - protein, 1200 aa, Xestia c-nigrum
MITRAASRRALIPSPDSSLSSASPPPDPGSPVSPVAAVASSSSDEYFSPPTSPTPVRRAGRGRPPKGLGLRGQQAPSRVPATGGCVQRMKWTQLMNENVMRAYYGSTEGGTNLTAYRVRMLSLFQDLEPTVNASAQRLSDQVRVIQRNHLLDGAALDRLRSEVLSNRIILTPAQTAVQASSSIDANPPRSNPAVVEEDDRVATVSSQCNDRLRSALEDALHEYRSTSAELRPRLPRLPMHKKNRALVCALDSQLKNVFESSEDLVDTHSILFCGAVAACRLANVKFPNCDLATRPKPAVPAWQRRIERRIDGARVLIGKLHCFREGNTRPRVMRFVRRAFSGTEISPQEYMSRVTERIDFLKQKVYAWASRIRRYKRRVDRYSQNRMFQSDERWVYRAWERPQQNMTDVCRPDDAATSSFWRSIWSVPVCHSEADWMRDVERVCEPIPTMEPILITPLDIARAVRPLPNWKSPGPDGLHNFWLKWFSSSHTCLASQFQSSLESGSLPQFLTTGITHLLHKSGSPAEPKNYRPITCLSTVYKLLTSILRTKINTHVDSNSIMSTSQNGCRNGSRGTKELLLIDMAISQQVRRARKDLSICWIDYKKAYDSVPHSWLKRVLELYKIDATLRTFLESCMGQWRTVLRYPGCRQIQGNDEPVWIKRGIFQGDSLSPLWFCLALNPVSTLLENSGLGYRLRKDGQVISHLLYMDDLKLFAPNKLQLMELLKVTETFSSAIGMEFGVDKCAVMYVKRGKIMGSEGLQLSDSIHLRSLSSSESYKYLGMSEALGINVTDMKQSLNERFFGRLKKVLNSLLSGGNKVRAFNGWVMPVLMYSFGILKWTQTELDALDRRVRTLLTENRMHHPRSSVMRLYIPRKCGGRGFLNAKTLHNREVCSLREYFLKVDVGMHRDVVAVDKGLTPLSMAKENWRKPVVLTTDDRKKEWQGKELHGRFYRALHGPDVDFLASVSWLRFGDLFGETEGFVCAIMDEVMLTNNYRKYIMKDGTVDVCRACHCPGESIRHIISGCSRLANGEYLHRHNQVARIIHQQLALKFKLVESEVPYYKYVPDPVLVKDHVTLYWDQSIITDRTIVANKPDIVVIDRSARRVMIIDVTIPHDENLVKAEKEKQIKYLDLAHEVRDMWNMNSVIIVPIVVTANGLIAKSLDEHLSKLSLGGWIKGLIQKAVLLDTARIVRRFLSLQP

SEQ ID NO: 28239 - protein, 1050 aa, Xestia c-nigrum
MLDDTVLDRLRSESRSNLVTPASPMIAVQLQTIPCTPLRSDYDSEEDGDEVISVSTQCNAQLRSALEGAFREYRSTPPELRPRLPRLPMHKKNKALVCALDSQLSNCFDSSKDLADTHSILYCGAVAACRVAHVKFPNNDRTTRPKLAVPAWQCRIERRIGEARVLIGKLICFREGNTRPRVMRFVRRAFSGTDVSFRDYLARITERIDFLKQKICAWASRIRRYKRRVERYTQNRSFQSDERWVYRAWERPDQGVTDTRLPDDDAMCSFWRSIWSVPVSHTEGDWIRKVEQVCDQIQEMGAIIISPQDVACAVRPLPNWKSPGPDGLHNFWIKWFQRSHARLASQFQSALESGSLPQFMTTGITHLLHKSGSTAEPKNYRPITCLPTVYKVLTSILRAKINKHIESNSIMSTSQNGCRNGSRGTKELLLIDMAISQQVRRSRKNLSTCWIDYKKAYDSVPHTWLMRVLELYKINATLRAFLESCMGQWKTVLRYPGCRQIQGSDEPVWIKRGIFQGDSLSPLWFCLALNPLSTLLENSGLGYRLRKDGQVISHLLYMDDLKLFAPNKLQLLELLKVTETFSNAIRMEFGVDKCAVMYVKRGEIMESEGLQLSDSIHLRSLSSSESYKYLGMSEALGINVTDMKQSLRERFFGRLKKVLNSLLSGGNKVRAFNGWVMPVLMYSFGILKWTQTELDALDRRVRTLLTANRMHHPRSSMMRLYIPRKCGGRGFLNAKNLHNREVCSLREYFLEADVGMHRDVVSVDKGLTPLSLANGNWRKPKVLDTNDRREEWQGKELHGRFYRALHGPDVDFLASVSWLRFGDLFGETEGFVCAIMDEVMMTNNYRKYIVKDGTVDICRACHRPGESIRHIISGCSSLANGEYLHRHNLVARIIHQQLALKYNLVESEVPYYKYAPDPVLVNGNITLYWDRPITTDRTVVANRPDIVVIDRLERRTMIVDITVPHDENLVKAEQDKKNKYLDLAREVVDMWDVSTAIIVPIVVSANGLIAKSLDQHLRRLSLGSWIKGLIQKAVLLDTARIVRRFLSQEP

SEQ ID NO: 28240 - protein, 1111 aa, Xestia c-nigrum
MKWTQLMNENVMRAYYGSTEGGTNLTAYRVRMLSLFQDLEPTVNASAQRLSDQVRVIQRNHLLDGAALDRLRSEVLSNRIILTPAQTAVQASSIDTNPPRSNPAVVEEDDRVATVSSQCNDRLRSALEDALHEYRSTSAELRPRLPRLPMHKKNRALVCALDSQLKNVFESSEDLVDTQSILFCGAVAACRLANVKFPNCDLATRPKPAVPAWQRRIERRIDGARVLIGKLHCFREGNTRPRVMRFVRRAFLGTEISPQEYMSRVTERIDFLKQKVYAWASRIRRYKRRVDRYSQNRMFQSDERWVYRAWERPQQNMTDVCRPDDAATSSFWRSIWSVPVCHSEADWMRDVERVCEPIPTMEPILITPLDIARAVRPLPNWKSPGPDGLHNFWLKWFSSSHTCLASQFQSSLESGSLPQFLTTGITHLLHKSGSPAEPKNYRPITCLSTVYKLLTSILRTKINTHVDSNSIMSASQNGCWNGSRGTKELLLIDMAISQQVRRARKDLSTCWIDYKKAYDSVPHSWLKRVLELYKIDATLRTFLESCMGQWRTVLRYPGCRQIQGNDEPVWIKRGIFQGDSLSPLWFCLALNPVSTLLENSGLGYRLRKDGQVISHLLYMDDLKLFAPNKLQLMELLKVTETFSSAIGMEFGVDKCAVMYVKRGKIMGSEGLQLSDSIHLRSLSSSESYKYLGMSEALGINVTDMKQSLKERFFGRLKKVLNSLLSGGNKVRAFNGWVMPVLMYSFGILKWTQTELDALDRRVRTLLTENRMHHPRSSVMRLYIPRKCGGRGFLNAKTLHNREVCSLREYFLKADVGMHRDVVAVDKGLTPLSMAKENWRKPVVLTTDDRKKEWQGKELHGRFYRALHGPDVDFLASVSWLRFGDLFGETEGFVCAIMDEVMLTNNYRKYIMKDGTVDVCRACHCPGESIRHIISGCSRLANGEYLHRHNQVARIIHQQLALKFKLVESEVPYYKYVPDPVLVKDHVTLYWDQSIITDRTIVANKPDIVVIDRSARRVMIIDVTIPHDENLVKAEKEKQMKYLDLAHEVRDMWNMNSVIIVPIVVTANGLLAKSLDEHLSKLSLGGWIKGLIQKAVLLDTARIVRRFLSLQP

SEQ ID NO: 28241 - protein, 1200 aa, Xestia c-nigrum
MITRAASRRRARLPSPDSSLSSASPPPDPGSPVSTVAAVASSSSDEYFSPPTSPTPVRRAGRGRPPRSLGLRGQQAPSRVPATGGCVQRMRWTQSMNENAMRAYYGSTEGGTNLTAYRVRMLSLFQDLEPAVNVSAQRLSDQVRVIQRNHMLDDAALDRLRSEVLSNLIILTPAQTAVQASAIDATPPRSNPAVVEEDGRVATVSSQCNDRLRSALEDALREYRSTPTELRPRLPRLPMHKKNRALVCALDSQLKNVFESSEDLVDTHSILFCGAVAACRLANVKFPNCDLATRPKPAVPVWQRRIERRIDGARVLIGKLYCFREGNTRPRVMRFVRRAFSGTEISPQEYMSRVTERIDFLKQKVYAWASRIRRYKRRVDRYSQNRMFQCDERWVYRAWERPDQNVTDVCHPGDTATSSFWRSIWSVPVCHSEADWMRDVERVCEPIPEMAPVVITSLDIARAVRPLPNWKSPGPDGLHNFWLKWLSSSHTCLASQFQSSLESGSLPQFLTTGVTHLLHKSGSPTEPQNYRPITCLSTVYKLLTSILRTKINTHIDNNSIMSASQNGCRNGSRGTKELLLIDMAISQQVRRSRKDLSTCWIDYKKAYDSVPHSWLMRVLELYKIDATLCTFLKSCMGQWRTVLRYPGCRQIQGNDESVWIKRGIFQGDSLSPLWFCLALNPLSTLLENSGLGYQLRKDGQVISHLLYMDDLKLFAPNKLRLMELLKVTETFSNAIRMEFGVDKCAVMYVKRGEIMESEGLQLSDSIHLRSLSSSESYKYLGMSEALGINVTDMKQSLRERFFGRLKKVLNSLLSGGNKVRAFNGWVMPVLMYSFGILKWTQTELDALDRRVRTLLTENRMHHPRSSVMRLYIPRKCGGRGFLNVKTLHNREVCSLREYFLKAEVGMHRDVVAVDKGLTPLSMAKENWRKPVILTTDDRKKEWQGKVLHGRFYRALHGPDVDFLASVSWLRFGDLFGETEGFVCAIMDEVMLTNNYRKYIMKDGTVDVCRACHCPGESIRHIISGCSRLANGEYLHRHNQVARIIHQQLALKFKLVESEVPYYKYVPDPVLVKDHITLYWDQSIITDRTIVANKPDIVVIDRSARRVMIIDVTIPHDENLVKAEKEKQIKYLDLAHEVRDMWNMNSVIIVPIVVTANGLIAKSLDEHLSKLSLGGWIKGLIQKAVLLDTARIVRRFLSLQP

SEQ ID NO: 28242 - protein, 1203 aa, Omphaloscelis lunosa
MLTRSAARLARPPPPDFSLSSASPPPVPSPTVSATTTPAAVVASSSSDEYFSPPTSPTPVRRQGRGRPPKSLGLRGQPAPTRVPAAGGCVQRMRWTQSMNENVMRAYYGSTEGGTNLTAYRVRMLSLFQELEPTVNVSAQRLSDQVRVIQRNHRLDDTALDRLRSEVLSNHIVSTRAQTAAEASNVDATPPRFNDGVEEEDDRVVTVSSQCNNRLRSALEDAFREYRYTPTELRPRLPRTKPMHKKNRALVRALDSQLTNFFESSEDLIDTHSILYCAAVAACRLANVKFPNCDGAIRPKPVVPVWQCRIERRIDGARVLIGKLYCFREGNTRPRVMRFVRRAFSGTEISPQDYMSRVTERIDFLKKVCAWASRIRRYKRRVDRYTQNRMFQSDERWVYRAWERPEHNVTDVCRPDDAATSAFWRSIWSVPICHTEAGWMRDVERVCETIPVMDAVFITPLDVARAVRPLPNWKSPGPDGLHNFWLKWLSSSHTRLASQFQSSLESGPLPQFLTTGVTHLLHKSGNPAEPKNYRPITCLSTVYKVLTSILRTKINTHIDSNSIMSASQNGCRNGSRGTKELLLIDMAISQQVRRSRKDLSTCWIDYKKAYDSVPHTWLMRVLELYKVDTTLRTFLMSCMGQWRTVLRYPGCRQTQGNDEPVWIKRGIFQGDSLSPLWFCLALNPLSTLLEDSGLGYRLRRGGQVISHLLYMDDLKLFAPNKLRLMELLKVTETFSGAIRMEFGVDKCAVMHVKRGEIMESEGIQLSDSIHLRSLSSAENYRYLGMSESLGINVADMKQSLKERFFGRLKKVLISFLSGGNKVRAFNGWVMPVLMYSFGILKWTQTELDALDRRVRTLLTANRMHHPHSSVMRLYIPRKCGGRGFLNAKTLHNREVCSLREYFFKADVGMHRDVVAVDNGLTPLSMAKENWRKPVVLTTDDRKEVWQSKALHGRFFRALHEPGVDFLASVSWLRFGDLFWETEGFICAIMDEVILTNNYRRHIMKDGTVDVCRACHRPGESIRHIISGCSRLANGEYLHRHNQVARIIHQQLALKYKLVDSEVPYYKYVPDPVLENDHVTLYWDRSIITDRTIVANKPDIVVIDRLARHAMIVDVTIPHDENLVKAEKEKQIKYLDLAHEVVDMWNVSSAIIVPIVVTAYGLMAKSLDQHLSRLSLDGWIKRLIQKAVLLDTARIVRRFLSLQP

SEQ ID NO: 28243 - protein, 962 aa, Omphaloscelis lunosa
MHKKNRALMCALDSQLTNFFESSEDLIDTHSILYCAAVAACRLANVKFPNCDGATRPKPAVPAWQCRIERRIDGARVLIGKLYCFREGNTRPRVMRFVRRAFSGTEISPQDYMSRVTERIDFLKQKVCAWASRIRRYKRRVDRYTQNRMFQNDERWVYRAWERPEQNVTDVCRPDDAATSAFWRSIWSVPVCHTEAGWMQDVERVCETIPEMDAVFITPLDVARAVRPLPNWKSPGPDGLHNFWLKWLSSSHTCLASQFQSSLESGSLPQFLTTGVTHLLHKSGNPAEPKNYRPITCLSTVYKLLTSILRTKINTHIDSNSIMSVSQNGCRNGSRGTKELLLIDMAISQQVRRSRKDLSTCWIDYKKAYDSVPHTWLMRVLELYKVDTTLRTFLMSCMGQWRTVLRYPGCRRTQGNDEPVWIKRGIFQGDSLSPLWFCLALNPLSTLLEDSGLGYRLRRGGQVISHLLYMDDLKLFAPNKLRLMELLKVTETFSGAIRMEFGVDKCAVMHVKRGEIMESEGIQLSDSIHLRPLSSAENYRYLGMSESLGINVADMKQSLKERFFGRLKKVLISFLSGGNKVRAFNGWVMPVLMYSFGILKWTQTELDALDRRVRTLLTANRMHHPRSSVMRLYIPRKCGGRGFLNAKTLHNREVCSLREYFFKADVGMHRDVVAVDNGLTPLSMAKENWRKPVVLTTDDRKEIWQSKALHGRFYRALHEPSVDFLASVSWLRFGDLFGETEGFICAIMDEVILTNNYRRHIMKDGTVDVCRACHRPGESIRHIISGCSRLANGEYLHRHNQVARIIHQQLALKYKLVDSEVPYYKYVPDPVLENDHATLYWDRSIITDRTIVANKPDIVVIDRLARHAMIVDVTIPHDENLVKAEKEKQIKYLDLAHEVVGMWNVSSAIIVPIVVTANGLMAKSLDHHLSRLSLGGWIKRLIQKAVLLDTARIVRRFLSLQP

SEQ ID NO: 28244 - protein, 1203 aa, Omphaloscelis lunosa
MLTRSAARSARLPPPDSPLSSASPPPVPSPIVNAVSTPAAVVASSSSDEYFSPPTSPTPVRRQGRGRPPKSLGLRGQPAPRRVPAAGGCVQRMRWTQSMNENVMRAYYGSTEGGTNLTAYRVRMLSLFQELEPTVNVSAQRLSDQVRVIQRNHRLDDTALDRLRSEVLSNHIVSAREQTAAEASNIDPTPPRFNHGVEEEDDRVATVSSQCNNRLRSALEDAFREYRYTPTELRPRLPRLPMHKKNRALMCALDSQLTNFFESSEDLIDTHSILYCAAVAACRLANVKFPNCDGATRPKPAVPAWQCRIERRIDGARVLIGKLYCFREGNTRPRVMRFVRRAFSGTEISPQDYMSRVTERIDFLKQKVCAWASRIRRYKRRVDRYTQNRMFQSDERWVYRAWERPEQNVTDVCRPDDAATSAFWRSIWSVPVCHTEAGWMQDVERVCETIPEMDAVFITPLDVARAVRPLPNWKSPGPDGLHNFWLKWLSSSHTCLASQFQSSLESGSLPQFLTSGVTHLLHKSGNPAEPKNYRPITCLSTVYKLLTSILRTKINTHIDSNSIMSVSQNGCRNGSRGTKELLLIDMAISQQVRRSRKDLSTCWIDYKKAYDSVPHTWLMRVLELYKVDTTLRTFLMSCMGQWRTVLRYPGCRRTQGNDEPVWIKRGIFQGDSLSPLWFCLALNPLSTLLEDSGLGYRLRRGGQVISHLLYMDDLKLFAPNKLRLMELLKVTETFSGAIRMEFGVDKCAVMHVKRGEIMESEGIQLSDTIHLRPLSSAENYRYLGMSESLGINVADMKQSLKERFFGRLKKVLISFLSGGNKVRAFNGWVMPVLMYSFGILKWTQTELDALDRRVRTLLTANRMHHPRSSVMRLYIPRKCGGRGFLNAKTLHNREVCSLREYFFKADVGMHRDVVAVDNELTPLSMAKENWRKPVVLTTDDRKEIWQSKALHGRFYRALHEPSVDFLASVSWLRFGDLFGETEGFICAIMDEVILTNNYRRHIMKDGTVDVCRACHRPGESIRHIISGCSRLANGEYLHRHNQVARIIHQQLALKYKLVDSEVPYYKYVPDPVLENDHATLYWDRSIITDRTIVANKPDIVVIDRLPRHAMIVDVTIPHDENLVKAEKEKQIKYLDLAHEVVGMWNVSSAIIVPIVVTANGLMAKSLDHHLSRLSLGGWIKRLIQKAVLLDTARIVRRFLSLQP

SEQ ID NO: 28245 - protein, 1202 aa, Omphaloscelis lunosa
MLTRSAARRARLPPPDSPLSSASPPPVPSPIVNAVSTPAAVVASSSSDEYFSPPTSPTPVRRQGRGRPPRSLGLRGQPAPSRVPAAGGCVQRMRWTQLMNENVMRAYYGSTEGGTNLTAYRVRMLSLFQELEPTVNVSAQRLSDQVRVIQRNHRLDDTALDRLRSEVLSNHIVSTRAQTAAQESNIDPTPLRFNHGVEEDDRVATVSSQCNDRLRSALEDAFREYRYTPTELRPRLPRLPMHKKNRALVCALDSQLTNFFESSEDLIDTHSILYCAAVAACRLANVKFPNYDGATRPKPVVPAWQCRIERRIDGARVLIGKLYCFREGNTRPRVMRFVRRAFLGTGISPQEYMSRVTERIDFLKQKVCAWASRIRRYKRRVDRYTQNRMFQSDERWVYRAWERPEQNVTDVCRPDDAATSAFWRSIWSVPVCHTEAGWMQDVERVCETIPEMDAVFITPLDVARAVRPLPNWKSPGPDGLHNFWLKWLSSSHTRLASQFQSSLDSGLLPQFLTTGVTHLLHKSGNSAEPKNYRPITCLPTVYKLLTSILRTKINTHIDSNSIMSASQNGCRNGSRGTKELLLIDMAISQQVRRSRKDLSTCWIDYKKAYDSVPHTWLMRVLELYKVHTTLRTFLMSCMGQWRTVLRYPGCRQTQGNDEPVWIKRGIFQGDSLSPLWFCLALNPLSTLLEGSGLGYRLRRGGQVISHLLYMDDLKLFAPNKLRLMELLKVTETFSGAIRMEFGVDKCAVMHVKRGEIMESEGTQLSDSIHLRSLSSAENYRYLGMSESLGMNVAHMKQSLKERFFGRLKKVLISFLSGGNKVRAFNGWVMPVLMYSFGILKWTQTELDALDRRVRTLLTANRMHHPRSSVMRLYIPRKCGGRGFLNAKTLHNREVCSLREYFFKADVGMHRDVVAVDNGLTPLSMAKENWRKPVVLTTDDRKEVWQSKALHGRFYRALHEPGVDFLASVSWLRFGDLFGETEGFICAIMDEVILTNNYRRHIMKDGTVDVCRACHRPGESIRHIISGCSRLANGEYLHRHNQVARIIHQQLALKYKLVDSEVPYYKYVPDPVLENDHVTLYWDRSIITDRTIIANKPDIVVIDRLARRAMIVDVTIPHDENLVKAEKEKQIKYLDLAHEVVDMWNVSSAIIVPIVVTANGLMAESLDQHLSRLSLGGWIKRLIQKAVLLDTARIVRRFLSLQP

SEQ ID NO: 28246 - protein, 1202 aa, Sesamia nonagrioides
MLTRSATRKARPPPPDSLLRSASPPPVSSPIVNAVTTSAAAVASSSSDEYFSPPTSPTPVRRQGRGRPPKSLGLRGHPAPSRVPAVGGCVQRMRWSQTMNENVMRAYYGATEGGTNLTAYRERMLSLFQALEPTVNVSAQRLSDQVRVIQRNHRLDDTALDRLRSEVLSNQIAPTLTQTAALASIIDAVPPRSNRVEEEDDGVETVSSQYNDRLRSTLEDAFREYRFTPTDLRPRLPRLPMHKKNRALVSVLDSQLKNVFESSEDLIDTHSILFCGAVAACRLANIKFPNCDEANRPRPAVPAWQHRIERRIDGARVLIGKLYCFREGNTRPRVMRFVRQAFSGTGISPREYISHVTERIDFLKQKVCAWASRIRRYKRRVDRYTQNRMFQSDERWVYRAWERTEQNEADVCRPDDAATSAFWRSIWSVPVCHAEGDWIQDVEQVCEMIPEMDTILITPIDVATAVRSLPNWKSPGPDGLHNFWLKWLSSSHTCLASQFQSSLESGSLPQFLTTGITHLLHNSGSTAEPNNYRPITCLPTVYKVLTSILKAKINKHLDSNSIMSVSQNGCKSGSRGTKELLLIDMAISQQVRRSRKDLSTCWIDYKKAYDSVPHTWLMRVLELYKVNATLRTFLRSCMGQWKTVLRYPGSRRIQGNDEPVWIKRGIFQGDSLSPLWFCLALNPLSTLLEDSGLGYRLRRGGQVISHLLYMDDLKLFAPNKLHLMKLLNVTETFSSGIKMEFGVDKCAVMHVKRGQIMESEGITLPDSIYLRSLSSVESYKYLGMSEALGINDADMKQSLKERFFGRLKKVLKSLLSGGNKVRAFNGWVIPVLMYSFGILKWTQTELDALDRRVRTLLTANRMHHPRSSVMRLYIPRKCGGRGFLNAKTLHNREVCSLREHFLKTVVGMHHDVVTVDKGLTPLSMAKENWHKPIILTTNDRKMIWQSKELHGRFYRALHEPDVDFLASVSWLRFSDLFGETEGFVCAIMDEVILTNNYRRYIMRDGTIDVCRACHHPGESIRHIISGCSRLANGEYLHRHNQVARIIHQQLALKYKLVDSEVPYYKNVPDPVLENDHATLYWDRSIITDRTIVANKPDIVVIDRLARLAMIVDVTIPHDGNLVKAEKEKQIKYLDLAHEVVDMWNVNSAVIVPIVVSANGLIAKSLDQHLLRLSLGSWIKGLIQKAVLLDTARIVRRFLSLEP

SEQ ID NO: 28247 - protein, 1079 aa, Sesamia nonagrioides
MLSLFQALEPTVNVSAQRLSDQVRVIQRNHRLDDTALDRLRPEVLSNQIAPTLTQTAALASIIDAVPPRSNRVEEEDDGVETVSSQYNDRLRSTLEDAFREYRSTPTDLRPRLPRLPMHKKNRALVSALDSQLKNVFESSEDLIDTHSILFCGAVAACRLANIKFPNCDEANRPRPAVPAWQHRIECRIDGARVLIGKLYCFREGNTRPRVMRFVRQAFSGTGISPREYISHVTERIDFLKQKVCAWASRIRRYKRRVDRYTQNRMFQSDERWVYRAWERTEQNEADVCRPDDATTSAFWRSIWSVPVCHAEGDWIQDVEQVCEMIPEMDTILITPIDVATAVRSLPNWKSPGPDGLHNFWLKWLSSSHTCLASQFQSSLESGSLPQFLTTGITHLLHKSGSTAEPNNYRPITCLPTVYKVLTSILKAKIKKHLDSNSIMSVSQNGCRSGSRGTKELLLIDMAISQQVRRYRKDLSTCWIDYKKAYDSVPHTWLMRVLELYKVNATLRTFLRSCMGQWKTVLRYPGSRQIQGNDEPVWIKRGIFQGDSLSPLWFCLALNPLSTLLEDSGLGYRLRRGGQVISHLLYMDDLKLFAPNKLHLMKLLNVTETFSSGIKMEFGVDKCAVMHVKRGQIMESEGITLPDSIHLRSLSSVESYKYLGMSEALGINDADMKQSLKERFFGRLKKVLKSLLSGGNKVRAFNGWVMPVLMYSFGILKWTQTELDALDRRVRTLLTANRMHHPRSSVMRLYIPRKCGGRGFLNAKTLHNREVCSLREHFLKTVVGMHHDVVTVDKGLTPLSMAKENWHKPIILTTDDRKMIWQSKELHGRFYRALHEPDVDFLASVSWLRFSDLFGETEDFVCAIMDEVILTNNYQRYIMRDGTIDVCRACHHPGESIRHIISGCSRLANGEYLHRHNQVARIIHQQLALKYKLVDSEVPYYKYVPDPVLENDHATLYWDRSIITDRTIVANKPDIVVIDRLARLAMIVDVTIPHDGNLVKAEKEKQIKYLDLAHEVVDMWNVNSAVIVSIVVSANGLIAKSLDQHLLRLSLGSWIKGLIQKAVLLDTARIVRRFLSLEP

SEQ ID NO: 28248 - protein, 1202 aa, Sesamia nonagrioides
MLTRQAARRARSPPPDSPPSTASPPPVPSANVSAVTTPAAVVASSSSDEYFSPPTSPRPVRRQGRGRPPKSLGLRGHPAPSRVPAAGGCVQRMRWTQTINENVMRAYYRATEGGTNLTAYRERMLSLFQALEPTVNVSAQRLSDQVRVIQRNHRLDDIALDRLRSEVLSNQITPTLTQTAAQASIIDAGPPRSNRVEEEDDRVETVSSQYNDRLRNALEDAFRDYRSTPTDLRPRLPRLPMHKKNRALVCALDSLLKNFFESSEDLIDTHSILYCAAVAACRLAKVKFPNCEEAARPKPAVPAWQRRIERRIDGTRVLIGKLYCFRDGNTRPRVMRFVRQAFSGTGISPREYINHLTERIDFLKQKVCAWASRIRRYKRRVDRYTQNRMFQSDERWVYRAWERPEQNEADVCRPDDATTSAFWRGIWSVSVCHTEGNWIRNVEQVCDTIPEMDTILITPSDVAAAVRSLPNWKSPGPDGLHNFWLKWLSSSHTCLASQFQSSLESGSLPQFLTTGITHLLHKSGSTAEPKNYRPITCLPTVYKVLTSILKAKINKHLNSNSIMSVSQNGCKSGSRGTKELLLIDMAISQQVRRSRKDLSTCWIDYKKAYDSVPHTWLMRVLELYKINATLRTFLRSCMGQWKTALHYPGSRQIQGNDEPVWIKRGIFQGDSLSPVWFCLALNPLSTLLENSGLGYRLRRGGQVISHLLYMDDLKLFAPNELHLMKLLNVTETFSSGIRMEFGVDKCAVMHVKQGEIMESEGITLPDSIHLRSLSSFESYKYLGMSEALGINDADMKQSLKERFFGRLKKVLNSLLSGGNKVRAFNGWVMPVLMYSFGILKWTQTELDALDRRVRTLLTANRMHHPRSSVMRLYIPRKCGGRGFLNAKTLHNREVCSLREYFLQTVVGMHHDVVTVDKGLTPLSMAKENWHKPIILTTDDRRKVWQSKELHGRFYRALHEPDVDFLASVSWLRFSDLFGETEGFVCAIMDEVILTNNYRRYIMKDGTIDVCRACHHPGESIRHIISGCSRLANSEYLHRHNQVARIIHQQLALKYKLVDSEVPYYKYVPDPVLENDHVTLYWDRSIITDRTIVANKPDIVVIDRLARLAMIVDVTIPHDGNLVKAEKEKKMKYLDLAHEVVDMWNVNSAVIVPIVVSANGLIAKSLDQHLLRLALGSWIKGLIQKAVLLDTARIVRRFLSLEP

SEQ ID NO: 28249 - protein, 1202 aa, Sesamia nonagrioides
MLTRQAARRARSPPPDSPPSTASPPPVPSANVSAVTTPAAVVASSSSDEYFSPPTSPRPVRRQGRGRPPKSLGLRGHPAPSRVPAAGGCVQRMRWTQTINENVMRAYYRATEGGTNLTAYRERMLSLFQALEPTVNVSAQRLSDQVRVIQRNHRLDDIALDRLRSEVLSNQITPTLTQTAAQASIIVAGPPRSNRVEEEDDRVETVSSQYNDRLRNALEDAFRDYRSTPTDLRPRLPRLPMHKKNRALVCALDSLLKNFFESSEDLIDTHSILYCAAVAACRLAKVKFPNCEEAARPKPAVPAWQRRIERRIDGTRVLIGKLYCFRDGNTRPRVMRFVRQAFSGTGISPREYINHLTERIDFLKQKVCAWASRIRRYKRRVDRYTQNRMFQSDERWVYRAWERPEQNEADVCRPDDAATSAFWRGIWSVSVCHTEGNWIRNVEQVCETIPEMDTILITPSDVAAAVRSLPNWKSPGPDGLHNFWLKWLSSSHTCLASQFQSSLESGSLPQFLTTGITHLLHKSGSTAEPKNYRPITCLPTVYKVLTSILKAKINKHLNSNSIMSVSQNGCKSGSRGTKELLLIDMAISQQVRRSRKDLSTCWIDYKKAYDSVPHTWLMRVLELYKINATLRTFLRSCMGQWKTALHYPGSRQIQGNDEPVWIKRGIFQGDSLSPVWFCLALNPLSTLLENSGLGYRLRRGGQVISHLLYMDDLKLFAPNELHLMKLLNVTETFSSGIRMEFGVDKCAVMHVKQGEIMESEGITLPDSIHLRSLSSFESYKYLGMSEALGINDADMKQSLKERFFGRLKKVLNSLLSGGNKVRAFNGWVMPVLMYSFGILKWTQTELDALDRRVRTLLTANRMHHPRSSVMRLYIPRKCGGRGFLNAKTLHNREVCSLREYFLQTVVGMHHDVVTVDKGLTPLSMAKENWHKPIILTTDDRRKVWQSKELHGRFYRALHEPDVDFLASVSWLRFSDLFGETEGFVCAIMDEVILTNNYRRYIMKDGTIDVCRACHHPGESIRHIISGCSRLANSEYLHRHNQVARIIHQQLALKYKLVDSEVPYYKYVPDPVLENDHVTLYWDRSIITDRTIVANKPDIVVIDRLARLAMIVDVTIPHDGNLVKAEKERKMKYLDLAHEVVDMWNVNSAVIVPIVVSANGLIAKSLDQHLLRLALGSWIKGLIQKAVLLDTARIVRRFLSLEP

SEQ ID NO: 28250 - protein, 1164 aa, Mamestra configurata
MAAFRLKITLTDFIEERRGERERRGRGRPPRGLGPRGQPAPSRVPAAVGCVQRMRWTQSMNENVMRAYYGSTEGGTNLTAYRVRMLSLFQDLEPTVNVSAQRLSDQVRVIQRNHRLDDAALDRLRSEVLNNLIISTPTQTAVQAPVNGRITPRPNNVSDEVDDRVVTVSSQCNDRLRSALEDALREYRSTPTELRPRLPRLPMHKKNRALVCALDSLLQNIFESSESLVDTHSILYCGAVAACRIANVKFPGCDEAIRPKPAAPAWQRRIERRIDETRALIGKLYCFREGNTRPRVMRFVRRAFSGTEISPRDFTSRVTERIDFLKQKVCAWASRIRRYKRRVDRYSQNRMFQSDERWVYRAWERPEQSVTDVCRPDDVATSIFWRSIWSVPICHAEGGWMRDVERVCEAIPQMEKITITTLDVAKAVRPLPNWKSPGPDGLHNFWLKWYSSSHALLASQFQSSLDSGSLPQFLTTGVTHLLHKTGSPTEPKNYRPITCLSTVYKLLTSILRAKINEHIESNSIMSASQNGCRKGSRGTKELLLIDMAISQQVRRSRKDLSTCWIDYKKAYDSVPHTWLMKVLELYKIDATLRTFLESCMRQWKTVLRYPGCRPIQGSDEPVWIKRGIFQGDSLSPLWFCLALNPLSTLLEDSGLGYRLRRGGQAISHLLYMDDLKLFAPNNLRLMELLKVTETFSSAIRMEFGVDKCAVMHVKKGEIMESEGIQLSDSIQVRSLSSTETYKYLGMSEALGINGTDMKQSLRERFFGRLKKVLNSLLSGGNKVRAFNGWVMPVLMYTFGILKWTQTELDALDRRVRTLLTANRMHHPRSSVMRLYIPRKCGGRGFLNAKTLHNREMCSLREYFLKADVGMHRDVVAVDKGLTPLSMAKENWRTPVILTTDDRKEVWKGKELHGRFYRALHGSDVDFSASVAWLRFGDLFGETEGFVCAIMDEVILTNNYRRHIMKDGTVDMCRACHRPGESIRHIISGCSRLANGEYLHRHNQVARIIHQQLALKYKLVDSEVPYYKYVPDPVLENDHVTLYWDRSIITDRTIVANKPDIVVIDRLARRTMIIDVTIPHDENLVKAEKEKQIKYLDLAHEVVDMWNVDSAVIVPIVVTANGLMAKSFDDHLSKLALRSWVKGLIQKAVLLDTARIVRRFLSQEP

SEQ ID NO: 28251 - protein, 1200 aa, Mythimna ferrago
MLTRSATRRARHPPTGSLLSSASPPPDPGSPVSPVTAVASSSSDEYFSPPTSPTPVRRPGRGRPPNGLGPRGQPAPSRVPAAGGCVQRMKWTQSINENVMRAYYRATEGGTNLTAYRVRMLSLFQELEPSVNVTTQRLSDQVRVIQRNHRLDDAALDRLRSEVLSNRIISTPIQTQTAAPRATDTIMPRPNYGDDEADDRVVTVSSQCNDQLRSALEDALREYRSTPIALRPRLPRLPMHKKNRALVCALDSLLENVFESSVNLVDTHSILYCGAIAACRLANVKLPSCDGATRPKPAVPAWQCRIERRIDGARALIGKLYCFREGNTRPRVMRYVRRAFSGTGVSPREYLAHVTERIDFLKQKVCAWANRIRRYKRRVDRYSQNRMFQSDERWVYRDWERPEQSVTDVLRPDVDATNEFWRSIWSVPVCHTEGGWMRDIERVCEAIPEMEKVFISPIDVARAVRPLPNWKSPGPDGLQNFWLKWYSSSHALLASQFQSSLESGSLPQFLTTGVTHLLHKTGSTAEPKNYRPITCLSTVYKLLTSILRTKINNHIENNSIMSASQNGCRNGSRGTKELLLIDMAISQQVRRSRKDLSTCWIDYKKAYDSVPHTWLMRVLELYKIDATLRTFLESCMGEWNTVLRYPGCRSIREDDEPIWIKRGIFQGDSLSPLWFCLALNHLSTLLEDSGLGYRLRRGGQVLSHLLYMDDLKLIAPNKLQLMELLKVTETFSSAIRMEFGVDKCAVMHVKRGEIMESEGIQLSDSIHLRSLSSTETYKYLGMSEALGINVTDMKQSLRERFFSRLKKVLNSLLSGGNKVRAFNGWVMPVLMYSFGILKWTQTELDALDRRVRTLLTANRMHHPRSSVMRLYIPRKCGGRGFLNAKTLHNREVCSLREYFQKTDVGMHRDVVAVDKGLTPLSMAKENWRKPVVLTTDDRREVWKNKELHGRFYRALHEPDVDFGASVAWLRFSNLFGETEGFICAIMDEVILTNNYRRYIMKDGTVDVCRACHRPGESIRHIISGCSRLANGEYLHRHNQVARIIHQQLALKYKLMESEVPYYRYVPDPVLENDHVTLYWDRSIITDRTIIANKPDIVVIDRLARRAMIVDVTIPHDENLVKAEKEKKIKYLDLAHEVVDLWNVDSAVIVPIVVSVNGLIAKSFDDHLSKLALRGWIKGLIQKAVLLDTARIVRRFLSLEP

SEQ ID NO: 28252 - protein, 1200 aa, Mythimna ferrago
MLTRSATRRARHPPTGSLLSSASPPPDPGSPVSPVAAVASSSSDEYFSPPTSPTPVRRPGRGRPPNGLGPRGQPAPSRVPAAGGCVQRMKWTQSINENVMRAYYRATEGGTNLTAYRVRMLSLFQELEPSVNVTTQRLSDQVRVIQRNHRLDDAALDRLRSEVLSNRIISTPIQTQTAAPRATDTIMPRPNYGDDEADDRVVTVSSQCNDQLRSALEDALREYRSTPIALRPRLPRLPMHKKNRALVCALDSLLENVFESSVNLVDTHSILYCGAIAACRLANVKLPSCDGATRPKPAVPAWQCRIERRIDGARALIGKLYCFREGNTRPRVMRYVRRAFSGTGVSPREYLAHVTERIDFLKQKVCAWANRIRRYKRRVDRYSQNRMFQSDERWVYRDWERPEQSVTDVLRPDVAATNEFWRSIWSVPVCHTEGGWMRDIERVCEAIPEMEKVFISPIDVARAVRPLPNWKSPGPDGLQNFWLKWYSSSHALLASQFQSSLESGSLPQFLTTGVTHLLHKTGSTAEPKNYRPITCLSTVYKLLTSILRSKINNHIENNSIMSASQNGCRNGSRGTKELLLIDMAISQQVRRSRKDLSTCWIDYKKAYDSVPHTWLMRVLELYKIDATLRTFLESCMGEWNTVLRYPGCRSIRGDDEPIWIKRGIFQGDSLSPLWFCLALNPLSTLLEDSGLGYRLRRGGQVLSHFLYMDDLKLIAPNKLQLMELLKVTETFSSAIRMEFGVDKCAVMHVKRGEIMESEGIQLSDSIHLRSLSSTETYKYLGMSEALGINVTDMKQSLRERFFSRLKKVLNSLLSGGNKVRAFNGWVMPVLMYSFGILKWTQTELDALDRRVRTLLTANRMHHPRSSVMRLYIPRKCGGRGFLNAKTLHNREVCSLREYFQKTDVGMHRDVVAVDKGLTPLSMAKENWRKPVVLTTDDRREVWKNKELHGRFYRALHEPDVDFGASVAWLRFSNLFGETEGFICAIMDEVILTNNYRRYIMKDGTVDVCRACHRPGESIRHIISGCSRLANGEYLHRHNQVARIIHQQLALKYKLMESEVPYYRYVPDPVLENDHVTLYWDRSIITDRTIIANKPDIVVIDRLARRAMIVDVTIPHDENLVKAEKEKKIKYLDLAHEVVDLWNVESAVIVPIVVSVNGIIAKSFDDHLSKLALRGWIKGLIQKAVLLDTARIVRRFLSLEP

SEQ ID NO: 28253 - protein, 1220 aa, Noctua pronuba
MLTRAAARRARLSPPDSSLSSASPLPESSPIVSAVTPAVAVASSSSDEYFSPPTSPTPVRRQGRGRPPTSLGLRGQPAPSRVPATGGCVQRMRWTHSINENVMRAYYGSTEGGTNLTAYRVRMLSLFQVLEPTVNVSAQRLSDQVRVIQRNHMLDDAVLDRLRSEVLSNRIVLTPSQTVVQTTAIDVSPPRSNPAVVEEDDRVATVSSQCNDRLRSALEDALREYRYTPTELRPRLPRLPMHKKNRALVGALDSQLKNLFESSEDLVDTHSILYCGAVAACRLANVKFTNSDAATRPKPAVPAWQCRIERRIDGARVLIGKLHCFREGNTRPRVMRFVRRAFSGTGISPQEYMSRVTERIDFLKQKVYAWANRIRRYKRRVDRYSQNRMFQSDERWVYRAWERPEQNMTDVCRPDDATTSSFWSSIWSVPVCHTEGDWMRAVERVCEPIPEMEPILITSLDVARSVRPLPNWKSPGPDGLHNFWIKWLSSSHTCLASQFQSSLESGALPQFLTTGVTHLLHKSGNPAEPKNYRPITCLSTVYKLLTSILRAKINTHIDKNSIMSASQNGCRNGSRGTKELLLIDMAISQQVRRSRKDLSTCWIDYKKAYDSVPHTWLMRVLELYKIDATLRTFLESCMGQWRTVLRYPGCRQIQGNDEPVWIKRGIFQGDSLSPLWFCLALNPLSTLLEDSGLGYRLRRGGQVISHLLYMDDLKLFAPNKLRLMELLKVTETFSSAIRMEFGVDKCAVMYVKRGEIMESEGIQLSDSIHLRSLSSSESYKYLGMPEALGINVTDMKQSLRERFFGRLKKVLNSLLSGGNKVRAFNGWVMPVLMYSFGILKWTQTELDALDRRVRTLLTANRMHHPRSSVMRLYIPRKCGGRGFLNAKTLHNRELCSLREYFLKAEVGMHRDVVAVDKGLTPLSMAKENWRKPVVLTTDDRKEVWQGKELHGRFYRALHGPDVDFLASVSWLRFGDLFGETEGFVCAIMDEVMLTNNYRKYIMKDGTVDVCRACHRPGESIRHIISGCSRLANGEYLHRHNQVARIIHQQLALKYKLVESEVPYYKYVPDPVLEKDHVTLYWDRSIITDRTIVANKPDIVVIDRSARRVMIVDVTIPHDENLVKAEKEKQIKYLDLAHEVVDMWNVNSAIIVPIVVTANGLMAKSLDDHLSRLSLGGWIKGLIQKAVLLDTARIVRRFLSLEPPVAWTLLPTPADHYFLYF

SEQ ID NO: 28254 - protein, 1111 aa, Noctua pronuba
MRWTHPINENVMRAYYGSTEGGTNLTAYRVRMLSLFQVLEPTVNVSAQRLSDQVRVIQRNHMLDDAALDRLRSEVLSNPIVLTPSQTVVQASTIDITPPRSNPAVAEEDDRVATVSSQCNDRLRSALEDALREYRYTRTEFRPRLPRLPMHKKNRALVCALDSQLKNLFESSENLVDTHSILYCGAVAACRLANVKFTNSDTATRPKPAVPAWQCRIERRIDGARVLIGKLHCFREGNTRPRVMRFVRRAFSGTGISPQEYMSRVTERIDFLKQKVYAWANRIRRYKRRVDRYSQNRMFQSDERWVYRAWERPEQNMTDVCRPDDATTSSFWSSIWSVPVCHTEADWMRDVERMCEPIPEMEPILITPQDIARAVRPLPNWKSPGPDGLHNFWLKWLSSSHTCLASQFQSSLESGSLPQFLTTGVTHLLHKSGSPAEPKNYRPITCLSTVYKLLTSILRAKINTHIDKNSIMSASQNGCRNGSRGTKELLLIDMAISQQVRRSRKDLSTCWIDYKKAYDSVPHTWLMRVLELYKVDATLRAFLESCMGQWRTVLRYPGCRQIQGNNEPVWIKRGIFQGDSLSPLWFCLALNPLSTLLEDSGLGYRLRRGGQVISHLLYMDDLKLFAPNKLRLMELLKVTETFSSAIRMEFGVDKCAVMYVKRGEIMESEGIQLSDSIHLRSLSSSESYKYLGMSEALGINVTDMKQSLRERFFGRLKKVLNSLLSGGNKVRAFNGWVMPALMYSFGILKWTQTELDALDRRVRTLLTANRMHHPRSSVMRLYIPRKCGGRGFLNAKTLHNREVCSLREYFLKAEVGMHRDVVAVDKGFTPLSMAKENWRKPVVLTTDDRKEVWQGKELHGRFYRALHGPDVDFLASVSWLRFGDLFGETEGFVCAIMDEVMLTNNYRKYIMKDGTVDVCRACHRPGESIRHIISGCSRLANGEYLHRHNQVARIIHQQLALKYKLVESEVPYYKYVPDPVLEKDHVTLYWDRSIITDRTIVANKPDIVVIDRSARRVMIVDVTIPHDENLVKAEKEKQIKYLDLAHEVVDMWNVNSAVIVPIVVTANGLMAKSFDDHLSKLSLGGWIKGLIQKAVLLDTARIVRRFLSLEP

SEQ ID NO: 28255 - protein, 1207 aa, Ochropleura plecta
MLTRRRAQEQQALPSSPGSSLSSASQPPGRATRVSAVSPVAAVASSSSDEFFSPPSSPPPPPTRQRRGRGRPPAGLGSRGQQAPIRVPAAGGNVSRMRWTSFINANVMRAYYGSTEGGTNLTAYRVRMLFLFQDLEPTINVSAQRLSDQVRVIQRNHLLDDAALDRLRSEVLSNRVILTTPQTAVQASAIDVTQPRSNPAVVEEDDRVATVSSQCNDRLRSALEDALRDYRSTPAELRPRLPRLPMHKKNRALVCALDSQLKNLFESSEDLVDTHSILYCGAVAVCRLANVKFPNCDVATRPKPSVPAWQCRIERRIDEARALIGKLYCFREGNTRPRVMRFVRRAFSGTGISPQEYMSRTTERIDFLKQKVYAWANRIQRYKRRVDRYSQNRMFRSDERWVYRAWERPEQSVTDVCRPDDVATSSFWHSIWSVRVCHTEAGWMRDVERVCETIPEMEPILITSLDIASAVRPLPNWKSPGPDGLHNFWLKWLSSSHTRLASQFQSCLESGSLPQFLTTGVTHLLYKSGSPAEPKNYRPITCLSTVYKLLTSILRAKINSHIVKNSIISASQNGCRNGSRGTKELLLIDMAISQQVRRSRKDLSTCWIDYKKAYDSVPHTWLKRVLELYKIDTTLRTFLESCMGQWRTVLRYPGCRQIQGNDEPVWIKRGIFQGDSLSPLWFCLALNPLSTLLEDSGLGYRLRRGGQVISHLFYMDDLKLFAPNKLRLMELLKVTETFSNAIRMEFGVDKCAVMYVKRGEIMESEGIHLSDSIHLRSLSSSESYKYLGMSEALGINVADMKQLLRERFFGRLKKVLKSLLSGGNKVRAFNSWVMPVLMYSFGILKWTQTELDALDRRVRTLLTANRMHHPRSSVMRLYIPRKCGGRGFLNAKTLHNREVCSLREYFLKTDVGMHRDVVAVDKGLTPLSMAKENWRKPVVLTTDYRKEVWQGKELHGRFYKALHGPDVDFLASVSWLRFGDLFGETEGFVCAIMDEVMLTNNYRKYIMKDGTVDVCRACHRPGESIRHIISGCSRLANGEYLHRHNQVARIIHQQLALKYNLVESEVPYYKYVPDPVLEKDHVTLYWDRSIITDRTIVANKPDIVVIDRSARRVMIIDVTIPHDENLVKAEKEKQLKYLDLAHEVVDMWNVNSAIIVPIVITANGLIAKSLDEHLSKLSLGGWIKGLIQKAVLLNTARIVRRFLSLEP

SEQ ID NO: 28256 - protein, 1206 aa, Ochropleura plecta
MLTRRRAQEQKALPPSPGSPLSSASQPPGRATCVSAVSPVAAVASSSSDEFFSPPSSPPPPTRQRRGRGRPLAGLGSRSQQAPIRVPAAGGNVSRMRWTSSINANVMRAYYGSTEGGTNLTAYRVRMLSLFQDLEPTINVSAQRLSDQVRVIQRNHMLDDAALDRLRSEVLGNRIILTTPQTAMQASVIDGMQPRSDPAVVEEDDRVATVSSQCNERLRSALEDALRDYRSTPAELRPRLPRLPMHKKNRALVCALDSQLKNLFESSEDLVDTHSILYCGAVAVCRLANVKFPSCDVATRPKPSVPAWQCRIERRIDEARVLIGKLYCFREGNTRPRVMRFVRRAFSGTGISPQEYMSRTTERIDFLKQKVYAWANRIRRYKRRVDRYSQNRMFRSDERWVYRAWERPEQSVTDVCRPDDVATSSFWHSIWSVPVCHTEADWMRDVERVCETIPEMEPILITSLDIASAVRPLPNWKSPGPDGLHNFWLKWLSSSHTRLASQFQSCLESGSLPQFLTTGVTHLLYKSGSPAEPKNYRPITCLSTVYKLLTSILRAKINSHIDNNSIMSASQNGCRNGSRGTKELLLIDMAISQQVRRSRKDLSTCWIDYKKAYDSVPHTWLKRVLELYKIDATLRAFLESCMGQWRTVLRYPGCRQIQGNDEPVWIKRGIFQGDSLSPLWFCLALNPLSTLLEDSGLGYRLRRGGQVISHLLYMDDLKLFAPNKLRLMELLKVTETFSDAIRMEFGVDKCAVMYVKRGEIMESEGIQLSDSIHLRSLSSSESYKYLGMSEALGINVADMKQLLRERFFGRLKKVLKSLLSGGNKVRAFNSWVMPVIMYSFGILKWTQTELDALDRRVRTLLTGNRMHHPRSSVMRLYIPRKCGGRGFLNAKTLHNREVCSLREYFLKTDVGMHRDVVAVDKGLTPLSMAKENWRKPVVLTTDDRKVVWQGKELHGRFYKALHGPDVDFLASVSWLRFGDLFGETEGFVCAIMDEVMLTNNYRKYIMKDGTVDVCRACHRPGESIRHIISGCSRLANSEYLHRHNQVARIIHQQLALKYNLVESEVPYYKYVPDPVLEKDHVTLYWDRSIITDRTIVANKPDIVVINRSARRVMIIDVTIPHDENLVKAEKEKQLKYLDLAHEVVDMWNVNSAIIVPIVVTANGLIAKSLDEHLSKLSLGGWIKGLIQKAVLLDTARIVRRFLSLEP

SEQ ID NO: 28257 - protein, 1206 aa, Ochropleura plecta
MLTRRRAQEQKALPPSPGSPLSSASQPPGRATRVSAVSPVAAVASSSSDEFFSPPSSPPPPTRQRRGRGRPPAGLGSRSQQAPIRVPAVGGNVSRMRWTSSINANVMRAYYGSTEGGTNLTAYRVRMLSLFQDLEPTINVSAQRLSDQVRVIQRNHMLDDAALDRLRSEVLSNRIILTTPQTAMQASVIDGMQPRSDPAVVEEDDRVATVSSQCNERLRSALEDALRDYRSTPAELRPRLPRLPMHKKNRALVCALDSQLKNLFESSEDLVDTHSILYCGAVAVCRLANVKFPSCDVATRPKPSVPAWQCRIERRIDEARVLIGKLYCFREGNTRPRVMRFVRRAFSGTGISPQEYMSRTTERIDFLKQKVYAWANRIRRYKRRVDRYSQNRMFRSDERWVYRAWERPEQSVTDVCRPDDVATSSFWHSIWSVPVCHTEADWMRDVERVCETIPEMEPILITSLDIASAVRPLPNWKSPGPDGLHNFWLKWLSSSHTRLASQFQSCLESGSLPQFLTTGVTHLLYKSGSPAEPKNYRPITCLSTVYKVLTSILRAKINSHIDNNSIMSASQNGCRNGSRGTKELLLIDMAISQQVRRSRKDLSTCWIDYKKAYDSVPHTWLKRVLELYKIDATLRAFLESCMGQWRTVLRYPGCRQIQGNDEPVWIKRGIFQGDSLSPLWFCLALNPLSTLLEDSGLGYRLRRGGQVISHLLYMDDLKLFAPNKLRLMELLKVTETFSNAIRMEFGVDKCAVMYVKRGEIMESEGIQLSDSIHLRSLSSSESYKYLGMSEALGINVADMKQLLRERFFGRLKKVLKSLLSGGNKVRAFNSWVMPVIMYSFGILKWTQTELDALDRRVRTLLTGNRMHHPRSSVMRLYIPRKCGGRGFLNAKTLHNREVCSLREYFLKTDVGMHRDVVAVDKGLTPLSMAKENWRKPVVLTTDDRKVVWQGKELHGRFYKALHGPDVDFLASVSWLRFGDLFGETEGFVCAIMDEVMLTNNYRKYIMKDGTVDVCRACHRPGESIRHIISGCSRLANSEYLHRHNQVARIIHQQLALKYNLVESEVPYYKYVPDPVLEKDHVTLYWDRSIITDRTIVANKPDIVVIDRSARRVMIIDVTIPHDENLVKAEKEKQLKYLDLAHEVVDMWNVNSAIIVPIVVTANGLIAKSLDEHLSKLSLGGWIKGLIQKAVLLDTARIVRRFLSLEP

SEQ ID NO: 28258 - protein, 1205 aa, Ochropleura plecta
MLTRRRAQEQQALPPSPGSSLSSASQSPERATHVSAVSPVAAVASSSSDEFFSPPSSPPPTRQRRGRGRPPAGLGSRGQQAPIRVPAAGGNVSRMRWTSSINANVMRAYYGSTEGGTNLTAYRVRMLSLFRDLEPTINVSAQRLSDQVRVIQRNHMLDDAALDRLRSEVLSNRIILTTPQTAVQASVIDGMQPRSDPAVVEEDDRVATVSSQCNERLRSALEDALRDYRSTPAELRPRLPRLPMHKKNRALVCALDSQLKNLFESNEDLVDTHSILYCGAVAVCRLANVKFPSCDVATRPKPSVPTWQCRIERRIDEARVLIGKLYCFREGNTRPRVMRFVRRAFSGTGISPQEYMSRTTERIDFLKQKVYAWANRIRRYKRRVDRYSQNRIFRSDERWVYRAWERPEQSVTDVCRPDDVATSSFWHSIWSVPVCHTEADWMRDVERVCETIPDMEPILITSLDIASAVRPLPNWKSPGPDGLHNFWLKWLTSSHTRLASQFQSCLESGSLPQFLTTGVTHLLYKSGSPAEPKNYRPITCLSTVYKLLTSILRAKINSHIDKNSIMSASQNGCRNGSRGTKELLLIDMAISQQVRRSRKDLSTCWIDYKKAYDSVPHTWLKRVLELYKIDATLRAFLESCMGQWRTVLRYPGCRQIQGNDEPVWIKRGIFQGDSLSPLWFCLALNPLSTLLEDSGLGYRLRRGGQVISHLLYMDDLKLFASNKLRLMELLKVTETFSNAIRMEFGVDKCAVMYVKRGEIMESEGIQLSDSIHLRSLSSSESYKYLGMSEALGINVADMKQLLRERFFGRLKKVLKSLLSGGNKVRAFNSWVMPVIMYSFGILKWTQTELDALDRRVRTLLTGNRMHHPRSSVMRLYIPRKCGGRGFLNAKTLHNREVCSLREYFLKTDVGMHRDVVAVDKGLTPLSMAKENWRKPVVLTTDDRKVVWQGKELHGRFYKALHGPDVDFLASVSWLRFGDLFGETEGFVCAIMDEVMLTNNYRKYIMKDGTVDVCRACHRPGESIRHIISGCSRLANSEYLHRHNQVARIIHQQLALKYNLVESEVPYYKYVPDPVLEKDHVTLYWDRSIITDRTIVANKPDIVVIDRSARRVMIIDVTIPHDENLVKAEKEKQLKYLDLAHEVVDMWNVNSAIIVPIVVTANGLIAKSLDEHLSKLSLGGWIKGLIQKAVLLDTARIVRRFLSLEP

SEQ ID NO: 28259 - protein, 1200 aa, Hecatera dysodea
MMLTRAATLRARHPPPGSPLSSASPPPDIESQVSPTAAVASSSSDEYFSPPTSPTPVRRQGRGRPPRSLGSRGQPAPSRVPAAGGCVQRMRWTQSMNENVMRAYYGSTEGGTNLTAYRVRMLSLFQDLEPAVNVSAQRLSDQVRVIQRSHRLDDAALERLRSEVLNNLIISTQTQTAVQAPVRGANTPQANNDSDEVDDRVVTVSSQYNNRLRSALEDALREYRSTPTELRPRLPRLPMHKKNRALVCALDSLLQNTFVSSENLVDTHSILYCGAVAACRLANVKFPSGDEAIRPKPAAPAWQCRIERRIDEARALIGKLYCFREGNTRPRVMRFVRRAFAGTGISPHEYTSRITERIDFLKQKVCAWANRIRRYKRRVDRYSQNRMFQSDERWVYRTWERPEQSVTDVCRPDDIATTTFWRSIWSVPVRHTEGDWMRDVERVCEAIPQMEKITITPTDIATAVRPLPNWKSPGPDGLHNFWLKWYSSSHAVLASQFQSSLESGSLPQFLTTGITHLLHKTGSPAEPKNYRPITCLSTVYKLLTSILRVKINEHIESNSIMSSSQNGCRKGSRGTKELLLIDMAISQQVRRSRKDLSTCWIDYKKAYDSVPHTWLMKVLELYKIDATLRTFLESCMRQWKTVLRYPGCRPIQGSDEPIWIKRGIFQGDSLSPLWFCLALNPLSTLLEDSGLGYRLRRGGQAISHLLYMDDLKLFAPNNLRLMELLKVTETFSSAIRMEFGVDKCAVMHVKKGEIMESEGIQLSDSIQVRSLSSTETYKYLGMSEALGINGADMKQSLKERFFGRLKKVLNSLLSGGNKVRAFNGWVMPVLMYSFGILKWTQTELDALDRRVRTLLTANRMHHPRSSVMRLYIPRKCGGRGFLNAKTLHNREMCSLREYFLETDVDMHRDVVAVDKGLTPLSMAKENWRKPVIHTTDDRKEVWKGKELHGRFYRALYGSDVDFSASVAWLRFGDLFGETEGFVCAIMDEVILTNNYRRHIMKDGTVDVCRACHRPGESIRHIISGCSRLANSEYLHRHNQVARIIHQQLALKYKLVDFEVPYYKYVPDPVLENGHVTLYWDRSIITDRTIVANKPDIVVIDRLARRTMIIDVSIPHDENLVKAEKEKQIKYLDLAHEVVDMWDVDSAVIVPIIVTANGLMAKSFDDHLSKLALRSWVKGLIQKAVLLDTARIVRRFLSLQP

SEQ ID NO: 28260 - protein, 962 aa, Hecatera dysodea
MHKKNRALVCALDSLLKNIFESSENLVDTHSILYCGAVAACRVANVKFSNSDGATRPKNAAPAWQCRIERRIDEARVLIGKLYCFREGNTRPRVMRFVRRAFLGTEISPQEYMSRVTERIDFLKQKVCAWANRIRRYKRRVDRYSQNRMFQSDERWVYRAWERPEQSVTDVCRPDDVTTNTFWRSIWSVPVCHAEGGWMRDVERVCEAIPQMEKITITTVDIATAVRPLPNWKSPGPDGLHNFWLKWYSSSHALLASQFQSSLDSGSLPQFLTTGITHLLHKTGSPTEPKNYRPITCLSTVYKLLTSILRVKINEHIESNSIMSYSQNGCRKGSRGTKELLLIDMAISQQVRRSRKDLSTCWIDYKKAYDSVPHTWLLKVLELYKVDATLRTFLESCMRQWKTVLRYPGCRPIQGNEEPVWIKRGIFQGDSLSPLWFCLALNPLSTLLEDSGLGYRLRRGGQTISHLLYMDDLKLFAPNNLRLMELLKVTETFSSAIRMEFGVDKCAVMHVKKGEIMESEGIQLSDSIQVRSLSSTETYKYLGMSEALGINGADMKQSLKERFFGRLKKVLNSLLSGGNKVRAFNGWVMPVLMYSFGILKWTQTELDALDRRVRTLLTANRMHHPRSSVMRLYIPRKCGGRGFLNAKTLHNREMCSLREYFLKADVGMHRDVVAVDKGFTPLSMAKENWRKPVIPTTDDRREVWRGKELHGRFYRALYGSDVDFSASVAWLRFGDLFGETEGFVCAIMDEVILTNNYRRHIMKDGTVDVCRACHRPGESIRHIISGCSRLANGEYLHRHNQVARIIHQQLALKYKLVDSEVPYYKYVPDPVLENDHATLYWDRSIITDRTIIANKPDIVVIDRLARRTMIIDVTIPHDENLVKAEKEKQIKYLDLAHEVVDMWNMDSAVIVPIVVTANGLMAKSFDEHLSKLALHGWLKGLIQKAVLLDTARIVRRFLSLEP

SEQ ID NO: 28261 - protein, 1200 aa, Mythimna impura
MLTRAAARRARHPPPGSPLSSASPPPDLESPVSPAAAVASSSSDEYFSPPTSPTPVRRPGRGRPPRSLGSRGQPAPSRVPAAGGCVQRMRWTQSMNENVMRAYYGSTEGGTNLTAYRVRMLSLFQVLEPTVNVTTQRLSDQVRVIQRNHRLDNAALDRLRSEVLSNRIISTPIQTQTAAPRATDGILPQSNHVDDEADDRVVTVSSQCNDRLRSALEDALREYRSTPIDLRPRLPRLPMHKKNRALVCALDSLLENVFESSVNLADTHSILYCGAIAACRLANVKLPSCDGATRPKSVAPAWQCRIEKRIDGARALIGKLYCFREGNTRPRVMRYVRRAFSGTGISPPEYLSRVTERIDFLKQKVCAWANRIRRYKRRVDRYSQYRMFQSDERWVYRAWERPEQNVTDVTRPDAVATNAFWRNIWSVPVCHTEDGWMREVERVCEAIPEMEKVIISPTDVARAVRPLPNWKSPGPDGLQNFWLKWYSSSHALLASQFQSSLESGSLPQFLTTGVTHLLHKTGSTAEPKNYRPITCLSTVYKLLTSILRTKINQHIDNNSIMSASQNGCRNGSRGTKELLLIDMTISQQVRRSRKDLSTCWIDYKKAYDSVPHTWLMRVLELYKIDATLRTFLESCMGQWNTVLRYPGCRSIRRDDEPIWIKRGIFQGDSLSPLWFCLALNPLSTLLEESGLGYRLRRDGQVLSHLLYMDDLKLIAPNKLRLMELLKVTETFSSAIRMEFGVDKCAVMHVKRGEIMESEGIQLSDSIHLRSLSSTETYKYLGMSEALGINVADMKQSLKERFFGRLKKVLNSLLSGGNKVRAFNGWVMPVLMYSFGILKWTQTELDALDRRVRTLLTANRMHHPRSSVMRLYIPRKCGGRGFLNTKTLHNREVCSLREYFHKTDVGMHRDVVAVDKGLTPLSMAKENWRKPVVLTTDDRKEVWKSKELHGRFYRALHESDVDFVASVAWLRFSNLFGETEGFICAIMDEVILTNNYRRYIMKDGTVDVCRACHRPGESIRHIISGCSRLANGEYLHRHNQVARIIHQQLALKYNLVYSEVPYYRYVPDPVLENDHVTLYWDRSIITDRTIVANKPDIVVIDRLARRAMIVDVTIPHDENLVKAEKEKQIKYLDLAHEVVDMWNVDSAVIVPIVVTANGLIAKSFDDHLSKLSLRGWIKGLIQKAVLLDTARIVRRFLSLEP

SEQ ID NO: 28262 - protein, 1106 aa, Mythimna impura
MNENVMRAYYGSTEGGTNLTAYRVRMLSLFRELEPTVNVTAQRLSDQVRVIQRNHRLDGAALDRLRSEVLSNRIISTPSQTQTEAPQATDATLPRSNHIDDEADDRVVTVSSQCNDRLRSALEDALREYRSTPIALRPRLPRLPMHKKNRALVCALDSLLENVFESSVNLADTHSILYCGAIAACRLANVKLPSCDGATRPKPAAPAWQCRIERRIDEARALIGKLYCFREGNTRLRVMRYVRRAFSGTEISPREYLSRVTERIDFLKQKVCAWANRIRRYKRRVDRYSQNRMFQSDERWVYRAWERPEQNVTDVTRPDAVATNTFWRNIWSVPVCHTEDDWMREVERVCEAIPEMEKIVISPIDVARAVRPLPNWKSPGPDGLQNFWLKWYSSSHALLASQFQSSLESGSLPQFPTTGVTHLLHKTGSTAEPKNYRPITCLSTVYKLLTSILRTKINKHIDSNSIMSASQNGCRNGSRGTKELLLIDMAINQQVRRSRKDLSTCWIDYKKAYDSVPHTWLMRVLELYKIDATLRTFLESCMGQWNTVLRYPGCRSIRRDDEPIWIKRGIFQGDSLSPLWFCLALNPLSTEREESGLGYRLRRGGQVLSHLLYMDDLKLIAPNKLRLMELLKVTETFSSAIRMEFGVDKCAVMHVKRGEIMESEGIQLSDSIHFRSLSSTETYKYLGMSEALGINVADMKQSLKERFFGRLKKVLNSLLSGGNKVRAFNGWVMPVLMYSFGILKWTQTELDAVDRRVRTLLTANRMHHPRSSVMRLYIPRKCGGRGFLNAKTLHNREVCSLREYFHKTDVGMHRDVVAVDKGLTPLSMAKENWRKPVVLTTDDRKEVWKSKELHGRFYRALHESDIDFAASVAWLRFSNLFGETEGFICAIMDEVILTNNYRRYIMKDGTVDVCRACHRPGESIRHIISGCSRLANGEYLHRHNQVTRIIHQQLALKYNLVDYEVPYYRYVPDPVLENDHVTLYWDRSIITDRTIVANKPDIVVIDRLARRVMIVDVTIPHDENLVKAEKEKQIKYLDLAHEVVDMWNVDSAVIVPIVVTANGLIAKSFDDHLSKLSLRGWIKGLIQKAVLLDTARIVRRFLSLEP

SEQ ID NO: 28263 - protein, 1199 aa, Phlogophora meticulosa
MLTGAAKRRARPPSPDSPLSSASPPPDLGSPVTPTVAAASSSSDEYFSPPTSPTPVRRQGRGRPPKSLGSRGQPAPSQVPATGGYVQRMRWTQSMNENVMRAYYGSTEGGTNLTAYRARMLSLFQVLEPTVNVSAQRLSDQVRVIQRNHRLDDTALDRLRSEVLNNHIVLTSTQTAVQASIINATPSPSNHVSEEADDRVVTVSSQCNEKLRSALEDALREYRSTPTELRPRLPRLPMHKKNRALVCNLDSLLKDLFESSGDLVDTHSILYCAAVAACRLANVKFPNNDLAIRPKPAVPAWQSRIERRIDGARVLIGKLYCFREGNTRPRVMRFVRRAFAGTGISPREYMSRIVERIDFLKQKVYAWANRIRRYKRRVDRYSQNRMFQSDERWVYRAWERPEQDVADVHRPDDTTTNTFWRNIWSVPVCHTEAHWIRDVERVCKTITEMEKIIITPLDVATAVRPLPNWKAPGPDGLHNFWLKWLGSSHTRLASQFQSCLESGSLPQFLTTGITHLLYKSGSTTEPKNYRPITCLSTVYKLLTSILRAKIAEHIVGNSIMSASQNGCRNGSRGTKELLLIDMAISQQVRRSHKDLSTCWIDYKKAYDSVPHAWLMRVLELYKIDATLRTFLESCMGQWRTVLRYPGCRQIQGNDEPIWIKRGIFQGDSLSPLWFCLALNPLSTLLEDSGLGYRLRRGGQVISHLLYMDDLKLFASNNLQLMELLKITESFSSTIRMEFGVDKCAVMHVKRGEIVESEGIQLPDSIQLRSLSSSDNYKYLGMSEALGINVTDMKQSLKERFFGRLKKVLNSLLSGGNKVRAFNGWVMPVLMYSFGILKWTQTELDALDRRVRTLLTANRMHHPRSSVMRLYIPRKCGGRGFLNAKTLYNREVCNLRDYFLKTEVGMHRDVVAVDKGLTPLSMAKENWRKPVVLTTDDRKQVWQSKELHGRFYRALHGPDVDFIASVSWLRFGDLFGETEGFVCAIMDEVILTNNYRKHIMKDGTVDMCRACHRPGESIRHIISGCSRLANGEYLHRHNQVARIIHQQLALRYKLVESEVPYYKYVPDPVLEDDHVTLYWDRSIITDRTIVANKPDIVVIDRLARRAMIVDVTIPHDENLVKAEKEKQIKYLDLAHEVVDMWNVDSAVIVPIVVTANGLLAKSLDDHLSRLSLHGWIKGLIQKAVLLDTARIVRRFLSLQP

SEQ ID NO: 28264 - protein, 1199 aa, Xestia xanthographa
MITRAAARRARLPTPDSSLSSASPPPDPGSPVSPVAAVASSSSDEYFSPPTSPPPVRRAGRGRPPKGLGLRGQQAPSRVPATGGCVQRMKWTQSMNENVMRAYYGSTEGGTNLTAYRVRMLSLFQDLEPTVNVSAQRLSDQVRVIQRNHRLDDAALDRLRSEVLSNLIILIPTQTAVQVSDINGTLPRSIPAVVEEDDRVATVSSQCNERLRNALEDALREYRSTPTELRPRLPRLPMHKKNRALVCALDSQLKHIFESSENLVDTHSILFCGAVAACRLANVKFPNCDVATRPKSAVPAWQRRIERRIDEARVLIGKLYCFREGNTRPRVMRFVRRAFSGTEISPQDYISRATERIDFLKQKVYAWANRIRRYKRRVDRYSQNRMFQSDERWVYRAWERPEQNMTDVGRPDDAATSSFWRSIWSVPVCHTEADWMRDVERVCEPIPEMEPIFITPLDVARAVRPLPNWKSPGPDGLHNFWLKWFSSSHTCLASQFQSSLESGSLPQFLTTGVTHLLHKSGSPAEPKNYRPITCLSTIYKLLTSILRMKINTHIDKNSIMSASQNGCRNGSRGTKELLLIDMAISQQVRRSRKDLSTCWIDYKKAYDSVPHTWLMRVLELYKVDTTLRTFLESCMGQWKTVLRYPGCRQIQGSDEPVWIKRGIFQGDSLSPLWFCLALNPLSTLLENSGLGCRLRKDGQVISHLLYMDDLKLFAPNKLRLMELLKVTETFSSAIRMEFGVDKCAVMYVKRGEIMESEGLQLSDSIHLKSLSSSETYKYLGMSEALGINVTDMKQSLRERFFARLRKVLNSLLSGGNKVRAFNGWVMPVLMYSFGILKWTQTELDALDRRVRTLLTESRMHHPRSSVMRLYIPRKCGGRGFLNAKTLQNREVCSLREYFLKAEVGMHRDVVAVDKGLTPLSMAKENWHRPEVLTTDDRKEVWQGKELHGRFYRALHGPDVDFLASVSWLRFGDLFGETEGFVCAIMDEVMLTNNYRKYIMKDGTVDVCRACHLPGESIRHIISGCSRLANGEYLHRHNQVARIIHQQLALKYKLVESEVPYYKYVPDPVLENDHVTLYWDRSIITDRTIVANKPDIVMMDRSARRVMIIDVTIPHDENLVKAEKEKQIKYLDLAHEVRDMWNMNSVIIVPIVVTANGLIAKSFDDHLSKLSLGGWIKGLIQKAVLLDTARIVRRFLSLQP

SEQ ID NO: 28265 - protein, 1199 aa, Xestia xanthographa
MLTRAAAQRARLPSPESSLSSASPPPDPGSPVSPVAAVASSSSDEYFSPPTSPPPVRRAGRGRPPTSLGLRGQQAPSRVPVTGGCVQRMKWTQSINENVMRAYYGSTEGGTNLTAYRVRMLSLFQDLEPTVNVSAQRLSDQVRVIQRNHRLDDAALDRLRSEVLSNLIILTPTQTAVHTSVNNVTLPRLNPDVVEEDDRVATVSSQCNYRLRSALEDAFREYRSTPTELRPRLPRLPMHKKNRALVCALDSQLKNIFESSENLVDTHSILFCGAVAACRLANVKFPNCDVATRPKPAVPAWQCRIERRIDEARVLIGKLYCFREGNTRLRVMRFVRRAFSGTEISPQEYMSRVTERIDFLKQKVYAWANRIRRYKRRVDRYSQNRMFQSDERWVYRAWERPEQNMTDVCRPDDAATSSFWRSIWSVPVCHTESDWMRDVERVCEPIPEMEPILITPLDIAKAVRPLPNWKSPGPDGLHNFWLKWFSSSHTCLASQFQSSLESGSLPQFLTTGVTHLLHKSGSPAEPKNYRPITCLSTIYKLLTSILRVKINTHIDKNSIMSASQNGCRNGSRGTKELLLIDMAISQQVRRSRKDLSTCWIDYKKAYDSVPHTWLMRVLELYKIDTTLRAFLESCMGQWKTVLRYPGCRQIQGSDEPVWIKRGIFQGDSLSPLWFCLALNPLSTLLENSGLGCRLRKDGQVISHLLYMDDLKLFAPNKLRLMELLKVTETFSSAIRMEFGVDKCAVMYVKRGEIMESEGLQLSDSIHLRSLSSSETYKYLGMSEALGINITDMKQSLKERFFGRLRKVLNSLLSGGNKVRAFNGWVMPVLMYSFGILKWTQTELDALDRRVRTLLTETRMHHPRSSVMRLYIPRKCGGRGFLNAKTLHNREVCSLREYFLKAEVGMHRDVVAVDKGLTPLSMAKENWHKPEVLTTDDRKEVWQGKELHGRFYRALHGPDVDFLASVFWLRFGDLFGETEGFVCAIMDEVMLTNNYRKYIMKDGTVDVCRACHLPGESIRHIISGCSRLANGEYLHRHNQVARIIHQQLALKYKLVESEVPYYKYVPDPVLEKDHVTLYWDRSIITDRTIVANKPDIVMIDRSARRVMIIDVTIPHDENLVKAEKEKQIKYLDLAHEVRDMWNMNSVIIVPIVVTANGLIAKSFDDHISKLSLGGWIKGLIQKAVLLDTARIVRRFLSLQP

SEQ ID NO: 28266 - protein, 962 aa, Xestia xanthographa
MHKKNRALVCALDSQLKNIFESSENLVDTHSILFCGAVAACRIANVKFPNCDVATRPKPAVPAWQSRIERRIDGARVLIGKLYCFREGNTRPRVMRFVRRAFSGTEISPQEYMSRATERIDFLKQKVYAWANRIRRYKRRVDRYSQNRMFQSDERWVYRTWERPEQNMTDVCRPDDAATSSFWRSIWSVPVCHTEADWMRDVERVCEPIPEMEPIFITPLDVARAVRPLPNWKSPGPDGLHNFWLKWFSSSHTCLASQFQSSLESGSLPQFLTTGVTHLLHKSGSPTEPKNYRPITCLSTIYKLLTSILRMKINIHIDKNSIMSASQNGCRNGSRGTKELLLIDMAISQQVRRSRKDLSTCWIDYKKAYDSVPHTWLMRVLELYRVDATLRTFLESCMGQWKTVLRYPGCRQIQGSDEPVWIKRGIFQGDSLSPLWFCLALNPLSTLLENSGLGCRLRKDGQVISHLLYMDDLKLFAPNKLRLMELLKVTETFSSAIRMEFGVDKCAVMYVKRGEIMESEGLQLSDSIHLKSLSSSETYKYLGMSEALGINVTDMKQSLRGRFFGRLRKVLNSLLSGGNKVRAFNGWVMPVLMYSFGILKWTQTELDALDRRVRTLLTESRMHHPRSSVMRLYIPRKCGGRGFLNAKTLHNREVCSLREYFLKAEVGMHRDVVAVDKGLTPLSMAKENWHRPEVLTTDDRKEVWQGKELHGRFYRALHGPDVDFLASVSWLRFGDLFGETEGFVCAIMDEVMLTNNYRKYIMKDGTVDVCRACHLPGESIRHIISGCSRLANGEYLHRHNQVARIIHQQLALKYKLVESEVPYYKYVPDPVLENDHVTLYWDRSIITDRTIVANKPDIVMMDRSARRVMIIDVTIPHDENLVKAEKEKQIKYLDLAHEVRGMWNMNSVIIVPIVVTANGLIAKSFDDHLSKLSLGGWIKGLIQKAVLLDTARIVRRFLSLQP

SEQ ID NO: 28267 - protein, 1202 aa, Cosmia trapezina
MLTRSAARARPPPPDSSLSSASPPPVSSPTVSAVTTPAAVVASSSSDEYFSPPTSPIPVRRQGRGRPPKSLGLGGQPAPSRVPAAGGCVQRMRWTQSMNENVMRAYYGSTEGGTNLTAYRVRMLSLFQELEPTVNVSAQRLSDQVRVIQRNHRLDDAALDRLRSEILSDRIVSTQAQTAVQDSIIDALPPRSNHVVEEEDDRVATVSSQSNDRLRSALEDAFREYRSTPTELRPRLPRLPMHKKNRALVCALDSHLKDFFESSEDLVDTHSILYCAAVAACRLANVKFPNCDGANRSKPAVPAWQCRIERRIDGARVLIGKLYCFREGNTRPRVMRFVRRAFSGTGISPPEYMSRVTERIDFLKQKVCAWASRIRRYKRRVDRYTQNRMFQSDERWVYRAWERPEQNVTDVCRPDDAATSAFWRSIWSVPVCHAEAGWMQDVERVCETIPEMETVLITPLDVARAVRPFPNWKSPGPDGLHNFWLKWLISSHTCLASQFQSSLESGSLPQFLTTGVTHLLHKSGSPVEPKNYRPITCLSTVYKLLTSILRAKINTHIASNSIISASQNGCRTGSRGTKELLLIDMAISQQVRRSRKDLSTCWIDYKKAYDSVPHTWLLKVLELYKIDATLRTFLESCMGQWRTVLRYPGCQQIRGSDEPVWIKRGIFQGDSLSPLWFCLALNPLSTLLEDSGLGYRLRRGGQVISHLLYMDDLKLFAPNELRLMELLKVTETFSGAIRMEFGVDKCAVMHVKRGEIMESEGIQLTDSIYLRSLSSSETYKYLGMSEALGINVADVKQSLKERFFGRLKKVLISLLSGGNKVRAFNGWVMPVLMYSFGILKWTQTELDALDRRVRTLLTANRMHHPRSSVMRLYIPRKCGGRGFLNAKTLHNREVCSLREYFLKADVGMHCDVVAVDKGLTPLSMAKENWRKPVLLTTDDRRKVWQSKELHGRFYRALHEPGVDFLASVSWLRFSDLFGETEGFVCAIMDEVILTNNYRRYIMKDGTVDVCRACHRPGESIRHIISGCSRLANGEYLHRHNQVARIIHQQLALKYKLVDSEVPYYKYVPDPVLENDHVTLYWDRSIITDRTIVANKPDIVVIDRLARRAMIVDVTIPHDGNLVKAEKEKQIKYLDLAHEVVDMWNVDSAVIVPIVVTANGLIADSLDQHLSRLSLGGWIKGQIQKAVLLDTARIVRRFLSLQP

SEQ ID NO: 28268 - protein, 1199 aa, Mamestra brassicae
MITRAAARRAHPPPPGSSLSSASPTPDIGSQVSPVVAVASSSSDEYFSPPTSPTPVRRQGRGRPPRSLGSRGQPALSRVPAAGGCVQRMRWTQSMNENVMRAYYGSTEGGTNLTAYRVRMLSLFQDLEPTVNVSAQRLSDQVRVLQHNCRLDDAALERLRSEVLSNLIISTPTQTVVQAPASGAITPRPNNGSDEVDDRVVTVSSQCNDRLRSALEDALREYRLTPTELRPRLPRLPMHKKNRALVCALDSLLQNIFESSESLVDTHSILFCGAVAACRIANVKFPSCDEAIRPKPAAPAWQCRIERRIDEARALIGKLYCFREGNTRPRVMRFVRRAFSGTGISPREYTFRVTERIDFLKQKVCAWANRIRRYKRRVDRYSQNRMFQSDERWVYRAWERPEQSVTDVYRPDDVATSTFWRSIWSVPICHAEGGWMRDVERVCEAIPQMEKITITTLDIAKAVRPLPNWKSPGPDGLHNFWLKWYSSSHALLASQFQSSLESGSLPQFLTTGITHLLHKTGSPAEPKNYRPITCLSTVYKLLTSILRAKINEHIESNSIMSASQNGCRKGSRGTKELLLIDMAISQQVRRSRKDLSTCWIDYKKAYDSVPHTWLMKVLELYKIDATLRTFLESCMRQWKTVLRYPGCQPIQGSDEPVWIKRGIFQGDSLSPLWFCLALNPLSTLLEDSGLGYRLRRGGQAISHLLYMDDLKLFAPNNLRLMELLKVTETFSSAIRMEFGVDKCAVMHVKKGEIMESEGIQLSDSIQVRSLSSTESYKYLGMSEALGINGTDMKQSLRERFFGRLKKVLNSLLSGGNKVRAFNGWVMPVLMYTFGILKWTQTELDALDRRVRTLLTANRMHHPRSSVMRLYIPRKCGGRGFLNAKTLHNREMCSLREYFLKADVGMHRDVVAVDKGLTPLSMAKENWRKPVILTTDDRKEVWKGKELHGRFYRALYGSDVDFSASVAWLRFGDLFGETEGFVCAIMDEVILTNNYRKHIMKDGTVDVCRACHRPGESIRHIISGCSRLANGEYLHRHNQVARIIHQQLALKYKLVDSEVPYYKYVPDPVLENDHVTLYWDRSIITDRTIVANKPDIVVIDRLARRTMIIDVTIPHDENLVKAEKEKQIKYLDLAHEVVDMWNVDLAVIVPIVITANGLMAKSFDDHLSKLALSSWIKGLIQKALLLDTARIVRRFLSLEP

SEQ ID NO: 28269 - protein, 1199 aa, Mamestra brassicae
MITRAAARRAHPPPPGSSLSSASPTPDIGSQVSPVVAVASSSSDEYFSPPTSPTPVRRQGRGRPPRSLGSRGQPAPSRVPAAGGCVQRMRWTQSMNENVMRAYYGSTEGGTNLTAYRVRMLSLFQDLEPTVNVSAQRLSDQVRVIQHNCRLDDAALERLRSEVLSNLIISTPTQTVVQAPASGAITPRPNNGSDEVDDRVVTVSSQCNDRLRSALEDALREYRLTPTELRPRLPRLPMHKKNRALVCALDSLLQNIFESSESLVDTHSILFCGAVAACRIANVKFPSCDEAIRPKPAAPAWQCRIERRIDEARALIGKLYCFREGNTRPRVMRFVRRAFSGTGISPREYTFRVTERIDFLKQKVCAWANRIRRYKRRVDRYSQNRMFQSDERWVYRAWERPEQSVTDVYRPDDVATSTFWRSIWSVPICHAEGGWMRDVERVCEAIPQMEKITITTLDIAKAVRPLPNWKSPGPDGLHNFWLKWYSSSHALLASQFQSSLESGSLPQFLTTGITHLLHKTGSPAEPKNYRPITCLSTVYKLLTSILRAKINEHIESNSIMSASQNGCRKGSRGTKELLLIDMAISQQVRRSRKDLSTCWIDYKKAYDSVPHTWLMKVLELYKIDATLRTFLESCMRQWKTVLRYPGCQPIQGSDEPVWIKRGIFQGDSLSPLWFCLALNPLSTLLEDSGLGYRLRRGGQAISHLLYMDDLKLFAPNNLRLMELLKVTETFSSAIRMEFGVDKCAVMHVKKGEIMESEGIQLSDSIQVRSLSSTESYKYLGMSEALGINGTDMKQSLRERFFGRLKKVLNSLLSGGNKVRAFNGWVMPVLMYTFGILKWTQTELDALDRRVRTLLTANRMHHPRSSVMRLYIPRKCGGRGFLNAKTLHNREMCSLREYFLKADVGMHRDVVAVDKGLTPLSMAKENWRKPVILTTDDRKEVWKGKELHGRFYRALYGSDVDFSASVAWLRFGDLFGETEGFVCAIMDEVILTNNYRKHIMKDGTVDVCRACHRPGESIRHIISGCSRLANGEYLHRHNQVARIIHQQLALKYKLVDSEVPYYKYVPDPVLENDHVTLYWDRSIITDRTIVANKPDIVVIDRLARRTMIIDVTIPHDENLVKAEKEKQIKYLDLAHEVVDMWNVDSAVIVPIVITANGLMAKSFDDHLSKLALRGWIKGLIQKAVLLDTARIVRRFLSLEP

SEQ ID NO: 28270 - protein, 1111 aa, Noctua fimbriata
MRWTHSINENVMRAYYGSTEGGTNLTAYRVGMLSLFQVLEPTVNVSAQRLSDQVRVIQRNHMLDDAVLDRLRSEVLSNRIVLTPAQTAVQASVIDATPPRFNPAVVEEDDRVAVVSSQCNDRLRSALEDALREYRSTPTELRPRLPRLPMHNKNRALVCALDSQLENIFENSENLVDTHSILYCGAVAACRLANVKFPNCDVATRPKPAVPAWQRRIERRIDGARVLIGKLHCFREGNTRPRVMRFVRRAFSGTGISPQEYMSRVTERIDFLKQKVYAWANRIRRYKRRVDRYSQNRMFQSDERWVYRAWERPELNMTDVCRPDDAATSSFWRSIWSVPVCHTEADWMRDVERVCEPIPEMEPILITPLDIARAVRPLPNWKSPGPDGLHNFWLKWLSSSHTCLASQFQSSLESGSLPQFLTTGVTHLLHKSGSPAQPKNYRPITCLSTVYKLLTSILRAKINTHIDKNSIMSASQNGCRNGSRGTKELLLIDMAISQQVRRSRKDLSTCWIDYKKAYDSVPHTWLMRVLELYKIDATLRAFLESCMGQWRTVLRYPGCRQIQGNDEPVWIKRGIFQGDSLSPLWFCLALNPLSTLLEDSGLGYRLRRGGQVISHLLYMDGLKLFAPNKLQLMELLKVTETFSSAIRMEFGVDKCAVMYVKRGEIMESEGIQLSDSIHPRSLSSSESYKYLGMSEALGINVTDMKQSLKERFFGRLNKVLHSLLSGGNKVRAFNGWVMPVLMYSFGVLKWTQTELDALDRRVRTLLTANRMHHPRSSVMRLYIPRKCGGRGFLNAKSLHNREMCSLREYFFKVEVGMHRDVVAVDKGLTPLSMAKENWRKPEVLTTDDRKEVWQGKELHGRFYRALHGPDVDFLASVSWLRFGDLFGETEGFVCAIMDEVMLTNNYRKYIMKDGTVDVCRACHRPGESIRHIISGCSRLANGEYLHRHNQVARIIHQQLALKYKLVESEVPYYKYVPDPVLEKDHVTLYWDQSIITDRTIVANKPDIVVIDRSARRVMIVDVTIPHDENLVKAEKEKQIKYLDLAHEVVDMWNVNSAIIVPIVVTANGLIAKSLDDHLSKLSLGGWIKGLIQKAVLLDTARIVRRFLSLEP

SEQ ID NO: 28271 - protein, 1206 aa, Noctua fimbriata
MITRSRAKQLQEAHTPSPGSSLSSASQPPRRATSVSTVSPVAAVASSSSDEFFSPPSTPPPSPRRRGRGRPPAGLGPRGQPAPNRVPAAGGNVSRMRWTQSINEQVMRAYYGATEGGTNLTAYRVGMLSLFQVLEPTINVSAQRLSDQVRVIQRNHMLDDAVLDRLRSEVLSNRIVFTPAQTAVQASVIDATPPRFNPAVVEEDDRVAVVSSQCNDRLRSALEDALREYRSTPTELRPRLPRLPMHNKNRALVCALDSQLKNLFESSENLVDTHSILYCGAVAACRLANVKFPNCDVATRPKPAVPAWQRRIECRIDGARVLIGKLHCFREGNTRPRVMRFVRRAFSGTGISPQEYMSRVTERIDFLKQKVYAWANRIRRYKRRVDRYSQNRMFQSDERWVYRAWERPDQNMTDMCRPDDAATSSFWRSIWSVPVCHTEADWMRDVEQVCEPIPEMEPILITPLDVARAVRPLPNWKSPGPDGLHNFWLKWLSSSHTCLASQFQSSLESGSLPQFLTTGVTHLLHKSGSPAEPKNYRPITCLSTVYKLLTSILRAKINTHIDKNSIMSASQNGCRNGSRATKELLLIDMAISQQVRRSRKDLSTCWIDYKKAYDSVPHTWLMRVLELYKIDATLRAFLESCMGQWRTVLRYPGCRQIQGNDEPVWIKRGIFQGDSLSPLWFCLALNPLSTLLEDSGLGYRLRRGGQVISHLLYMDDLKLFAPNKLQLMELLKVTETFSSAIRMEFGVDKCAVMYVKQGEIMESEGIQLSDSIHLRTLSSTESYKYLGMSEALGINVTDMKQSLKERFFGRLNKVLHSLLSGGNKVRAFNGWVMPVLMYSFGVLKWTQTELDALDRRVRTLLTANRMHHPRSSVMRLYIPRKCGGRGFLNAKSLHNREMCSLREYFLKVEVGMHRDVVAVDKGLTPLSMAKENWRKPEVLTTDDRKEVWQGKELHGRFYRALHGPDVDFLASVSWLRFGDLFGETEGFVCAIMDEVMLTNNYRKYIMKDGTVDVCRACHRPGESIRHIISGCSHLANGEYLHRHNQVARIIHQQLALKYKLVESEVPYYKYVPDPVLEKDHVTLYWDQSIITDRTIVANKPDIVVIDRSARRVMIVDVTIPHDENLVKAEKEKQIKYLDLAHEVVDMWNVNSAIIVPIVVTANGLIAKSLDDHLSKLSLGGWIKGLIQKAVLLDTARIVRRFLSLEP

SEQ ID NO: 28272 - protein, 1202 aa, Noctua fimbriata
MLTRAAARRARLPPPDPSHSSASPPPESSHIVSAVTPAVAVASSSSDEYFSPPTSPTPVRRQGRGRPPRSLGLRGHPAPSRVPAAGGCVQRMRWTHSINENVMRAYYGSTEGGTNLTAYRVGMLSLFQVLEPTISVSAQRLSDQVRVIQRNHMLDDAVLDRLRSEVLSNLIVFTPAQTAVQASVIDATPPRFNPAVVEEDDRVAVVSSQCNDRLRSALEDALREYRSTPTELRPRLPRLPMHNKNRALVCALDSQLKNLFESSENLVDTHSILYCGAVAACRLANVKFPSCDVATRPKPAVPAWQRRIERRIDGARVLIGKLHCFREGNTRPRVMRFVRRAFSGTGISPQEYMSRVTERIDFLKQKVYAWANRIRRYKRRVDRYSQNRMFQSDERWVYRAWERPDQNMTDVCRPDDAATSSFWRSIWSVPVCHTEADWMRDVEQVCEPIPEIEPILITPLDVARAVRPLPNWKSPGPDGLHNFWLKWLSSSHTCLASQFQSSLESGSLPQFLTTGVTHLLHKSGSPAEPKNYRPITCLSTVYKLFTSILRAKINTHIDKNSIMSASQNGCRNGSRGTKELLLIDMAISQQVRRSRKDLSTCWIDYKKAYDSVPHTWLMRVLELYKIDATLRAFLESCMGQWRTVLRYPGCRQIQGNDEPVWIKRGIFQGDSLSPLWFCLALNPLSTLLEDSGLGYRLRRGGQVISHLLYMDDLKLFAPNKLRLMELLKVTETFSSAIRMEFGVDKCAVMYVKQGEIMESEGIQLSDSIHLRTLSSTESYKYLGMSEALGINVTDMKQSLKERFFGRLNKVLHSLLSGGNKVRAFNGWVMPVLMYSFGVLKWTQTELDALDRRVRTLLTANRMHHPRSSVMRLYIPRKCGGRGFLNAKSLHNREMCSLREYFLKVDLGMHRDVVAVDKGLTPLSMAKENWRKPEVLTTDDRKEVWQGKELHGRFYRALHGPDVDFLASVSWLRFGDLFGETEGFVCAIMDEVMLTNNYRKYIMKDGTVDVCRACHRPGESIRHIISGCSRLANGEYLHRHNQVARIIHQQLALKYKLVESEVPYYKYVPDPVLEKDHVTLYWDQSIITDRTIVANKPDIVVIDRSARRVMIVDVTIPHDENLVKAEKEKQIKYLDLAHEVVDMWHVNSAIIVPIVVTANGLIAKSLDEHLSKLSLGGWIKGLIQKAVLLDTARIVRRFLSLEP

SEQ ID NO: 28273 - protein, 1100 aa, Noctua fimbriata
MRAYYGSTEGGTNLTAYRVGMLSLFQVLEPTVNVSAQRLSDQVRVIQRNHMLDDAVLDRLRSEVLSNRIVLTPAQTAVQASVIDATPPWFNPAVVEEDDRVAVVSSQCNDRLRSALEDALREYRSTPTELRPRLPRLPMHNKNRALVCALDSQLKNIFESSENLVDTHSILYCGAVAACRLANVKFPNCDVATRPKPAVPAWQRRIERRIDGARVLIGKLHCFREGNTRPRVMRFVRRAFSGTGISPQEYMSRVTERIDFLKQKVYAWANRIRRYKRRVDRYSQNRMFQSDERWVYRAWERPELNMTDVCRPDDAATSSFWRSIWSVPVCHTEADWMRDVERVCEPIPEMEPILITPLDIARAVRPLPNWKSPGPDGLHNFWLKWLSSSHTCLASQFQSSLESGSLPQFLTTGVTHLLHKSGSPAEPKNYRPITCLSTVYKLLTSILRAKINTHIDKNSIMSASQNGCRNGSRGTKELLLIDMAISQQVRRSRKDLSTCWIDYKKAYDSVPHTWLMRVLELYKIDATLRAFLESCMGQWRTVLRYPGCRQIQGNDEPVWIKRGIFQGDSLSPLWFCLALNPLSTLLEDSGLGYRLRRGGQVISHLLYMDDLKLFAPNKLRLMELLKVTETFSSAIRMEFGVDKCAVMYVKQGEIIESEGIQLSDSIHLRTLSSTESYKYLGMSEALGINVTDMKQSLKERFFGRLNKVLHSLLSGGNKVRAFNGWVMPVLMYSFGVLKWTQTELDALDRRVRTLLTANRMHHPRSSVMRLYIPRKCGGRGFLNAKSLHNREMCSLREYFLKVEVGMHRDVVAVDKGLTPLSMAKENWRKPEVLTTDDRKEVWQGKELHGRFYRALHGPDVDFLASVSWLRFGDLFGETEGFVCAIMDEVMLTNNYRKYIMKDGTVDVCRACHRPGESIRHIISGCSRLANGEYLHRHNQVARIIHQQLALKYKLMESEVPYYKYVPDPVLEKDHVTLYWDQSIITDRTIVANKPDIVVIDRSARRVMIVDVTIPHDENLVKAEKEKQIKYLDLAHEVVDMWHMNSAVIVPIVVTANGLIAKSLDDHLSKLSLGGWIKGLIQKAVLLDTARIVRRFLSLEP

SEQ ID NO: 28274 - protein, 1050 aa, Noctua fimbriata
MLDDAVLDRLRSEVLSNRIVLTPAQTAVQASVIDATPPRFNPAVVEEDDRVAVVSSQCNDRLRSALEDALREYRSTPTELRPRLPRLPMHNKNRALVCALDSQLENIFESSENLVDTHSILYCGAVAACRLANVKFPNCDVATRPKPAVPAWQRRIERRIDGARVLIGKLHCFREGNTRPRVMRFVRRAFSGTGISPQEYMSRATERIDFLKQKVYAWANRIRRYKRRVDRYSQNRMFQSDERWVYRAWERPEPNMTDVCRPDDAATSSFWRSIWSVPVCHTEADWMCDVERVCEPIPEMEPILITPLDIARTVRPLPNWKSPGPDGLHNFWLKWLSSSHTCLASQFQSSLESGSLPQFLTTGVTHLLHKSGSPAEPKNYRPITCLSTVYKLLTSILRAKINTHIDKNSIMSASQNGCRNGSRGTKELLLIDMAISQQVRRSRKDLSTCWIDYKKAYDSVPHTWLMRVLELYKIDATLRAFLESCMGQWRTVLRYPGCRQIQGNDEPVWIKRGIFQGDSLSPLWFCLALNPLSTLLEDSGLGYRLRRGGQVISHLLYMDDLKLFAPNELRLMELLKVTETFSSAIRMEFGVDKCAVMYVKQGEIMESEGIQLSDSIHLRTLSSTESYKYLGMSEALGINVTDMKQSLKERFFGRLNKVLHSLLSGGNKVRAFNGWVMPVLMYSFGVLKWTQTELDALDRRVRTLLTANRMHHPRSSVMRLYIPRKCGGRGFLNAKSLHNREMCSLREYFLKVEVGMHRDVVAVDKGLTPLSMAKENWRKPEVLTTDDRKEVWQGKELHGRFYRALHGPDVDFLASVSWLRFGDLFGETEGFVCAIMDEVMLTNNYRKYIMKDGTVDVCRACHRPGESIRHIISGCSRLANGEYLHRHNQVARIIHQQLALKYKLVESEVPYYKYVPDPVLEKDHVTLYWDQSIITDRTIVANKPDIVVIDRSARRVMIVDVTIPHDENLVKAEKEKQIKYLDLAHEVVDMWNVNSAIIVPIVVTANGLIAKSLDDHLSRLSLGGWIKGLIQKAVLLDTARIVRRFLSLEP

SEQ ID NO: 28275 - protein, 1050 aa, Noctua fimbriata
MLDDAVLDRLRSEVLSNRIVLTPAQTAVQASVIDATPPRFNPAVVEEDDRVAVVSSQCNDRLRSALEDALREYRSTPTELRPRLPRLPMHNKNRALVCALDSQLENIFESSENLVDTHSILYCGAVAACRLANVKFPNCDVVTRPKPAVPAWQRRIERRIDGARVLIGKLHCFREGNTRPRVMRFVRRAFSGTGISPQEYMSCVTERIDFLKQKVYAWANRIRRYKRRVDRYSQNRMFQSDERWVYRAWERPELNMTDVCRPDDAATSSFWRSIWSVPVCHTEADWMRDVERVCEPIPEMEPILITPLDIARAVRPLPNWKSPGPDGLHNFWLKWLSSSHTCLASQFQSSLESGSLPQFLTTGVTHLLHKSGSPAEPKNYRPITCLSTVYKLLTSILRAKINTHIDKNSIMSASQNGCRNGSRGTKELLLIDMAISQQVRRSRKDLSTCWIDYKKAYDSVPHTWLMRVLELYKIDATLRAFLESCMGQWRTVLRYPGCRQIQGNDEPVWIKRGIFQGDSLSPLWFCLALNPLSTLLEDSGLGYRLRRGGQVISHLLYMDDLKLFAPNKLRLMELLKVTETFSSAIRMEFGVDKCAVMYVKQGEIMESEGIQLSDSIHLRTLSSTESYKYLGMSEALGINVTDMKQSLKERFFGRLNKVLHSLLSGGNKVRAFNGWVMPVLMYSFGVLKWTQTELDALDRRVRTLLTANRMHHPRSSVMRLYIPRKCGGRGFLNAKSLHNREMCSLREYFLKVEVGMHRDVVAVDKGLTPLSMAKENWRKPEVLTTDDRKEVWQGKELHGRFYRALHRPDVDFLASVSWLRFGDLFGETEGFVCAIMDEVMLTNNYRKYIMKDGTVDVCRACHRPGESIRHIISGCSRLANGEYLHRHNQVARIIHQQLALKYKLVESEVPYYKYVPDPVLEKDHVTLYWDQSIITDRTIVANKPDIVVIDRSARRVMIVDVTIPHDENLVKAEKEKQIKYLDLAHEVVDMWNVNSAIIVPIVVTANGLIAKSLDDHLSKLSLGGWIKGLIQKAVLLDTARIVRRFLSLEP

SEQ ID NO: 28276 - protein, 1202 aa, Noctua fimbriata
MITRAAYRRARLPPPDPSLSSASPPPESSPIVSAVTPAVAVASSSSDEYFSPPTSPTPVRRQGRGRPPRSLGLRGHPAPSRVPAAGGCVQRMRWTHSINENVMRAYYGSTEGGTNLTAYRVGMLSLFQVLEPTVNVSAQRLSDQVRVIQRNHMLDDAVLDRLRSEVLSNRIVLTPAQTAVQASVIDATPPRFNPAVVEEDDRVAVVSSQCNDRLRSALEDALREYRSTPTELRPRLPRLPMHNKNRALVCALDSQLENIFESSENLVDAHSILYCGAVAACRLANVKFPNCDVATRPKPAVPAWQRRIERRIDGARVLIGKLHCFREGNTRPRVMRFVRRAFSGTGISPQEYMSRVTERIDFLKQKVYAWANRIRRYKRRVDRYSQNRMFQSDERWVYRAWERPELNMTDVCRPDDAATSSFWRSIWSVPVCHTEADWMRDVERVCEPIPEMEPILITPLDIARAVRPLPNWKSPGPDGLHNFWLKWLSSSHTCLASQFQSSLESGSLPQFLTTGVTHLLHKSGSPAEPKNYRPITCLSTVYKLLTSILRAKINTHIDKNSIMSASQNGCRNGSRGTKELLLIDMAISQQVRRSRKDLSTCWIDYKKAYDSVPHTWLMRVLELYKIDATLRAFLESCMGQWRTVLRYPGCRQIQGNDEPVWIKRGIFQGDSLSPLWFCLALNPLSTLLEDSGLGYRLRRGGQVISHLLYMDDLKLFAPNKLQLMELLKVTETFSSAIRMEFGVDKCAVMYVKRGEIMESEGIQLSDSIHLRSLSSSESYKYLGMSEALGINVTDMKQSLKERFFGRLNKVLHCLLSGGNKVRAFNGWVMPVLMYSFGVLKWTQTELDALDRRVRTLLTANRMHHPRSSVMRLYIPRKCGGRGFLNAKSLHNREMCSLREYFLKVEVGMHRDVVAVDKGLTPLSMAKENWRKPEVLTTDDRKEVWQGKELHGRFYRALHGPDVDFLASVSWLRFGDLFGETEGFVCAIMDEVMLTNNYRKYIMKDGTVDVCRACHRPGESIRHIISGCSRLANGEYLHRHNQVARIIHQQLALKYKLVESEVPYYKYVPDPVLEKDHVTLYWDQSIITDRTIVANKPDIVVIDRSARRVMIVDVTIPHDENLVKAEKEKQIKYLDLAHEVVDMWNVNSAIIVPIVVTANGLIAKSLDDHLSKLSLGGWIKGLIQKAVLLDTARIVRRFLSLEP

SEQ ID NO: 28277 - protein, 1111 aa, Noctua fimbriata
MRWTHSINENVMRAYYGSTEGGTNLTAYRVGMLSLFQVLEPTINVSAQRLSDQVRVIQRNHMLDDAVLDRLRSEVLSNRIVFTPAQTAVQASVIDATPPRFNPAVVEEDDRVAVVSSQCNDRLRSALEDALREYRSTPTELRPRLPRLPMHNKNRALVCALDSQLKNLFESSENLVDTHSILYCGAVAACRLANVKFPNCDVATRPKPAVPAWQRRIECRIDGARVLIGKLHCFREGNTRPRVMRFVRRAFSGTGISPQEYMSRVTERIDFLKQKVYAWANRIRRYKRRVDRYSQNRMFQSDERWVYRAWERPDQNMTDMCRPDDAATSSFWRSIWSVPVCHTEADWMRDVEQVCEPIPEMEPILITPLDVARAVRPLPNWKSPGPDGLHNFWLKWLSSSHTCLASQFQSSLESGSLPQFLTTGVTHLLHKSGSSAEPKNYRPITCLSTVYKLLTSILRAKINTHIDKNSIMSASQNGCRNGSRATKELLLIDMAISQQVRRSRKDLSTCWIDYKKAYDSVPHTWLMRVLELYKIDATLRAFLESCMGQWRTVLRYPGCRQIQGNDEPVWIKRGIFQGDSLSPLWFCLALNPLSTLLEDSGLGYRLRRGGQVISHLLYMDDLKLFAPNKLQLMELLKVTETFSSAIRMEFGVDKCAVMYVKQGEIMKSEGIQLSDSIHLRTLSSTESYKYLVMSEALGINVTDMKQSLKERFFGRLNKVLHSLLSGGNKVRAFNGWVMPVSMYSFGVLKWTQTELDALDRRVRTLLTANRMHHPRSSVMRLYIPRKCGGRGFLNAKSLHNREMCSLREYFLKVEVGMHRDVVAVDKGLTPLSMAKENWRKPEVLTTDDRKEVWQGKELHGRFYRALHGPDVDFLASVSWLRFGDLFGETEGFVCAIMDEVMLTNNYRKYIMKDGTVDVCRACHRPGESIRHIISGCSRLANGEYLHRHNQVARIIHQQLALKYKLVESEVPYYKYVPDPVLEKDHVTLYWDQSIITDRTIVANKPDIVVIDRSARRVMIVDVTIPHDENLVKAEKEKQIKYLDLAHEVVDMWNVNSAIIVPIVVTANGLIAKSLDDHLSKLSLGGWIKGLIQKAVLLDTARIVRRFLSLEP

SEQ ID NO: 28278 - protein, 1202 aa, Noctua fimbriata
MLTRAAARRARLPPPDPSLSSASPPPESSHIVSAVTPAVAVASSSSDEYFSPPTSPTPVRRQGRGRPPRSLGLRGHPAPSRVPAAGGCVQRMRWTHSINENVMRAYYGSTEGGTNLTAYRVGMLSLFQVLEPTVNVSAQRLSDQVRVIQRNHMLDDAVLDRLRSEVLSNRIVLTPAQTAVQASVIDATPPRFNPAVVEEDDRVAVVSSQCNDRLRSALEDALREYRSTPTELRPRLPRLPMHNKNRALVCALDSQLENIFESSENLVDTHSILYCGAVAACRLANVKFPNCDVATRPKPAVPAWQRRIERRIDGARVLIGKLHCFREGNTRPRVMRFVRRAFSGTGISPQEYMSRATERIDFLKQKVYAWANRIRRYKRRVDRYSQNRMFQSDERWVYRAWERPELNMTDVCRPDDAATSSFWRSIWSVPVCHTEADWMCDVERVCEPIPEMEPILITPLDIARAVRPLPNWKSPGPDGLHNFWLKWLSSSHTCLASQFQSSLESGSLPQFLTTGVTHLLHKSGSPAEPKNYRPITCLSTVYKLLTSILRAKINTHIDKNSIMSASQNGCRNGSRGTKELLLIDMAISQQVRRSRKDLSTCWIDYKKAYDSVPHTWLMRVLELYKIDATLRAFLESCMGQWRTVLRYPGCRQIQGNDEPVWIKRGIFQGDSLSPLWFCLALNPLSTLLEDSGLGYRLRRGGQVISHLLYMDDLKLFAPNELRLMELLKVTETFSSAIRMEFGVDKCAVMYVKQGEIMESEGIQLSDSIHLRTLSSTESYKYLGMSEALGINVTDMKQSLKERFFGRLNKVLHSLLSGGNKVRAFNGWVMPVLMYSFGVLKWTQTELDALDRRVRTLLTANRMHHPRSSVMRLYIPRKCGGRGFLNAKSLHNREMCSLREYFLKVEVGMHRDVVAVDKGLTPLSMAKENWRKPEVLTTDDRKEVWQGKELHGRFYRALHGPDVDFLASVSWLRFGDLFGETEGFVCAIMDEVMLTNNYRKYIMKDGTVDVCRACHRPGESIRHIISGCSRLANGEYLHRHNQVARIIHQQLALKYKLVESEVPYYKYVPDPVLEKDHVTLYWDQSIITDRTIVANKPDIVVIDRSARRVMIVDVTIPHDENLVKAEKEKQIKYLDLAHEVVDMWNVNSAIIVPIVVTANGLIAKSLDDHLSRLSLGGWIKGLIQKAVLLDTARIVRRFLSLEP

SEQ ID NO: 28279 - protein, 1202 aa, Noctua fimbriata
MLTRAAARRARLPPPDPSLSSASPPPESSHIVSAVTPAVAVASSSSDEYFSPPTSPTPVRRQGRGRPPRSLGLRGHPAPSRVPAAGGCVQRMRWTHSINENVMRAYYGSTEGGTNLTAYRVGMLSLFQVLEPTVNVSAQRLSDQVRVIQRNHMLDDAVLDRLRSEVLSNRIVLTPAQTAVQASVIDATPPRFNPAVVEEDDRVAVVSSQCNDRLRSALEDALREYRSTPTELRPRLPRLPMHNKNRALVCALDSQLENIFESSENLVDTHSILYCGAVAACRLANVKFPNCDVATRPKPAVPAWQRRIERRIDGARVLIGKLHCFREGNTRPRVMRFVRRAFSGTGISPQEYMSRVTERIDFLKQKVYAWANRIRRYKRRVDRYSQNRMFQSDERWVYRAWERPELNMTDVCRPDDAATSSFWCSIWSVPVCHTEADWMRDVERVCEPIPEMEQILITPLDIARAVRPLPNWKSPGPDGLHNFWLKWLSSSHTCLASQFQSSLESGSLPQFLTTGVTHLLHKSGSPAEPKNYRPITCLSTVYKLLTSILRAKINTHIDKNSIMSAYQNGCRNGFRGTKELLLIDMAISQQVRRSRKDLPTCWIDYKKAYDSVPHTWLMRVLELYKIDATLRAFLESCMGQWRTVLRYPGCRQIQGNDEPVWIKRGIFQGDSLSPLWFCLALNPLSTLLEDSGLGYRLRRGGQVISHLLYMDDLKLFAPNKLRLMELLKVTETLSSAIRMEFGVDKCAVMYVKQGEIMESEGIQLSDSIHLRSLSSTESYKYLGMSEALGINVTDMKQSLKERFFGRLNKVLHSLLSGGNKVRAFNGWVMPVLMYSFGVLKWTQTELDALDRRVRTLLTANRMHHPRSSVMRLYIPRKCGGRGFLNAKSLHNREMCSLREYFLKVQVGMHRDVVAVDKGLTPLSMAKENWRKPEVLTTDDRKEVWQGKELHGRFYRALHGPDVDFLASVSWLRFGDLFGETEGFVCAIMDEVMLTNNYRKYIMKDGTVDVCRACHRPGESIRHIISGCSRLANGEYLHRHNQVARIIHQQLALKYKLVESEVPYYKYVPDPVLEKDHVTLYWDQSIITDRTIVANKPDIVVIDRSARRVMIVDVTIPHDENLVKAEKEKQIKYLDLAHEVVDMWNVNSAIIVPIVVTANGLIAKSLDDHLSRLSLGGWIKGLIQKAVLLDTARIVRRFLSLEP

SEQ ID NO: 28280 - protein, 1202 aa, Atethmia centrago
MLTRSATRTRPPPPDPSLSSASPPPVPSATVSAMTTPTAAVASSSSDEYFSPPSSPTPVRRQGRSRPPKSLGLRGHPAPSRVPAAGGCVQRMKWTQSMNENVMRAYYGSTEGGTNLTAYRVKMLSLFQELEPAVNVSAQRLSDQVRVIQRNRRLDDAALDRLRSEVLSNHIISTPAQTAVHTPIIDVIPPRSNHGVEEQDDRAATISSQCNVRLRSALEDAFREYRSTPTELRPRLPRLPMHKKNRALMCALDSQLKVFFESSEDLVDTHSILYCAAVAACRLANVKFPNSDGATRPKPAVPAWQCRIERRIDGARVLIGKLYCFREGNTRPRVMRFVRRAFSGTGISPREYMSHITERIDFLKQKVCAWASRIRRYKRRVDRYTQNRMFQSDERWVYRAWERPKQNETDVCRPDDATTTAFWRSIWSVPVCHVEADWMRDVERVCETIPEMEVVIITPSDIARAVRPLPNWKSPGPDGLHNFWLKWLTSSHTCLASQFQSSLESGSLPQFMTTGITHLLHKSGSPAEPKNYRPITCLSTVYKLLTSILRAKINTHIDSNSIMSASQNGCRNGSRGTKELLLIDMAISQQVRRSRKDLSTCWIDYKKAYDSVPHTWLMRVLELYKIDMTLRTFLESCMGQWRTVLRYPGCRRIQGNDESVWIKRGIFQGDSLSPLWFCLALNPLSMQLEDSGLGYRLRRGGQVISHLLYMDDLKIFAPNKLQLMELLKVTETFSSAIRMEFGVDKCAVMHVKRGEIMESEGIRLSDSIHLRSLSSPESYKYLGMSEALGINVTDMKQSLKERFFGRLKKVLISLLSGGNKVRAFNGWVMPVLMYSFGILKWTQTELDALDRRVRTLLTANRMHHPRSSVMRLYIPRKCGGRGFLNAKTLHNREICSLREYFLKTEVGMHRDVVAVDKGLTPLSMAKENWCKPVVLTTDDRKEIWQNKELHGRFYRALHEPDVDFLASVSWLRFGDLFGETEGFVCAIMDEVILTNNYRRHIMKDGTVDVCRACHRPGESIRHIISGCSRLANGEYLHRHNQVARIIHQQLALKYKLVNSEVPYYKYVPDPVLENDHVTLYWDRSIITDRTIVTNKPDIVVIDRLARRAMIVDVTIPHDDNLVKAEKEKQIKYLDLAHEVVDMWNVNSAVIVPIVVTANGLMARSLNHHLSRLTLDGWIKGLIQKAVLLDTARIVRRFLSLEP

SEQ ID NO: 28281 - protein, 962 aa, Atethmia centrago
MHKKNRALVCTLDSLLKDFFESSEDLVDTHSILYCAAVAACRLANVKFPNCDGATRPKPAIPAWQCRIERRIDGARVLIGKLYCFREGNTRPRVMRFVRRAFSGTGISPREYMSRVTERIDFLKQKVCAWASRIRRYKRRVDRYTQNRMFQSDERWVYRAWERPEQNETDVCRPDDATTTAFWRSIWSVPVCHAEADWMRDVERVCETIPEMEVVIITPSDIARAVRPLPNWKSPGPDGLHNFWLKWLTSSHTCLASQFQSSLESGSLPQFLTTGITHLLHKSGSPAEPKNYRPITCLSTVYKLLTSILRAKINTHIDSNSIMSASQNGCRNGSRGTKELLLIDMAISQQVRRFRKDLSTCWIDYKKAYDSVPHTWLMRVLEFYKIDTTLRTFLESCMGQWRTVLRYPGCRQIQGNDEPVWIKRGIFQGDSLSPLWFCLALNPLSTLLEDSGLGYRLRRGGQVISHLLYMDDLKIFAPNKLQLMELLKVTETFSSAIRMEFGVDKCAVMHVKRGEIMESEGIQLSNSIHLRSLSSPESYKYLGMSEALGINVTDMKQSLKERFFGRLKKVLISPLSGGNKVRAFNGWVMPVLMYSFGILKWTQTELDALDRRVRTLLTTNRMHHPRSSVMRLYIPRKCGGRGFLNAKTLHNREICSLREYFLKTEVGMHRDVVAVDKGLTPLSMAKENWCKPVILTTDDRKEIWQNKELHGRFYRALHEPDVDFLASVSWLRFGDLFGETEGFVCAIMDEVILTNNYRRHIMKDGTVDVCRACHRPGESIRHIISGCSRLANGEYLHRHNQVARIIHQQLALKYKLVNSEVPYYKYAPDPVLENDHVTLYWDRSIITDRTIVANKPDVVVIDRLARRAMIVDVTIPHDENLVKAEKEKQIKYLDLAHEVVDMWNVDSAVIVPIVVTANGLMAESLNHHLSRLSLGGWIKGLIQKAVLLDTARIVRRFLSLES

SEQ ID NO: 28282 - protein, 1203 aa, Atethmia centrago
MLTRAASKRARPPPPDSSLSSASPPPVSSPTVSAVITPAAVVASSSSDEYFSPPTSPTPVRRQGRDRPPKSLGLRGHPAPSRVPAAGGCVQRMRWTQSMNENVMRAYYGSTEGGTNLTAYRVRMLSLFQELEPTVNVSAQRLSDQVRVIQRNRRLDDATLDRLRSEVLSNYIISTPAQTAVHTPIIDVIPPRSNHGVEEEDDRAATVSSQCNVRLRSALEDAFREYRSTPTELRPRLPRLPMHKKNRALMCALDSQLKVFFESSEDLVDTHSILYCAAVAACRLANVKFPNSDGATRPKPAVPAWQCRIERRIDKARVLIGKLYCFREGNTRPRVMRFVRRAFSGTGINPREYMSHITERIDFLKQKVCAWASRIRRYKRRVDRYTQNRMFQSDERWVYRAWERPKQNVTDVCRPDDATTTAFWRSIWSVPVCHVEADWMRDVERVCETIPEMEVVIITPSDIARAVRPLPNWKSPGPDGLHNFWLKWLTSSHTCLASQFQSSLESGSLPQFMTTGITHLLHKSGSPAEPKNYRPITCLSTVYKLLTSILRAKINTHIDSNSIMSASQNGCRNGSRGTKELLLIDMAISQQVRRSRKDLSTCWIDYKKAYDSVPHTWLMRVLELYKIDTTLRTFLESCMGQWRTVLRYPGCRQIQGNDEPVWIKRGIFQGDSLSPLWFCLALNPLSMQLEDSGLGYRLRRGGQIISHLLYMDDLKIFAPNKLQLMKLLKVTETFSSAIRMEFGVDKCAVMHVKRGEIMESEGIQLSDSIHLRSLSSPESYKYLGMSEALGINVTDMKQSLKERFFGRLKKVLISLLSGGNKVRAFNSWVMPVLTYSFGILKWTQTELDALDRRVRTLLTANRMHHPRSSVMRLYIPRKCGGRGFLNAKTLHNREICSLREYFLKTEVGMHRDVVAVDKGLTPLSMAKENWCKPVVLTTDDRKEIWQSKELHGRFYRALHEPDVDFLASVSWLRFGDLFGETEGFVCAIMDEVILTNNYRRHIMKDGTVDVCRACHRPGESIRHIISGCSRLANGEYLHRHNQVARIIHQQLALKYKLVNSEVPYYKYVPDPVLENDHVTLYWDRSIITDRTIVANKPDIVVIDRLARRAMIVDVTIPHDDNLVKAEKEKQIKYLDLAHEVVDMWNVNSAVIVPIVVTANGLMARSLNHHLSRLALDGWIKGLIQKAVLLDTARIVRRFLSLEP

SEQ ID NO: 28283 - protein, 1203 aa, Atethmia centrago
MLTRAASKRARPPPPDSSLSSASPPPVSSPTVSAVITPAAVVASSSSDEYFSPPTSPTPVRRQGRDRPPKSLGLRGHPAPSRVPAAGGCVQRMRWTQSMNENVMRAYYGSTEGGTNFTAYRVRMLSLFQELEPTVNVSAQRLSDQVRVIQRNRRLDDATLDRLRSEVLSNYIISTPAQTAVHTPIIDVIPPRSNHGVEEEDDRAATVSSQCNVRLRSALEDAFREYRSTPTELRPRLPRLPMHKKNRALMCALDSQLKVFFESSEDLVDTHSILYCAAVAACRLANVKFPNSDGATRPKPAVPAWQCRIERRIDKARVLIGKLYCFREGNSRPRVMRFVRRAFSGTGISPREYMSHITERIDFLKQKVCAWASRIRRYKRRVDRYTQNRMFQSDERWVYRAWERPKQNVTDVCRPDDATTTAFWRSIWSVPVCHVEADWMRDVERVCETIPEMEVVIITPSDIARAVRPLPNWKSPGPDGLHNFWLKWLTSSHTCLASQFQSSLESGSLPQFMTTGITHLLHKSGSPAEPKNYRPITCLSTVYKLLTSILRAKINTHIDSNSIMSASQNGCRNGSRGTKELLLIDMAISQQVRRSRKDLSTCWIDYKKAYDSVPHTWLMRVLELYKIDTTLRTFLESCMGQWRTVLRYPGCRQIQGNDEPVWIKRGIFQGDSLSPLWFCLALNPLSMQLEDSGLGYRLRRGGQIISHLLYMDDLKIFAPNKLQLMKLLKVTETFSSAIRMEFGVDKCAVMHVKRGEIMESEGIQLSDSIHLRSLSSPESYKYLGMSEALGINVTDMKQSLKERFFGRLKKVLISLLSGGNKVRAFNSWVMPVLTYSFGILKWTQTELDALDRRVRTLLTANRMHHPRSSVMRLYIPRKCGGRGFLNAKTLHNREICSLREYFLKTEVGMHRDVVAVDKGLTPLSMAKENWCKPVVLTTDDRKEIWQSKELHGRFYRALHEPDVDFLASVSWLRFGDLFGETEGFVCAIMDEVILTNNYRRHIMKDGTVDVCRACHRPGESIRHIISGCSRLANGEYLHRHNQVARIIHQQLALKYKLVNSEVPYYKYVPDPVLENDHVTLYWDRSIITDRTIVANKPDIVVIDRLARCAMIVDVTIPHDDNLVKAEKEKQIKYLDLAHEVVDMWNVNSAVIVPIVVTANGLMARSLNHHLSRLALDGWIKGLIQKAVLLDTARIVRRFLSLEP

SEQ ID NO: 28284 - protein, 962 aa, Atethmia centrago
MHKKNRALMCALDSQLKVFFESSEDLVDTHSILYCAAVAACRLANVKFPNSDGATRPKPAVPAWQCRIERRIDKARVLIGKLYCFREGNTRPRVMRFVRRAFSGTGISPREYMSHITERIDFLKQKVCAWASRIRRYKRRVDRYTQNRMFQSDERWVYRAWERPKQNVTDVCRPDDATTTAFWRSIWSVPVCHVEADWMRDVERVCKTIPEMEVVIITPSDIARAVRPLPNWKSPGPDGLHNFWLKWLTSSHTCLASQFQSSLESGSLPQFMTTGITHLLHKSGSPAEPKNYRPITCLSTVYKFLTSILRAKINTHIDSNSIMSASQNGCRNGSRGTKELLLIDMAISQQVRRSRKDLSTCWIDYKKAYDSVPHTWLMRVLELYKIDTTLRTFLGSCMGQWRTVLRYQGCRQIQGNDEPVWIKRGIFQGDSLSPLWFCLALNPLSMQLEDSVLGYRLRRGGQVISHLLYMDDLKIFAPNKLQLMKLLKVTETFSSAIRMEFGVDKCAVMHVKRGEIMESEGIQLSDSIHLRSLSSPESYKYLGMSEALGINVTDMKQSLKERFFGRLKKVLISLLSGGNKVRAFNGWVMPVLMYSFGILKWTQTELDALDRRVRTLLTANRMHHPRSSVMRLYIPRKCGGRGFLNAKTLHNREICSLREYFLKTEVGMHRDVVAVDKGLTPLSMAKENWCKPVVLTTDDRKEIWQSKELHGRFYRALHEPDVDFLASVSWLRFGDLFGETEGFVCAIMDEVILTNNYRRHIMKDGTVDVCRACHRPGESIRHIISGYSRLANGEYLHRHNQVARIIHQQLALKYKLVNSEVPYYKYVPDPVLENDHVTLYWDRSIITDRTIVANKPDIVVIDRLARRAMIVDVTIPHDDNLVKAEKEKQIKYLDLAHEVVDMWNVNSAVIVPIVVTANGLMARSLNHHLSRLALDGWIKGLIQKAVLLDTARIVRRFLSLEP

SEQ ID NO: 28285 - protein, 1203 aa, Atethmia centrago
MLTRAASKRARPPPPDSSLSSASPPPVSSPTVSAVITPAAVVASSSSDEYFSPPTSPTPVRRQGRDRPPKSLGLRGHPAPSRVPAAGGCVQRMRWTQSMNENVMRAYYGSTEGGTNLTAYRVRILSLFQELEPTVNVSAQRLSDQVRVIQRNRRLDDATLDRLRSEVLSNYIISTPAQTAVHTPIIDVIPPRSNHGVEEEDDRAATVSSQCNVRLRSALEDAFREYRSTPTELRPRLPRLPMHKKNRALMCALDSQLKVFFESSEDLVDTHSILYCAAVAACRLANVKFPNSDGATRPKPAVPAWQCRIERRIDKARVLIGKLYCFREGNTRPRVMRFVRRAFSGTGISPREYMSHITERIDFLKQKVCAWASRIRRYKRRVDRYTQNRMFQSDERWVYRAWERPKQNVTDVCRPDDATTTAFWRSIWSVPVCHVEADWMRDVERVCETIPEMEVVIITPSDIARAVRPLPNWKSPGPDGLHNFWLKWLTSSHTCLASQFQSSLESGSLPQFMTTGITHLLHKSGSPAEPKNYRPITCLSTVYKLLTSILRAKINTHIDSNSIMSASQNGCRNGSRGTKELLLIDMAISQQVRRSRKDLSTCWIDYKKAYDSVPHTWLMRVLELYKIDTTLRTFLESCMGQWRTVLRYPGCRQIQGNDEPVWIKRGIFQGDSLSPLWFCLALNPLSMQLEDSGLGYRLRRGGQIISHLLYMDDLKIFAPNKLQLMKLLKVTETFSSAIRMEFGVDKRAVMHVKRGEIMESEGIQLSDSIHLRSLSSPESYKYLGMSEALGINVTDMKQSLKERFFGRLKKVLISLLSGGNKVRAFNSWVMPVLTYSFGILKWTQTELDALDRRVRTLLTANRMHHPRSSVMRLYIPRKCGGRGFLNAKTLHNREICSLREYFLKTEVGMHRDVVAVDKGLTPLSMAKENWCKPVVLTTDDRKELWQSKELHGRFYRALHEPDVDFLASVSWLRFGDLFGETEGFVCAIMDEVILTNNYRRHIMKDGTVDVCRACHRPGESIRHIISGCSRLANGEYLHRHNQVARIIHQQLALNYKLVNSEVPYYKYVPDPVLENDHVTLYWDRSIITDRTIVANKPDIVVIDRLARRAMIVDVTIPHDDNLVKAEKEKQIKYLDLAHEVVDMWNVNSAVIVPIIVTANGLMARSLNHHLSKLALDGWIKGLIQKAVLLDTARIVRRFLSLEP

SEQ ID NO: 28286 - protein, 1201 aa, Mesoligia furuncula
MLTRSAARRAHLPPPDSSLSPAPPPPEPSPIESAVTPAVAVASSSSDEYFSPPTSPTPVRRQGRGRPPNSLGLRGHPAPSRVPATGGCVQRMRWTQSMNENVMRAYYGSTEGGINLTAYRDRMLSLFQELEPTVNVSAQRLSDQVRVIQRNHRLDDIALNRLRSEVLSNHIVSTSAQTAAQVSTVDAIPPRFNRVEEEDDRVDTVSSQCNVRLRSALEDALREYRSTPTELRPRLPRLPMHKKNRALVCALDSQLKNFFESSEDLVDTHSILYCAAVAACRLANVKFSSCDGATRPKPAVPAWQRRIERRIDGARVLIGKLYCFREGNTRPRVMRFVRRAFSGTGISPREYMSRVTERIDFLKQKVCAWASRIRRYKRRVDRYTQNRMFQSDERWVYRAWERPEQNVTDVCRPDDAATSAFWCSIWSVPVCHTEAGWMQDVERVCESVPEMEKVLITPSDVARAVRPLSNWKSPGPDGLHNFWLKWLISSHTCLASQFQSSLESGSLPQFLTTGVTHLLHKSSSPAEPKNYRPITCLSTVYKLLTSILRAKINKHIESNSIMSASQNGCRNGSRGTKELLLIDMAISQQVRRSRKDLSTCWIDYKKAYDSVPHTWLMRVLELYKIDATLRTFLESCMGQWKTVLRYPGCRQIQGNDEPVWIKRGIFQGDSLSPLWFCLALNPLSTLLEDSGLGYRLRRGGQVISHLLYMDDLKLFAPNKLRLMELLKVTKTFSSAIKMEFGVDKCAVMHVKRGEIMESEEIQLSDSISLRSLSSSESYKYLGMSEALGINDADMKQSLKERFFCRLKKVLISLLSGGNKVRAFNGWVMPVLMYSFGILKWTQTELDALDRRVRTLLTANRMHHPRSSVMRLYIPRKCGGRGFLNAKTLHNREVCSLREYFLKAEVGMHRDVVAVDKGLTPLSMAKENWRKPVVLSTDDRKRVWQSKELHGRFYRALHEPGVDFIASVSWLRFGDLFGETEGFVCAIMDEVILTNNYRRHIMKDGTVDVCRACHRPGESIRHIISGCSRLANGEYLHRHNQVARIIHQQLALKYKLVDSEVPYYKYVPDPVLENDHVTLYWDRSIITDRTIVANKPDIVVIDRLARRTMIVDVTIPHDGNLVKAEKEKQIKYLDLAHEVVDMWNVSSAIIVPIVVSANGLMAESLDQHLSRLSLGGWIKGLIQKAVLLDTARIVRRFLSLEP

SEQ ID NO: 28287 - protein, 1201 aa, Mesoligia furuncula
MLTRLAARRARLPPPDSSLSSAPPPPEPSPIESAVTPAVAVASSSSDEYFSPPTSPTPVRRQGRGRPPNSLGLRGHPAPSRVPATGGCVQRMRWTQSMNENVMRAYYGSTEGGINLTAYRDSMLSLFQELEPTVNVSAQRLSDQVRVIQRNHRLDDIALDRLRSEVLSNHIVTTSAQTAAQASTVDAIPPRFNHVEEEDDRVDTVSSQCNVRLRSALEDALREYRSTPTELRPRLPRLPMHKKNRALVCALDSQLKNFFESSEDLVDTHSILYCAAVAACRLANVKFPSCDGATRPKPAVPAWQRRIERRIDGARVLIGKLYCFREGNTRPRVMRFVRRAFSGTGISPREYMSRLTERIDFLKQKVCAWASRIRRYKRRVDRYTQNRMFQSDERWVYRAWERPEQNVTDVCRPDNAATSAFWCSIWSVPVCHTEAGWMQDVERVCESIPQMEKVLITPSDVARAVRPLPNWKSPGPDGLHNFWLKWLISSHTCLASQFQSSLESGSLPQFLTTGVTHLLHKSGSPAEPKNYRPITCLSTVYKLLTSILRAKINTHIESNSIMSASQNGCRNGSRGTKELLLIDMAISQQVRRSRKDLSTCWIDYKKAYDSVPHTWLMRVLELYKIDATLRTFLESCMGQWKTVLRYPGCRQIQGNDEPVWIKRGIFQGDSLSPLWFCLALNPLSTLLEDSGLGYRLRRGGQVISHLLYMDDLKLFAPNKLRLMELLKVTETFSSAIRMQFGVDKCAVMHVKRGEIMESEGIQLSDSISLRSLSSSESYKYLGMSEALGINDADMKQSLKERFFCRLKKVLISLLSGGNKVRAFNGWVMPVLMYSFGILKWTQTELDALDRRVRTLLTANRMHHPRSSVMRLYIPRKCGGRGFLNAKTLHNREVCSLREYFLKAEVGMHRDVVAVDKGLTPLSMAKENWRKPVVLSTDDRKKVWQSKELHGRFYRALHEPGVDFIASVSWLRFGDLFGETEGFVCAIMDEVILTNNYRRHIMKDGTVDVCRACHRPGESIRHIISGCSRLANGEYLHRHNQVARIIHQQLALKYKLVDSEVPYYKYVPDPVLENDHVTLYWDRSIITDRTIVANKPDIVVIDRLARRTMIVDVTIPHDGNLVKAEKEKEIKYQDLAHEVVDMWNVSSAIIVPIVVSANGLMAESLDQHLSRLSLGGWIKGLIQKAVLLDTARIVRRFLSLQP

SEQ ID NO: 28288 - protein, 962 aa, Mesoligia furuncula
MHKKNRALVCALDSQLKNFFESSVDLVDTHSILYCAAVAACRLANVKFPSCDGATRPKPAVPAWQRWIERRIDGARVLIGKLYCFREGNTRPRVMRFVRRAFSGTGISPREYMSRVTERIDFLKQKVCAWASRIRRYKRRVDRYTQNRMFQSDERWVYRAWERPEQNVTDVCRPDDAATSAFWCSIWSVPVCHTEAGWMQDVERVCESVPEMETVLITPSDVARAVRPLSNWKSPGPDGLHNFWLKWLISSHTCLASQFQLSLESGSLPQFLTTGVTHLLHKSGSPAEPKNYRPITCLSTVYKLLTSILRAKINKHIESNSIMSTSQNGCRNGSRGTKELLLIDMAISQQVRRSRKDLSTCWIDYKKAYDSVPHTWLMRVLELYKIDATLRTFLESCMGQWKTILRYPGCRQIQGNDEPVWIKRGIFQGDSLSPLWFCLALNPLSTLLEDSGLGYRLRRGGQVISHLLYMDDLKLFAPNKLRLMELLKVTKTFSSAIRMEFGVDKCAVMHVKRGEIMESEGIQLSDSISLRSLSSSESYKYLGMSEALGINDADMKQSLKERFFCRLKKVLISLLSGGNKVRAFNGWVMPVLMYSFGILKWTQTELDALDRRVRTLLTANRMHHPRSSVMRLYIPRKCGGRGFLNAKTLHNREVCSLREYFLKTEVGMHRDVVAVDKGLTPLSMAKENWRKPVVLSTDDRKKVWQSKELHGRFYRALHEPGVDFIASVSWLRFGDLFGETEGFVCAIMDEVILTNNYRRHIMKDGTVDVCRACHRPGESIRHIISGCSRLANGEYLHRHNQVARIIHQQLALKYKLVDSEVPYYKYVPDPVLENDHVTLYWDRSIITDRTIVANKPDIVVIDRLARRTMIVDVTIPHDGNLVKAEKEKKIKYLDLAHEVVDMWNVSSAVIVPIVVSANGLMAESLDQHLSRLSLGGWIKGLIQKAVLLDTARIVRRFLSLEP

SEQ ID NO: 28289 - protein, 1200 aa, Xestia c-nigrum
MITRAASRRRARPPTPDSSLSSASPPPDPGSPVPPVAAVASSSSDEYFSPPTSPTPVRRAGRGRPPRSLGLRGQQALSRVPAAGGCVQRMRWTQSMNENVMRAYYGSTEGGINLTAYRDRMLSLFQDLEPAVNVSAQRLSDQVRVIQRSHRLDDATLDRLRSEVLSNLIIITPTQTAVQVSVVNATLPRSNPVVVEEDDRVALVSSQCNDRLRSALEDALREYRSTPTELRPRLPRLPMHKKNRALVCALDSQLKNIFESSEDLVDTHSILFCGAVAACRVANVKFPNCDIATRPKPAVPAWQRRIERRIDGARVLIGKLYSFREGNTRPRVMRFVRRAFLGTEISPQEYMSRVTERIDFLKQKVYAWANRIRRYKRRVDRYSQNRMFQSDERWVYRTWEQPQQNMTDVCRPDDAATSSFWRNIWSVPVCHTEADWMRDVERVCEPIPEMEPVFITPLDIANAVRPLPNWKSPGPDGLHNFWLKWLSSSHTCLASQFQSSLESGSLPQFLTAGVTHLLHKSGSAAEPKNYRPITCLSTVYKLLTSILRTKINIHIDKNSIMSASQNGCRNGSRGTKELLLIDMAISQQVRRSRKDLSTCWIDYKKAYDSVPHSWLMRVLELYKIDATLRTFLESCMGQWRTVLRYPGCRQIQGNDESVWIKRGIFQGDSLSPLWFCLALNPLSTLLENSGLGYRLRKDGQVISHLLYMDDLKLFAPNKLQLMELLKVTETFSSAIRMEFGVDKCAVMYVKRGEIMRSEGLQLSDSIHLRSLSSSESYKYLGMSEALGINVTDMKQSLRERFFGRLKKVFNSLLSGGNKVRAFNGWVMPVLMYSFGILKWTQTELDALDRRVRTLLTENRMHHPRSSVMRLYIPRKCGGRGFLNAKTLHNREVCSLREYFLKADVGMHRDVVAVDKGLTPLSMAKENWRKPVVLTTDDRKKEWQGKELHGRFYRALHGPDVDFLASVSWLRFGDLFGETEGFVCAIMDEVMLTNNYRKYIMKDGTVDVCRACHLPGESIRHIISGCSRLASGEYLHRHNQVARIIHQQLALKFNLVELEVPYYKYVPDPVLVKDHVTLYWDQSIITDRTIVANKPDIVVIDRSARRVMIIDVTIPHDENLVKAEKEKQIKYLDLAHEVRDMWNMNSVIIVPIVVTANGLIAKSLDDHLAKLSLGGWIKNLIQKAVLLDTARIVRRFLSLQP

SEQ ID NO: 28290 - protein, 1199 aa, Xestia c-nigrum
MITRAASRRALIPSPDSSLSSASPPPDPGSPVSPVAAVASSSSDEYFSPPTSPTPVRRAGRGRPPKSLGLRGQQAPSRVPATGGCVQRMKWTQLMNENVMRAYYGSTEGGTNLTAYRVRMLSLFQDLEPTVNASAQRLSDQVRVIQRNHLLDGAALDRLRSEVLSNRIILTPAQTAVHASSIDANPPRSNPAVVEEDDRVATVSSQCNDRLRSALEDALHEYRSTSAELRPRLPRLPMHKKNRALVCALDSQLKNVFESSEDLVDTHSILFCGAVAACRLANVKFPNCDLASRPKPAVPAWQRRIERRIDGARVLIGKLHCFREGNTRPRVMRFVRRAFSGTEISPQEYMSRVTERIDFLKQKVYAWASRIRRYKRRVDRYSQNCMFQSDERWVYRAWERPQQNMTDVCRPDDAATSSFWRSIWSVPVCHSEADWMRDVERVCESIPTMEPILITPLDIARAVRPLPNWKSPGPDGLHNFWLKWFSSSHTCLASQFQSSLESGSLPQFLTTGITHLLHKSGSPAEPKNYRPITCLSTVYKLLTSILRTKINTHVDSNSIMSASQNGCRNGSRGTKELLLIDMAISQQVRRARKDLSTCWIDYKKAYDSVPHSWLKRVLELYKIDATLRAFLESCMGQWRTVLRYPGCRQIQGNDEPVWIKRGIFQGDSLSPLWFCLALNPVSTLLENSGLGYRLRKDGQVISHLLYMDDLKLFAPNKLQLMELLKVTETFSSAIGMEFGVDKCAVMYVKRGKIMGSEGLQLSDSIHLRSLSSSESYKYLGMSEALGINVTDMKQSLKERFFGRLKKVLNSLLSGGNKVRAFNGWVMPVLMYSFGILKWTQTELDALDRRVRTLLTENRMHHPRSSVMRLYIPRKCGGRGFLNAKTLHNREVCSLREYFLKADVGMHRDVVAVDKGLTPLSMAKENWRKPVVLTTDDRKKEWQGKELHGRFYRALHGPDVDFLASVSWLRFGDLFGETEGFVCAIMDEVMLTNNYRKYIMKDGTVDVCRACHCPGESIRHIISGCSRLANGEYLHRHNQVARIIHQQLALKFKLVESEVPYYKYVPDPVLVKDHVTLYWDQSIITDRTIVANKPDIVVIDRSARRVMIIDVTIPHDENLVKAEKEKQMKYLDLAHEVRDMWNMNSVIIVPIVVTANGLIAKSLDEHLSKLSLGGWIKGLIQKAVLLDTARIVRRFLSLQP

SEQ ID NO: 28291 - protein, 1200 aa, Xestia c-nigrum
MITRAASRRRARPPTPDSSLSSASPPPDPGSPVPPVAAVASSSSDEYFSPPTSPTPVRRAGRGRPPRSLGLRGQQAPSRVPATGGCVQRMRWTQSMNENVMRAYYGSTEGGINLTAYRDRMLSLFQDLEPAVNVSAQRLSDQVRVIQRSHRLDDTTLDRLRSEVLSNLITITPTQTAVHMSVVNATLPRSNPVVVEEDDRVALVSSQCNDRLRSALDNALREYRSISAELRPRLPRLPMHKKNRALVCALDSQLKNIFESSEDLVDTHSILFCGAVAACRLANVKFPNCDIAIRPKPAVPAWQRRIERRIDGARVLIGKLYCFREGNTRPRVMRFVRRAFSGTEISPQEYMSRVTERIDFLKQKVYAWASRIRRYKRRVDRYSQNRMFQSDERWVYRAWERPQQNMMDVCRPDDAATSSFWRSIWSVPVCHSEADWMRDVERVCEPIPTMEPILITPLDIARAVRPLPNWKSPGPDGLHNFWLKWFSSSHTCLASQFQSSLESGSLPQFLTTGVTHLLHKSGSPAEPKNYRPITCLSTVYKLLTSILRTKINTHVDSNSIMSASQNGCRNGSRGTKELLLIDMAISQQVRRARKDLSICWIDYKKAYDSVPHSWLKRVLELYKIDATLRAFLESCMGQWRTVLRYPGCRQIQGNDEPVWIKRGIFQGDSLSPLWFCLALNPVSTLLENSGLGYRLRKDGQVISHLLYMDDLKLFAPNKLQLMELLKVTETFSSAIGMEFGVDKCAVMYVKRGKIMGSEGLQLSDSIHLRSLSSSESYKYLGMSEALGINVTDMKQSLRERFFGRLKKVLNSLLSGGNKVRAFNGWVMPVLMYSFGILKWTQTELDALDRRVRTLLTENRMHHPRSSVMRLYIPRKCGGRGFLNAKTLHNREVCSLREYFLKADVGMHRDVAAVDKGLTPLSMANENWRKPVVLTTDDRMKEWQGKELHGRFYRALHGPDVDFLASVSWLRFGDLFGETEGFVCAIMDEVMLTNNYRKYIMKDGMVDVCRACHLPGESIRHIISGCSRLANGEYLHRHNQVARIIHQQLALKFNLVELEVPYYKYVPDPVLVKDHVTLYWDQSIITDRTIVANKPDIVVIDRSARRVMIIDVTIPHDENLVKAEKEKQIKYLDLAHEVRDMWNMDSVIIVPIVVSANGLIAKSLDEHLSKLSLGGWIKGLIQKAVLLDTARIVRRFLSLQP

SEQ ID NO: 28292 - protein, 1203 aa, Omphaloscelis lunosa
MLTRSAARSARLPPPDSPLSSASPPPVPSPIVNAVSTPAAVVASSSSDEYFSPPTSPTPVRRQGRGRPPKSLGLRGQPAPRRVPAAGGCVQRMRWTQSMNENVMRAYYGSTEGGTNLTAYRVRMLSLFQELEPTVNVSAQRLSDQVRVIQRNHRLDDTALDRLRSEVLSNHIVSAREQTAAEASNIDPTPPRFNHGVEEEDDRVATVSSQCNNRLRSALEDAFREYRYTPTELRPRLPRLPMHKKNRALMCALDSQLTNFFESSEDLIDTHSILYCAAVAACRLANVKFPNCDGATRPKPAVPAWQCRIERRIDGARVLIGKLYCFREGNTRPRVMRFVRRAFSGTEISPQDYMSRVTERIDFLKQKVCAWASRIRRYKRRVDRYTQNRMFQSDERWVYRAWERPEQNVTDVCRPDDAATSAFWRSIWSVPVCHTEAGWMQDVERVCETIPEMDAVFITPLDVARAVRPLPNWKSPGPDGLHNFWLKWLSSSHTCLASQFQSSLESGSLPQFLTSGVTHLLHKSGNPAEPKNYRPITCLSTVYKLLTSILRTKINTHIDSNSIMSVSQNGCRNGSRGTKELLLIDMAISQQVRRSRKDLSTCWIDYKKAYDSVPHTWLMRVLELYKVDTTLRTFLMSCMGQWRTVLRYPGCRRTQGNDEPVWIKRGIFQGDSLSPLWFCLALNPLSTLLEDSGLGYRLRRGGQVISHLLYMDDLKLFAPNKLRLMELLKVTETFSGAIRMEFGVDKCAVMHVKRGEIMESEGIQLSDSIHLRPLSSAENYRYLGMSESLGINVADMKQSLKERFFGRLKKVLISFLSGGNKVRAFNGWVMPVLMYSFGILKWTQTELDALDRRVRTLLTANRMHHPRSSVMRLYIPRKCGGRGFLNAKTLHNREVCSLREYFFKADVGMHRDVVAVDNGLTPLSMAKENWRKPVVLTTDDRKEIWQSKALHGRFYRALHEPSVDFLASVSWLRFGDLFGETEGFICAIMDEVILTNNYRRHIMKDGTVDVCRACHRPGESIRHIISGCSRLANGEYLHRHNQVARIIHQQLALKYKLVDSEVPYYKYVPDPVLENDHATLYWDRSIITDRTIVANKPDIVVIDRLARHAMIVDVTIPHDENLVKAEKEKQIKYLDLAHEVVGMWNVSSAIIVPIVVTANGLMAKSLDHHLSRLSLGGWIKRLIQKAVLLDTARIVRRFLSLQP

SEQ ID NO: 28293 - protein, 1203 aa, Omphaloscelis lunosa
MLTRSAARLARPPPPDSSLSSASPPPVPSPTVSATTTPAAVVASSSSDEYFSPPTSPTPVRRQGRGRPLKSLGLRGQPAPSRVPAAGGCVQRMRWTQSMNENVMRAYYGSTEGGTNLTAYRVRMLSLFQELEPTVNVSAQRLSDQVRVIQRNHRLDDTALDRLRSEVLSNHIVSTRAQTAAQASNIDATPPRFNHGVEEEDDRVATVSSQCNNRLRSALEDAFREYRYTPTELRPRLPRLPMHNKNRALVCALDSQLTNFFESSEDLIDTHSILYCAAVAACRLANVKFPNCDGATRPKPVVPAWQCRIERRIDGARVLIGKLYCFKEGNTRPRVMRFVRRAFSGTGISPQDYMSRVTERIDFLKQKVCAWASCIRRYKRRVDRYTQNCMFQSDERWVYRAWERPEQNVTDVCRPDDATTSAFWRSIWSVPVCHTEAGWMQDVERVCETIPVMDAVFITPLDVARAVRPLPNWKSPGPDGLHNFWLKWLSSSHTRLASQFQSSLESGSLPQFLTTGVTHLLHKSGNPAEPKNYRPITCLSTVYKLLTSILRTKINTHIDSNSIMSASQNGCRNGSRGTKELLLIDMAISQQVRRSRKDLSTCWIDYKKAYDSVPHTWLMRVLELYKVDTTLRTFLMSCMGQWRTVLRYPGCRQTQGNDEPVWIKRGIFQGDSLSPLWFCLALNPLNTLLEDSGLGYRLRRGGQVISHLLYMDDLKLFAPNKLRLMELLKVTETFSGAIRMEFGVDKCAVMHVKRGEIMESEGIQLSDSIHLRSLSSAENYRYLGMSESLGINVADMKQSLKERFFGRLKKVLISFLSGGNKVRAFNGWVMPVLMYSFGILKWTQTELDALDRRVRTLLTANRMHHPHSSVMRLYIPRKCGGRGFLNAKTLHNREVCSLREYFFKADVGMHRDVVAVDNGLTPLSMAKENWRKPVVLTTDDRKEVWQSKALHGRFFRALHEPGVDFLASVSWLRFGDLFGETEGFICAIMDEVILTNNYRRHIMKDGTVDVCRACHRPGESIRHIISGCSRLANGEYLHRHNQVARIIHQQLALKYKLVDSEVPYYKYVPDPVLENDHVTLYWDRSIITDRTIVANKPDIVVIDRLARHAMIVDVTIPHDENLVKAEKEKQIKYLDLAHEVVDMWNVSSAVIVPIVVTANGLMAKSLDQHLSRLSLDGWIKRLIQKAVLLDTARIVRRFLSLQP

SEQ ID NO: 28294 - protein, 1202 aa, Sesamia nonagrioides
MLTRQAARRARSPPPDSPPSTASPPPVPSANVSAVTTPAAVVASSSSDEYFSPPTSPRPVRRQGRGRPPKSLGLRGHPAPSRVPAAGGCVQRMRWTQTINENVMRAYYRATEGGTNLTAYRERMLSLFQALEPTVNVSAQRLSDQVRVIQRNHRLDDIALDRLRSEVLSNQITPTLTQTAAQASIIDAGPPRSNRVEEEDDRVETVSSQYNDRLRNALEDAFRDYRSTLTDLRPRLPRLPMHKKNRALVCALDSLLKNFFESSEDLIDTHSILYCAAVAACRLAKVKFPNCEEAARPKPAVPAWQRRIERRIDGTRVLIGKLYCFRDGNTRPRVMRFVRQAFSGTGISPREYINHLTERIDFLKQKVCAWASRIRRYKRRVDRYTQNRMFQSDERWVYRAWERPEQNEADVCRPDDATTSAFWRGIWSVSVCHTEGNWIRNVEQVCETIPEMDTILITPSDVAAAVRSLPNWKSPGPDGLHNFWLKWLSSSHTCLASQFQSSLESGSLPQFLTTGITHLLHKSGSTAEPKNYRPITCLPTVYKVLTSILKAKINKHLNSNSIMSVSQNGCKSGSRGSKELLLIDMAISQQVRRSRKDLSTCWIDYKKAYDSVPHTWLMRVLELYKINATLRTFLRSCMGQWKTALHYPGSRQIQGNDEPVWIKRGIFQGDSLSPVWFCLALNPLSTLLENSGLGYRLRRGGQVISHLLYMDDLKLFAPNELHLMKLLNVTETFSSGIRMEFGLDKCAVMHVKQGEIMESEGITLPDSIHLRSLSSFESYKYLGMSEALGINDADMKQSLKERFFGRLKKVLNSLLSGGNKVRAFNGWVMPVLMYSFGILKWTQTELDALDRRVRTLLTANRMHHPRSSVMRLYIPRKCGGRGFLNAKTLHNREVCSLREYFLQTVVGMHHDVVTVDKGLTPLSMAKENWHKPIILTTDDRRKVWQSKELHGRFYRALHEPDVDFLASVSWLRFSDLFGETEGFVCAIMDEVILTNNYRRYIMKDGTIDVCRACHHPGESIRHIISGCSRLANSEYLHRHNQVARIIHQQLALKYKLVDSEVPYYKYVPDPVLENDHVTLYWDRSIITDRTIVANKPDIVVIDRLARLAMIVDVTIPHDGNLVKAEKEKKMKYLDLAHEVVDMWNVNSAVIVPIVVSANGLIAKSLDQHLLRLALGSWIKGLIQKAVLLDTARIVRRFLSLEP

SEQ ID NO: 28295 - protein, 962 aa, Sesamia nonagrioides
MHKKNRALVCALDSLLKNFFESSEDLIDTHSILYCAAVAACRLAKVKFPNCEEAARPKPAVPAWQRRIERRIDGTRVLIGKLYCFRDGNTRPRVMRFVRQAFSGTGISPREYINHLTERIDFLKQKVCAWASRIRRYKRRVDRYTQNRMFQSDERWVYRAWERPEQNEADVCRPDDATTSAFWRGIWSVSVCHTEVNWIQNVEQVCETIPEMDTILITPSDVAAAVRSLPNWKSPGPDGLHNFWLKWLSSSHTCLASQFQSSLESGSLPQFLTTGITHLLHKSGSTAEPKNYRPITCLPTVYKVLTSILKAKINKHLNSNSIMSVSQNGCKNGSRGTKELLLIDMAISQQVRRSRKDLSTCWIDYKKAYDSVPHTWLMRVLELYKVNATLRTFLRSCMGQWKTVLRYPGSRRIQGNDEPVWIKRGIFQGDSLSPLWFCLALNPLSTLLEDSGLGYRLKRGGQVISHLLYMDDLKLFAPNKLHLMKLLNVTETFSSGIKMEFGVDKCAVMHVKRGQIMESEGITLPDSIHLRSLSSFESYKYLGMSEALGINDADMKQSLKERFFGRLKKVLKSLLSGGNKVRAFNGWVMPVLMYSFGILKWTQTELDALDRRVRTLLTANRMHHPRSSVMRLYIPRKCGGRGFLNAKTLHNREVCSLREHFFKTVVGMHHDVVTVDKGLTPLSMAKENWHKPIILTTDDRKMIWQSKELHGRFYRALHEPDVDFLASVSWLRFSDLFGETEGFVCAIMDEVILTNNYRRYIMKDGTIDVCRACHHPGESIRHIISGCSRLANSEYLHRHNQVARIIHQQLALKYKLVDSEVPYYKYVPDPVLENDHVTLYWDRSIITDRTIVANKPDIVVIDRLARLAMIVDVTIPHDGNLVKAEKEKQIKYLDLAHEIVDMWNVNSAVIVPIVVSANGLIAKSLDQHLLRLSLGSWIKGLIQKAVLLDTARIVRRFLSLEP

SEQ ID NO: 28296 - protein, 1202 aa, Sesamia nonagrioides
MLTRSATQKARPPPPDSLLSSASPPPVSSPIVNAVTTSAAAVASSSSDEYFSPPTSPTPVRRQGRGRPPKSLGLRGHPAPSRVPAVGGCVQRMRWSQTMNENVMRAYYGATEGGTNLTAYRERMLSLFQALEPTVNVSAQRLSDQVRVIQRNHRLDDTALDRLRSEVLSNQIVPTLTQTAALASIIDAVPPRSYRVEEEDDGVETVSNQYNDRLRSTLEDAFREYRSTPTDLRPRLPRLPMHKKNRALVSALDSQLKNVFESSEDLIDTHSILFCGAVAACRLANIKFPNCDEANRPRPAVPAWQHRIECRIDGARVLIGKLYCFREGNTRPRVMRFVRQAFSGTGISPREYISHVTERIDFLKQKVRAWASRIRRYKRRVDRYTQNRMFQSDERWVYRAWERTEQNEVDVCRPDDAATSAFWRSIWSVPVCHAEGDWIQDVEQVCEMIPEMDTILITPIDVATAVRSLPNWKSPGPDGLHNFWLKWLSSSHTCLASQFQSSLESGSLPQFLTTGITHLLHKSGSTAEPNNYRPITCLPTVYKVLTSILKAKINKHLDSNSIMSVSQNGCRSGSRGTKELLLIDMAISQQVRRSRKDLSTCWIDYKKAYDSVPHTWLMRVLELYKVNATLRTFLRSCMGQWKTVLRYPGSRRIQGNDEPVWIKRGIFQGDSLSPLWFCLALNPLSTLLEDSGLGYRLRRGGQVISHLLYMDDLKLFAPNKLHLMKLLNVTETFSSGIKMEFGVDKCAVMHVKRGQIMESEGITLSDSIHLRSLSSVESYKYLGMSEALGINDADMKQSLKERFFGRLKKVLKSLLSGGNKVRAFNGWVMPVLMYSFGILKWTQTELDALDRRVRTLLTANRMHHPRSSVMRLYIPRKCGGRGFLNAKTLHNREVCSLREHFLKTVVGMHHDVVTVDKGLTPLSMAKENWHKPIILTTDDRKMIWQSKELHGRFYRALHEPDVDFLASVSWLRFSDLFGETEGFVCAIMDEVILTNNYRRYIMRDGTIDVCRACHHPGESIRHIISGCSRLANGEYLHRHNQVARIIHQQLALKYKLVDSEVPYYKYVPDPVLENDHATLYWDRSIITDRTIVANKPDIVVIDRLARLAMIVDVTIPHDGNLVKAEKEKQIKYLDLAHEVVDMWNVNSAVIVPIVVSANGLIAKSLDQHLLRLSLGNWIKGLIQKAVLLDTARIVRRFLSLEP

SEQ ID NO: 28297 - protein, 1198 aa, Spodoptera frugiperda
MLTRRAAAILRTRPPSPTSSPSSAPPSSAPPPDAVVLPTVAGASSSSDEYFSPPTSPPPTRRRGRRRPPSGLGPRGPLASGGVPAPGGNVSRMKWTRSINENVMRAYFRATEGGRNLTAYRVRMLALFQELEPTINVSAQRLSDQVRVIQRNRMLDDIVLDRLQSEELRSRVIIPLQQNIEEPTQIEPVVAPNDDRTTEVSTHKCSEELRRALEDAIRGYRFISPSLRPRLPRLPMHKKNRALVCALDSELSNYFDNSEDLIDSHSILYCGAIAACRVANVKLLERENNSTRQKPAVPAWQCRIERRIDEARTLIAKLICFREGNTRPRVMRFVRRAFLGMDISPQDYVSHITERLDFLKQRIYAWANRIRRYKKRVERYTQNRTFQRDQRWVYRNWELKEQTRTDTCLPDADVTTSFWRSIWSAPVCHTEGGWIEKVRRKCELVPEMEQISITTEDVSNAAYPLANWKAPGPDGLHNFWLRWFTSSHSRLASQFQSALESGSLPQFFTTGLTHLLHKSGSTAEPKNYRPITCLPTIYKLLTSILREKLNKHIEDNNIMSTSQNGCRNRSRGTKELLLIDMSICQQVRRSHKNLSTCWIDYKKAYDSVPHTWLMRVLELYKVDTALRAFLMSCMRQWRTVLRYPGCRQICENDEPIRIERGIFQGDSLSPLWFCLALNPLSTLLEDSGLGYRLRRGGEIISHLLYMDDLKLFAPNNSHLMKLLNVTETFSNAIRMEFGVDKCAIMHVKRGEIVESDETRNSDTTNFRLLSSTETYKYLGMSEALGIDVAIMKQSLRERFFGRLKKVLNSLLSGGNKVRAYNGWVMPVLMYSFGILKWTQTELDALDRKVRSLLTEHRMHHPRSSVMRLYIPRKCGGRGFLNAKTLHNSEVCSLRKYFFKMEVGIHRDVVSVDKGLTPLSLANKDWREPIILSTKDRKNVWQSKELHGRYYRALHGPDTDFLASVSWLRFGNLFGETEGFVCAIMDEVMLTNNYRKYIIKDGTADICRACHRPGESIRHIISGCSHLANGEYLHRHNLVARIIHQQLALKYKLVESEVPYYKYLPDPVLENGDVTLYWDRTIITDRTIVANKPDIVVIDRPSRRTMIIDITIPHDENLVKAEKDKASKYLDLAHEVVDMWDVDSAIIVPIVVSANGLIAKSLDQHLSRLTLDGWIKSLMQKAVLLDTARIVRKFLSLEP

SEQ ID NO: 28298 - protein, 1199 aa, Noctua janthe
MITRAAYRRARLTTPDSSLRSASPPPDPGSPVSPAAAVASSSSDEYFSPPTSPTPVRRQGRGRPPKSLGLRGHPAPSRVPAAGGCVQRMRWTQTINENVMRAYYGSTEGGTNLTAYRVRMLSLFQVLEPIVNVSAQRLSDQVRVIQRNHMLDDAALDRLRSEVLSNRIVLTPAQTAVQASTIDATLPRSNPAVVEEDDRVAMVSSQCNDRLRSALEDALREYRSTPTKLRPRLPRLPMHNKNRALVCALDSQLKNIFESSENLVDTHSILYCGAVAACRLANVKFPNYDVAIRPKPAVPTWQRRIEYRIDEARVLIGKLHCFREGNTRPRVMRFVRRAFSGTGISPQEYMSRVTERIDFLKQKVYAWANRIRRYKRRVDRYSQNRIFQSDERWVYRAWERPEQNMTDVCRPDDAATSSFWRSIWSVPVCHTEADWMRDVERACEPIPEMEPILITSIDITRAVRPLPNWKSPGPDGLHNFWLKWLSSSHACLASQFQSSLESGSLPQFLTTGVTHLLHKSGSPAEPKNYRPITCLSTVYKLLTSILRVKINTHIDKNFIMSASQNGCRNRSRGTKELLLIDMAISQQVRRSRKDLSTCWIDYKKAYDSVPHTWLMRVLELYKIDATLRAFLESCMGQWRTVLRYPGCRQIQGNDEPVWIKRGIFQGDSLSPLWFCLALNPLSTLLEDSGLGYRLRRGGQVISHLLYMDDLKLFAPNKLRLMELLKVTETFSNAIRMEFGVDKCAVMYVKRGEIMESEGIQLSDSIHLRSLSSSESYKYLGMSESLGINVTDMKQSLRERFFGRLNKVLNSLLSGGNKVRAFNGWVMPVLMYSFGVLKWTQTELDALDRRVRTLLTANRMHHPRSSVMRLYIPRKCGGRGFLNAKTLHNREICSLREYFLKTEVGMHRDVVAVDKGLTPLSMAKENWRKPVVLTTDDRKEVWQGKELHGRFYRALHGPDVDFLASVSWLRFGDLFGETEGFVCAIMDEVMLTNNYRKYIMKDGTVDVCRACHRPGESIRHIISGCSRLANGEYLHRHNQVARIIHQQLALKYKLVESEVPYYKYVPDPVLEKDHVTLYWDRSIITDRTIVANKPDIVVIDRLARRVMIVDVTIPHDENLVKAEKEKQIKYLDLAHEVVDMWNVNSAIIVPIVVTANGLIAKSLDDHLSRLSLGGWIKGLIQKAVLLDTARIVRRFLSLEP

SEQ ID NO: 28299 - protein, 1199 aa, Noctua janthe
MITRAAYRRARLTTPDSSLSSASPPPDPGSPVSPAAAVASSSSDEYFSPPTSPTPVRRQGRGRPPKSLGLRGHPAPSRVPAAGGCVQRMRWTQTINENVMRAYYGSTEGGTNLTAYRVRMLSLFQVLEPIVNVSAQRLSDQVRVIQRNHMLDDAALDRLRSEVLSNRIVLTPAQTAVQASAIDATPPRSNPAVVEEDDRVAMVSSQCNDRLRSALEDALREYRSTPTKLRPRLPRLPMHNKNRALVCALDSQLKNIFESSENLVGTHSILYCGAVAACRLANVKFPNDDVAIRPKPAVPTWQRRIECSIDEARVLIGKLHCFREGNTRPRVMRFVRRAFSGTGISPQEYMSRVTERIDFLKQKVYAWANRIRRYKRRVDRYSQNRIFQSDERWVYRAWERPEQNMTDVCRPDDAATSSFWRSIWSVPVCHTEADWMRDVERACEPIPEMEPIIITPIDIARAVRPLPNWKSPGPDGLHNFWLKWLSSSHTCLASQFQSSLESGSLPQFLTTGVTYLLHKSGSPAEPKNYRPITCLSTVYKLLTSILRVKINTHIDKNFIMSASQNGCRNRSRGTKELLLIDMAISQQVRRSRKDLSTCWIDYKKAYDSVPHTWLMRVLELYKIDATLRAFLESCMGQWRTVLRYPGCRQIQGNDEPVWIKRGIFQGDSLSPLWFCLALNPLSTLLEDSGLGYRLRRGGQVISHLLYMDDLKLFAPNKLRLMELLKVTETFSNAIRMEFGVDKCAVMYVKRGEIMESEGIQLSDSIHLRSLSSSESYKYLGMSESLGINVTDMKQSLRERFFGRLNKVLNSLLSGGNKVRAFNGWVMPVLMYSFGVLKWTQTELDALDRRVRTLLTANWMHHPRSSVMRLYIPRKCGGRGFLNAKTLHNREICSLREYFFKTEVGMHRDVVAVDKGLTPLSMAKENWRKPVVFTTDDRKEVWQGKELHGRFYRALHGPDVDFLASVSWLRFCDLFGETEGFVCAIMDEVMLTNNYRKYIMKNGTVDVCRACHRPGESIRHIISGCSRLANGEYLHRHNQVARIIHQQLALKYKLVESEVPYYKYVPDPVLEKDHVTLYWDRSIITDRTIVANKPDIVVIDRLARRVMIVDVTIPHDENLVKAEKEKQIKYLDLAHEVVDMWNVNSAIIVPIVVTANGLIAKSLDDHLSRLSLGGWIKGLIQKAVLLDTARIVRRFLSLEP

SEQ ID NO: 28300 - protein, 1197 aa, Mythimna ferrago
MLTRSATRRARHPPTGSLLSSASPPPDPGSPVSPVAAVASSSSDEYFSPPTSPTPVRRPGRGRPPNGLGPRGQPASSRVPAAGGCVQRMKWTQSINENVMRAYYRATEGVINLTAYRVRMLSLFQELEPSVNVTTQRLSDQVRVIQPNHRLDDAALDRLRSEVLSNRIISTPIQTQTAAPRATDTIMPRPNYGDDEADDRVVTVSSQCNDQLRSALEDALREYRSTPIALRPRLPRLPMHKKNRALVCALDSLLENKFESSVNLVDTHSILYYGAIAACRLANVKLPSCDGATRPKPAVPAWQCRIERRIDGAKALIGKLYCFREGNTRPRVMRYVRRAFSGTGVSPREYLAHVTERIDFLKQKVCAWANRIRRYKRRVDRYSQNRMFQSDERWVYRDWERPEKSVTDVLRPDVAATNEFWHSIWSVPVCHTEGGWMRDIERVCEAIPEMEKVFISPIDVARAVHPLPNWKSPGPDGLQNFWLKWYSSSHALLASQFQSSLESGSLPQFLTTDVTHLLHKTGSTAEPKNYRPITCLSAVYKLLTSILRTKINNHIENNSIMSASQNGCRNGSRGTKELLLIDMAISQQVRRSRKDLSTCWIDYKKAYDSVPHTWLMRVLELYKIDATLRTFLESCMGEWNTVLRYPGCRSIRGDDEPIWIKRGIFQGDSLSPLWFCLALNPLSTLLEDSGLGYRLRRGGQVLSHLLYMDDLKLIAPNKLQLMELLKVTETFSSAIRMEFGVDKCAVMHVKRGEIMESEGIQLSDSIHLRSLSSTETYKYLGMSEALGINVTDMKQSLRERFFSRLKKVLNSLLSGGNKVRAFNGWVMPVLMYSFGILKWTQTELDALDRRVRTLLTANRMHHPRSSVMRLYIPRKCGGRDFLNAKTLHNREVCSLREYFQKTDVGMHRDVVAVDKGLTPLSMAKKNWRKPVVLTTDDRREVWKNKELHGRFYRALHEPDVDFGASIAWLRFSNLFGETEGFICAIMDEVILTNNYRRYIMKDGTVDVCRACHRPGESIRHIISSCSRLANGEYLHRHNQVARIIHQQLALKYKLMESEVPYYRYVPDPVLENDHVTLYWDRSIITDRTIIANKPDIVVIDRLARRAMIVDVTIPHDENLMKAEKEKKIKYLDLAHEVVDLGNVDSAVIVPIVVSVNGLIAKSFDDHLSKRGWIKGLIQKAVLLDTARIVRRSLSLEP

SEQ ID NO: 28301 - protein, 983 aa, Ochropleura plecta
MRFATIDPLLPNLDPDYHGYPCIKKNRALVCALDSQLKNLFESSEDLVDTHSILYCGAVAVCRLANVKFPSCDVATRPKPSVPAWQCRIERRIDEARVLIGKLYCFREGNTRPRVMRFVRRAFSGTGISPQEYMSRTTERIDFLKQKVYAWANRIRRYKRRVDRYSQNRMFRSDERWVYRAWERPEQSVTDVCRPDDVATSSFWHSIWSVPVCHTEADWMRDVERVCETIPEMEPILITSLDIASAVRPLPNWKSPGPDGLHNFWLKWLSSSHTRLASQFQSCLESGSLPQFLTTGVTHLLYKSGSPAEPKNYRPITCLSTVYKLLTSILRAKINSHIDNNSIMSASQNGCRNGSRGTKELLLIDMAISQQVRRSRKDLSTCWIDYKKAYDSVPHTWLKRVLELYKIDATLRAFLESCMGQWRTVLRYPGCRQIQGNDEPVWIKRGIFQGDSLSPLWFCLALNPLSTLLEDSGLGYRLRRGGQVISHLLYMDDLKLFAPNKLRLMEILKVTETFSNAIRMEFGVDKCAVMYVKRGEIMESEGIQLSDSIHLRSLSSSESYKYLGMSEALGINVADMKQLLRERFFGRLKKVLKSLLSGGNKVRAFNSWVMPVIMYSFGILKWTQTELDALDRRVRTLLTGNRMHHPRSSVMRLYIPRKCGGRGFLNAKTLHNREVCSLREYFLKTDVGMHRDVVAVDKGLTPLSMAKENWRKPVVLTTDDRKVVWQGKELHGRFYKALHGPDVDFLASVSWLRFGDLFGETEGFVCAIMDEVMLTNNYRKYIMKDGTVDVCRACHRPGESIRHIISGCSRLANSEYLHRHNQVARIIHQQLALKYNLVESEVPYYKYVPDPVLEKDHVTLYWDRSIITDRTIVANKPDIVVIDRSARRVMIIDVTIPHDENLVKAEKEKQLKYLDLAHEVVDMWNVNSAIIVPIVVTANGLIAKSLGEHLSKLSLGGWIKGLIQKAVLLDTARIVRRFLSLEP

SEQ ID NO: 28302 - protein, 962 aa, Ochropleura plecta
MHKKNRALVCALDSQLKNLFESSEDLVDTHSILYCGAVAVCRLANVKFPNCDVATRPKPSVPAWQCRIERRIDEARALIGKLYCFREGNTRPRVMRFVRRAFSGTGISPQEYMSRTTERIDFLKQKVYAWANRIQRYKRRVDRYSQNRMFRSDERWVYRAWERPEQSVTDVCRPDDVATSSFWHSIWSVRVCHTEAGWMRDVERVCETIPEMEPILITSLDIASAVRPLPNWKSPGPDGLHNFWLKWLSSSHTRLASQFQSCLESGSLPQFLTTGVTHLLYKSGSPAEPKNYRPITCLSTVYKLLTSILRAKINSHIVKNSIISASQNGCRNGSRGTKELLLIDMAISQQVRRSRKDLSTCWIDYKKAYDSVPHTWLKRVLELYKIDTTLRTFLESCMGQWRTVLRYPGCRQIQGNDEPVWIKRGIFQGDSLSPLWFCLALNPLSTLLEDSGLGYRLRRGGQVISHLFYMDDLKLFAPNKLRLMELLKVTETFSNAIRMEFGVDKCAVMYVKRGEIMESEGIHLSDSIHLRSLSSSESYKYLGMSEALGINVADMKQLLRERFFGRLKKVLKSLLSGGNKVRAFNSWVMPVLMYSFGILKWTQTELDALDRRVRTLLTANRMHHPRSSVMRLYIPRKCGGRGFLNAKTLHNREVCSLREYFLKTDVGMHRDVVAVDKGLTPLSMAKENWRKPVVLTTDYRKEVWQGKELHGRFYKALHGPDVDFLASVSWLRFGDLFGETEGFVCAIMDEVMLTNNYRKYIMKDGTVDVCRACHRPGESIRHIISGCSRLANGEYLHRHNQVARIIHQQLALKYNLVESEVPYYKYVPDPVLEKDHVTLYWDRSIITDRTIVANKPDIVVIDRSARRVMIIDVTIPHDENLVKAEKEKQLKYLDLAHEVVDMWNVNSAIIVPIVITANGLIAKSLDEHLSKLSLGGWIKGLIQKAVLLNTARIVRRFLSLEP

SEQ ID NO: 28303 - protein, 1111 aa, Ochropleura plecta
MRWTSSINANVMRAYYGSTEGGTNLTAYRVRMLSLFQDLEPTINVSAQRLSDQVRVIQRNHMLDDAALDRLRSEVLENRIILTTPQTAMQASVIDGMQPRSDPAVVEEDDRVATVSSQCNERLRSALEDALRDYRSTPAELRPRLPRLPMHKKNRALVCALDSQLKNLFESSEDLVDTHSILYCGAVAVCRLANVKFPSCDVATRPKPSVPAWQCRIERRIDEARVLIGKLYCFREGNTRPRVMRFVRRAFSGTGISPQEYMSRTTERIDFLKQKVYAWANRIRRYKRRVDRYSQNRMFRSDERWVYRAWERPEQSVTDVCRPDDVATSSFWHSIWSVPVCHTEADWMRDVERVCETIPEMEPILITSLDIASAVRPLPNWKSPGPDGLHNFWLKWLSSSHTRLASQFQSCLESGSLPQFLTTGVTHLLYKSGSPAEPKNYRPITCLSTVYKLLTSILRAKINSHIDNNSIMSASQNGCRNGSRGTKELLLIDMAISQQVRRSRKDLSTCWIDYKKAYDSVPHTWLKRVLELYKIDATLRAFLESCMGQWRTVLRYPGCRQIQGNDEPVWIKRGIFQGDSLSPLWFCLALNPLSTLLEDSGLGYRLRRGGQVISHLLYMDDLKLFAPNKLRLMEILKVTETFSNAIRMEFGVDKCAVMYVKRGEIMESEGIQLSDSIHLRSLSSSESYKYLGMSEALGINVADMKQLLRERFFGRLKKVLKSLLSGGNKVRAFNSWVMPVIMYSFGILKWTQTELDALDRRVRTLLTGNRMHHPRSSVMRLYIPRKCGGRGFLNAKTLHNREVCSLREYFLKTDVGMHRDVVAVDKGLTPLSMAKENWRKPVVLTTDDRKVVWQGKELHGRFYKALHGPDVDFLASVSWLRFGDLFGETEGFVCAIMDEVMLTNNYRKYIMKDGTVDVCRACHRPGESIRHIISGCSRLANSEYLHRHNQVARIIHQQLALKYNLVESEVPYYKYVPDPVLEKDHVTLYWDRSIITDRTIVANKPDIVVIDRSARRVMIIDVTIPHDENLVKAEKEKQLKYLDLAHEVVDMWNVNSAIIVPIVVTANGLIAKSLDEHLSKLSLGGWIKGLIQKAVLLDTARIVRRFLSLEP

SEQ ID NO: 28304 - protein, 1206 aa, Ochropleura plecta
MLTRRRAQEQKALPPSPGSPLSSASQPPGRATCVSAVSPVAAVASSSSDEFFSPPSSPPPPTRQRRGRGRPLAGLGSRSQQAPIRVPAAGGNVSRMRWTSSINANVMRAYYGSTEGGTNLTAYRVRMLSLFQDLEPTINVSAQRLSDQVRVIQRNHMLDDAALDRLRSEVLGNRIILTTPQTAMQASVIDGMQPRSDPAVVEEDDRVATVSSQCNERLRSALEDALRDYRSTPAELRPRLPRLPMHKKNRALVCALDSQLKNLFESSEDLVDTHSILYCGAVAVCRLANVKFPSCDVATRPKPSVPAWQCRIERRIDEARVLIGKLYCFREGNTRPRVMRFVRRAFSGTGISPQEYMSRTTERIDFLKQKVYAWANRIRRYKRRVDRYSQNRMFRSDERWVYRAWERPEQSVTDVCRPDDVATSSFWHSIWSVPVCHTEADWMRDVERVCETIPEMEPILITSLDIASAVRPLPNWKSPGPDGLHNFWLKWLSSSHTRLASQFQSCLESGSLPQFLTTGVTHLLYKSGSPAEPKNYRPITCLSTVYKLLTSILRAKINSHIDNNSIMSASQNGCRNGSRGTKELLLIDMAISQQVRRSRKDLSTCWIDYKKAYDSVPHTWLKRVLELYKIDATLRAFLESCMRQWRTVLRYPGCRQIQGNDEPVWIKRGIFQGDSLSPLWFCLALNPLSTLLEDSGLGYRLRRGGQVISHLLYMDDLKLFAPNKLRLMELLKVTETFSNAIRMEFGVDKCAVMYVKRGEIMESEGIQLSDSIHLRSLSSSESYKYLGMSEALGINVADMKQLLRERFFGRLKKVLKSLLSGGNKVRAFNSWVMPVIMYSFGILKWTQTELDALDRRVRTLLTGNRMHHPRSSVMRLYIPRKCGGRGFLNAKTLHNREVCSLREYFLKTDVGMHRDVVAVDKGLTPLSMAKENWRKPVVLTTDDRKVIWQGKELHGRFYKALHGPDVDFLASVSWLRFGDLFGETEGFVCAIMDEVMLTNNYRKYIMKDGTVDVCRACHRPGESIRHIISGCSRLANSEYLHRHNQVARIIHQQLALKYNLVESEVPYYKYVPDPVLEKDHVTLYWDRSIITDRTIVANKPDIVVINRSARRVMIIDVTIPHDENLVKAEKEKQLKYLDLAHEVVDMWNVNSAIIVPIVVTANGLIAKSLDEHLSKLSLGGWIKGLIQKAVLLDTARIVRRFLSLEP

SEQ ID NO: 28305 - protein, 1199 aa, Hecatera dysodea
MLTRAATLRARHPPPGSPLSSASPPPDIESQVSPAAAVASSSSDEYFSPPTSPPPVRRQGRGRPPRGLGPRGQPAPSRVPATGGCVQRMRWTQSMNENVMRAYYGSTEGGTNLTAYRLRMLSLFQDLEPTVNVSAQRLSDQVRVIQRSHRLDDAALDRLRSEVLNNLIIPTPTQTMEHVPSISSLTPRSINVCEEVDDRVVTVSSQCNDRLRSALEDALCEYRSTPTELRPRLPRLPMHKKNRALVCALDSLLKNIFESSENLIDTHSILYCGAVAACRIANVKFINTDGAIRPKSIAPAWQCRIERRIDEARVLIGKLYCFREGNTRPRVMRFVRRAFLGTQISPQEYMSRVTERIDFLKQKVCAWANRIRRYKRRVDRYSQNRMFQCDERWVYRAWERPEQSVTDVGRPDDVATNTFWRSIWSVPVCHAEGGWMRDVERVCEAIPQMENINITSLDVAKTVRPLPNWKSPGPDGLHNFWLKWYSSSHALLASQFQSSLESGSLPQFLTTGVTHLLHKTGSPAEPKNYRPITCLSTVYKLLTSILRVKINEHIETNSIMSSSQNGCRKGSRGTKELLLIDMAISQQVHRSRKDLSTCWIDYKKAYDSVPHTWLLKVLELYKIDTTLRTFLDSCMRQWKTVLRYPGCRPIQGGDEPVCIKRGIFQGDSLSPLWFCLALNPLSTLLEDSDLGYRLRRGGQAISHLLYMDDLKLFAPNKLRLMELLKVTETFSSDIRMEFGVDKCAVMHVKKGKIMESEGIQLSDSIQVRSLSSTETYKYLGMSEALGINVADMKQSLKERFFGRLKKVLSSLLSGGNKVRAFNGWVMPVLMYSFGILKWTQTELDALDRRVRTLLTANRMHHPRSSVMRLYIPRKCGGRGFLNAKTLHNREMCSLREYFLETDVGMHRDVVAVDKGLTPLSMANENWRKPVIHTTDDRKEVWKGKELHGRFYRALYESDVDFSASVAWLRFGDLFGETEGFVCAIMDEVILTNNYRRHIMKDGTVDVCRACHRPGESIRHIISGCSRLANGEYLHRHNQVARIIHQQLALKYKLVDSEVPYYKYVPNPVLENGHVTLYWDRSIITDRTIVANKPDIVVIDRLARRTMIIDVTIPHDENLVKAEKEKQIKYLDLAHEVVDMWNVDSAVIVPIVITANGLMAKSFDDHLSKLALHGWLKGLIQKAVLLDTARIVRRFLSLEP

SEQ ID NO: 28306 - protein, 1199 aa, Hecatera dysodea
MITRAASRRARPPSPDPSLSSASPPPDFEPRVSPAAAVASSSSDEYFSPPTSPTPVRRQGRGRPPRGLGPRGQPAPSRVPAAGGCVQRMKWTQSMNENVMRAYYGSTEGGTNLTAYRARMLSLFQDLEPTVDVSAQRLSDQVRVIQRNHRLDDAALDRLRSEVLDNPIISTLTQAAVQVPASGAITPRPINVCDEVDDRIVTVSSQCNNQLRSALEDALREYRSTPTELRPRVPRLPMHKRNRALVCALDSLLQNIFESSENLVDTHSILYCGAVAACRVANVKFTNNDGATRPKTAAPAWQCRIERRIDEARVLIGKLYCFREGNTRPRVMRFVRRAFSGTEISPQEYMSRVTERIDFLKQKVCAWANRIRRYKRRVDRYSQNRMFQSDERWVYRAWERPEQSVTDVCRPDDIATSTFWRSIWSVPVRHTEGDWMRGAERVCEAIPQMEKITITPTDVATAVRPLPNWKSPGPDGLHNFWLKWYSSSHAVLASQFQSSLESGSLPQFLTTGVTHLLHKTGSPAEPKNYRPITCLSTVYKLLTSILRVKINEHIESNSIMSSSQNGCRKGSRGTKELLLIDMAISQQVRRTRKDLSTCWIDYKKAYDSVPHTWLMKVLELYKIDATLRTFLESCMRQWKTVLCYPGCRPIQGNDEPVWIKRGIFQGDSLSPLWFCLALNPLSTLLEDSGLGYRLRRGGQAISHLLYMDDLKLFAHNKLRLMELLKVTETFSSAIRMEFGVDKCAVMHVKKGEIMESEGVQLSDSIQVRSLSSTETYKYLGMSEALGINVADMKQSLKERFFGRLKKVLNSLLSGGNKVRAFNGWVMPVLMYSFGILKWTQTELDALDRRVRTLLTANRMHHPRSSVMRLYIPRKCGGRGFLNAKTLHNREMCSLREYFLKVDVGMHRDVVAVDKGLTPLSMANENWRKPVIHTTDDRKEVWKGKELHGRFYRALYGSDVDFSASVAWLRFGDLFGETEGFVCAIMDEVILTNNYRRHIMKDGTVDVCRACHRPGESIRHIISGCSRLANGEYLHRHNQVARIIHQQLALKYKLVDSEVPYYKYVPDPVLENGHVTLYWDRSIITDRTIAANKPDIVVIDRLARRTMIIDVTIPHDENLVKAEKEKQIKYLDLAHEVVDMWNVESAVIVPIVVTANGLMAKSFDDHLSKLALHGWLKGLIQKAVLLDTARIVRRFLSLEP

SEQ ID NO: 28307 - protein, 1199 aa, Hecatera dysodea
MLTRAATLRARHPPPDSPLSSASPPPDIESQVSPAAAVASSSSDEYFSPPTSPPPVRRQGRGRPPRGLGPRGQPAPSRVPATGGCVQRMRWTQSMNENVMRAYYGSTEGGTNLTAYRLRMLSLFQDLEPTVNVSAQRLSDQVRVIQRSHRLDDAALERLRSEVLNNLIISTQTQTAVQAPVSGANTPQANNDSDEVDDRVVTVSSQYNNRLRSALEDALREYRSTPTELRPRLPRLPMHKKNRALVCALDSLLQNTFVSSENLVDTHSILYCGAVAACRLANVKFPSGDEAIRPKPAAPAWQCRIERRIDEARALIGKLYCFREGNTRPRVMRFVRRAFAGTGISPHEYTSRITERIDFLKQKVCAWANRIRRYKRRADRYSQNRMFQSDERWVYRTWERPEQSVTDECRPDDIATTTFWRSIWSVPVRHTEGDWMRDVERVCEAIPQMEKITITPTDIATAVRPLPNWKSPGPDGLHNFWLKWYSSSHAVLASQFQSSLESGSLPQFLTTGITHLLHKTGSPAEPKNYRPITCLSTVYKLLTSILRVKINEHIESNSIMSSSQNGCRKGSRGTKELLLIDMAISQQVRRSRKDLSTCWIDYKKAYDSVPHTWLMKVLELYKIDATLRTFLESCMRQWKTVLRYPGCRPIQGSDEPIWIKRGIFQGDSLSPLWFCLALNPLSTLLEDSGLGYRLRRGGQAISHLLYMDDLKLFAPNNLRLMELLKVTETFSSAIRMEFGVDKCAVMHVKKGEIMESEGIQLSDSIQVRSLSSTETYKYLGMSEALGINGADMKQSLKERFFGRLKKVLNSLLSGGNKVRAFNGWVMPVLMYSFGILKWTQTELDALDRRVRTLLTANRMHHPRSSVMRLYIPRKCGGRGFLNAKTLHNREMCSLREYFLETDVGMHRDVVAVDKGLTPLSMAKENWRKPVIHTTDDRKEVWKGKELHGRFYRALYGSDVDFSASVAWLRFGDLFGETEGFVCAIMDEVILTNNYRRHIMKDGTVDVCRACHRPGESIRHIISGCSRLANSEYLHRHNQVARIIHQQLALKYKLVNSEVPYYKYVPDPVLENDHVTLYWDRSIITDRTIVANKPDIVVIDRLARRTMIIDVSIPHDENLVKAEKEKQIKYLDLAHEVVDMWDVDSAVIVPIIVTANGLMAKSFDDHLSKLALRSWVKGLIQKAVLLDTARIVRRFLSLQP

SEQ ID NO: 28308 - protein, 1199 aa, Hecatera dysodea
MLTRAATLRARHPPPGSPLSSASPPPDIESQVSPAAAVASSSSDEYFSPPTSPPPVRRQGRGRPPRGLGPRGQPAPSRVPATGGCVQRMRWTQSMNENVMRAYYGSTEGGINLTAYRVRMLSLFQDLEPTVNVSAQRLSDQVRVIQRSHRLDEAALDRLRSEVLNNLIISTPTQTAVQAPGSGAIIPRPIHVCDEVVDSVVTVSSQCNDRLRSALEDALREYRSTPTELRPRLPRLPMHKKNRALVCALDLLLKNIFESSENLIDTHSILYCGAVAACRVANVKFTNSDGATRPKNAAPAWQCRIERRIDEARVLIGKLYCFREGNTRPRVMRFVRRAFVGTEISPQEYMSRVTERIDFLKQKVCAWANRIRRYKRRVDRYSQNRMFQSDERWVYRAWERPEQSVTDVCRPDDVTTNTFWRSIWSVPVCHAEAGWMRDVERVCEAIPQMEKITITTVDIATAVRPLPNWKSPGPDGLHNFWLKWYSSSHALLASQFQSSLDSGSLPQFLTTGVTHLLHKTGSPAEPKNYRPITCLSTVYKLLTSILRVKINEHIESNSIMSYSQNGCRKGSRGTKELLLIDMAISQQVRRSRKDLSTCWIDYKKAYDSVPHTWLLKVLELYKVDATLRTFLESCMRQWKTVLRYPGCRPIQGSEEPVWIKRGIFQGDSLSPLWFCLALNPLSTLLEDSGLGYRLRRGGQTISHLLYMDDLKLFAPNNLRLMELLKVTETFSSAIRMEFGVDKCAVMHVKKGEIMESEGIQLSDSIQVRSLSSTETYKYLGMSEALGINGADMKQSLKERFFGRLKKVLNSLLSGGNKVRAFNGWVMPVLMYSFGILKWTQTELDALDRRVRTLLTANRMHHPRSSVMRLYIPRKCGGRGFLNAKTLHNREMCSLREYFLKADVGMHRDLVAVDKGLTPLSMAKENWRKPVIPTTDDRREVWRGKELHGRFYRALYGSDVDFSASVAWLHFGDLFGETEGFVCAIMDEVILTNNYRRHIMKDGTVDVCRACHRPGESIRHIISGCSRLANGEYLHRHNQVARIIHQQLALKYKLVDSEVPYYKYVPDPVLENDHVTLYWDRSIITDRTIIANKPDIVVIDRLARRTMIIDITIPHDENLVKAEKEKQIKYLDLAHEVVDMWNVDSAVIVPIVVTANGLMAKSFDEHLSKLALHGWLKGLIQKAVLLDTARIVRRFLSLEP

SEQ ID NO: 28309 - protein, 1199 aa, Phlogophora meticulosa
MLTRAAKRRARPPSPDSPLSSASPPPDLGSPVTPTVAAASSSSDEYFSPPTSPTPVRRQGRGRPPKSLGSRGQPAPSQVPATGGCVQRMRWTQSMNENVMRAYYGSTEGGTNLTAYRARMLSLFQVLEPTVNVSAQRLSDQVRVIQRNHRLDDTALDRLRSEVLNNHIVLTSTQTAVQASIINATPSPSNHVSEEADDRVVTVSSQCNEKLRSALEDALREYRSTPTELRPRLPRLPMHKKNRALVCNLDSLLKDLFESSGDLVDTHSILYCAAVAACRLANVKFPNNDVAIRPKPAVPAWQSRIERRIDGARVLIGKLYCFREGNTRPRVMRFVRRAFAGTGISPREYMSRIVERIDFLKQKVYVWANRIRRYKRRVDRYSQNRMFQSDERWVYRAWERPEQDVADVHRPDDTTTNTFWRNIWSVPVCHTEAHWIRDVERVCETITEMEKIIITPLDVATAVRPLPNWKAPGPDGLHNFWLKWLGSSHTRLASQFQSCLESGSLPQFLTTGITHLLYKSGSTTEPKNYRPITCLSTVYKLLTSILRAKIAEHIVGNSIMSASQNGCRNGSRGTKELLLIDMAISQQVRRSHKDLSTCWIDYKKANDSVPHAWLMRVLELYKIDATLRTFLESCMGQWRTVLRYPGCRQIHGNDEPIWIKRGIFQGDSLSPLWFCLALNPLSTLLEDSGVGYRLRRGGQVISHLLYMDDLKLFASNNLQLMELLKITESFSSTIRMEFGVDKCAVMHVKRGEIVESEGIQLPDSIQLRSLSSSDNYKYLGMSEALGINVTDMKQSLKERFFGRLKKVLNSLLSGGNKVRAFNGWVMPVLMYSFGILKWTQTELDALDRRVRTLLTANRMHHPRSSVMRLYIPRKCGGRGFLNAKTLYNREVCNLRDYFLKTEVGMHRDVVAVDKGLTPLSMAKENWRKPVVLTTDDRKQVWQSKELHGRLYRALHGPDVDFIASVSWLRFGDLFGETEGFVCAIMDEVILTNNYRKHIMKDGTVDMCRACHRPGESIRHIISGCSRLANGEYLHRHNQVARIIHQQLALRYKLVESEVPYYKYVPDPVLEDDHVTLYWDRSIITDRTIVANKPDIVVIDRLARRAMIVDVTIPHDENLVKAEKEKQIKYLDLAHEVVDMWSVDSAVIVPIVVTANGLLAKSLDDHLSRLSLHGWIKGLIQKAVLLDTARIVRRFLSLQP

SEQ ID NO: 28310 - protein, 1199 aa, Phlogophora meticulosa
MLTRAAKRRARPPSPDSPLSSASPPPDLGSPVTPTVAAASSSSDEYFSPPTSPTPVRRQGRGRPPKSLGSRGQPAPSQVPATGGCVQRMRWTQSMNENVMRAYYGSTEGGTNLTAYRARMLSLFQVLEPTVNVSAQRLSDQVRVIQRNHRLDDTALDRLRSEVLNNHIVLTSTQTAVQASIINATPSPSNHVSEEADDRVVTVSSQCNEKLRSALEDALREYRSTPTELRPRLPRLPMHKKNRALVCNLDSLLKDLFESSGDLVDTHSILYCAAVAACRLANVKFPNNDVAIRTKPAVPAWQSRIERRIDGARVLIGKLYCFREGNTRPRVMRFVRRAFAGTGISPREYMSRIVERIDFLKQKVYAWANRIRRYKRRVDRYSQNRMFQSDERWVYRAWERPEQDVADVHRPDDTTTNTFWRNIWSVPVCHTEAHWIRDVERVCETITEMEKIIITPLDVATAVRPLPNWKAPGPDGLHNFWLKWLGSSHTRLASQFQSCLESGSLPQFLTTGITHLLYKSGSTTEPKNYRPITCLSTVYKLLTSILRAKIAEHIVGNSIMSASQNGCRNGSRGTKELLLIDMAISQQVRRSHKDLSTCWIDYKKAYDSVPHAWLMRVLELYKIDATLRTFLESCMGQWRTVLRYPGCRQIQGNDEPIWIKRGIFQGDSLSPLWFCLALNPLSTLLEDSGLGYRLRRGGQVISHLLYMDDLKLFASNNLQLMELLKITESFSSTIRMEFGVDKCAVMHVKRGEIVESEGIQLPDSIQLRSLSSSDNYKYLGMSEALGINVTDMKQSLKERFFGRLKKVLNSLLSGGNKVRAFNGWVMPVLMYSFGILKWTQTELDALDRRVRTLLTANRMHHPRSSVMRLYIPRKCGGRGFLNAKTLYNREVCNLRDYFLKTEVGMHRDVVAVDKGLTPLSMAKENWRKPVVLTTDDRKQVWQSKELHGRFYRALHGPDVDFIASVSWLRFGDLFGETEGFVCAIMDEVILTNNYRKHIMKDGTVDMCRACHRPGESIRHIISGCSRLANGEYLHRHNQVARIIHQQLALRYKLVESEVPYYKYVPDPVLEDDHVTLYWDRSIITDRTIVANKPDIVVIDRLARRAMIVDVTIPHDENLVKAEKEKQIKYLDLAHEVVDMWNVDSAVIVPIVVTANGLLAKSLDDHLSRLSLHGWIKGLIQKAVLLDTARIVRRFLSLQP

SEQ ID NO: 28311 - protein, 1199 aa, Xestia xanthographa
MITRAAARRARLPTPDSLLSSASPPPDHGSPVSPVAAVASSSSDEYFSPPTSPPPVRRAGRGRPLKGLGLRGQQAPSRVPATGGCVQRMKWTQSMNENVMRAYYGSTEGGTNLIAYRVRMLSLFQDLEPTVNVSAQRLSDQVRVIQRNHRLDDAALDRLRSEVLSNLIILTPTQTAVQVSDINVTLPRSIPAVVEEDDRVATVSSQCNDRLRNALEDALREYRFTPTELRPRLPRLPMHKKNRALVCALDSQLKNIFESSENLVDTHSILFCGAVAACRLANVKFPNCDVATRPKPAVPAWQRRIERRIDGARVLIGKLYCFREGNTRPRVMRFVRRAFSGTETSPQEYMSRATERIDFLKQKVYAWANRIRRYKRRVDRYSQNRMFQSDERWVYRAWERPEQNMTDVCRPDDAATGSFWRSIWSVPVCHTEADWMRDVERVCEPIPEMEPIFITPLDLARAVRPLPNWKSPGPDGLHNFWLKWFSSSHTCLASQFQSSLESGSLPQFLTTGVTHLLHNSGSPAEPKNYRPITCLSTIYKLLTSILRMKINTHIDKNSIMSASQNGCRNGSRGTKELLLIDMAISQQVRRSRKDLSTCWIDYKKAYDSVPHTWLMRVLELYKVDTTLRTFLESCMGQWKTVLRYPGCRQIQGSDEPVWIKRGIFQGDSLSPLWFCLALNPLSTLLENSGLGYRLRKDGQVISHLLYMDDLKLFAPNKLRLMELLKVTETFSSAIRMEFGVDKCAVMYVKRGEIMESEGLQLSDSIHLKSLSSSETYKYLGMSEALGINVTDMKQSLSERFFGRLRKVLNSLLSGGNKVRAFNGWVMPVLMYSFGILKWTQTELDALDRRVRTLLTESRMHHPRSSVMRLYIPRKCGGRGFLNAKTLHNREVCSLREYFLKAEVGMHRDVVAVDKGLTPLSMAKENWHRPEVLTTDDRKEVWQGKELHGRFYRALHGPDVDFLASVSWLRFGDLFGETEGFVCAIMDEVMLTNNYRKYIMKDGTVDVCRACHLPGESIRHIISGCSRLANGEYLHRHNQVARIIHQQLALKYKLVESEVPYYKYVPDPVLEDDHVTLYWDRSIITDRTIVANKPDIVMMDRSARRVMIIDVTIPHDENLVKAEKEKQTKYLDLAHEVRGMWNMNSVIIVPIVVTANGLIAKSFDDHLSKLSLGGWIKGLIQKAVLLDTARIVRRFLSLQP

SEQ ID NO: 28312 - protein, 1201 aa, Xestia xanthographa
MMLTRAAAARRARLPTPDSSLSSASPPPDPGSPVSPVAAVASSSSDEYFSPPTSPPPVRRAGRGRPPKGLGLRGQQAPSRVPATGGCVQRMKWTQAMNENVMRAYYGSTEGGTNLTAYRARMLSLFQDLEPTVNVSAQRLSDQVRVIQRNHRLDDAALDRLRSEELSNLIILTPTQTAVQVSAINITLPRSNPAVVEEDDRVATVSSQCNDRLRSALEDALREYRSTPTELRPRLPRLPMHKKNRALVCALDSQLKNIFKSSEDLVDTHSILFCGAVAACRLANVKFPNCDVATRPKPAVPAWQRRIERRIDEARVLIGKLYCFREGNTRPRVMRFVRRAFSGTEISPQEYMSRVTERIDFLKQKVYAWANRIRRYKRRVDRYSQNRMFQSDERWVYRAWERSEQNMTNVCRPDDVATSSFWRSIWSVPVWHTEADWMRDVERVCEPIPEMEPIFITPLDVARAVRPLPNWKSPGPDGLHNFWLKWFSSSHTCLASQFQSSLESGSLPQFLTTGVTHLLHKSGSPAEPKNYRPITCLSTIYKLLTSILRVKINTHIDKNSIMSASQNGCRNGSRGTKELLLIDMAISQQVRRSRKDLSTCWIDYKKAYDSVPHTWLMRVLELYKIDTTLRTFLESCMGQWRTVLRYPGCRQIQGSDEPVWIKRGIFQGDSLSPLWFCLALNPLSTLLENSGLGCRLRKDGQVISHLLYMDDLKLFAPNKLRLMELLKVTETFSSAIRMEFGVDKCAVMYVKRGEIMESEGLQLSDPIHLRSLSSSETYKYLGMSEALGINITDMKQSLKERFFGRLRKVLNSLLSGGNKVRAFNGWAMPVLMYSFGILKWTQTELDALDRRVRTLLTESRMHHPRSSVMRLYIPRKCGGRGFLNAKTLHNREVCSLREYFLKAEVGMHRDVVAVDKGLTPLSMAKENWHKPEVLTTDDRKEVWQGKELHGRFYRALHGPDVDFLASVSWLRFGDLFGETEGFVCAIMDEVMLTNNYRKYIMKDGTVDVCRACHLPGESIRHIISGCSRLANGEYLHRHNQVARIIHQQLALKYKLVESEVPYYKYVPDPVLEKDHVTLYWDRSIITDRTIVANKPDIVMIDRSARRVMIIDVTIPHDENLVKAEKEKQIKYLDLAHEVRDMWNMNSVIIVPIVVTANGLIAKSFDDHLSKLSLGGWIKGLIQKAVLLDTARIVRRFLSLQP

SEQ ID NO: 28313 - protein, 1202 aa, Cosmia trapezina
MLTRSAARARPPPPDSSLSSASPPPVSSPIVGAVITPAAAVASNSSDEYFSPPTSPTPVRRQGRGRPPRSLGLRGQPAPSRVPAAGGCVQRMRWTQSMNENVMRAYYGSTEGGTNLTAYRVRMLSLFQELEPTVNVSAQRISDQVRVIQRNHRLDDAALDRLRSEVLSNHIISNPTQTAVQPSIIDALPPRSNHVVKEEDDRVATVSSQCNDRLRDALEDAFCEYRSTPTELRPRLPRLPMHKKNRALMCALDSLLKDFFESSENLVDTHSILYCAAVAACRLANVKFPNCDGATRPKPAVPAWQCRIERRIDGARVLIGKLYCFRQGNTRPRVMRFVRRAFSGTGISPPEYMSRVTERIDFLKQKVCAWASRIRRYKRRVDRYTQNRMFQSDERWVYRAWERPEQNMTDVCRPDDAATSAFWRSIWSVPVCHAEAGWMKDVERVCEAIPEMEPVLITPLDVARAVRPLPNWKSPGPDGLHNFWLKWLISSHTRLASQFQSSLESGLLPQFLTTGVTHLLHKSGSPAEPKNYRPITCLSTIYKLLTSILRAKINMHIDSNSIMSTSQNGCRNGSRGTKELLLIDMAINQQVRRSRKDLSTCWIDYKKAYDSVSHAWLMRVLELYKIDATLRTFLESCMGQWRTVLRYPGCRRIRGNDEPVRIKRGIFQGDSLSPLWFCLALNPLSTLLEDSGLGYRLRRGGQVISHLLYMDDLKLFAPNKLRLMELLKVTESFSSAIRMEFGVDKCAVMHVKRGEIMESEGIQLSDSIHLRSLSSSETYKYLGMSEALGINVADMKQSLRERFFGRLKKVLISLLSGGNKVRAFNGWVMPVLMYSFGILKWTQTELDALDRRVRTLLTANRMHHPRSSVMRLYIPRKCGGRGFLNAKTLHNREVCSLREYFLKSDVGMHRDVVAVDKGLTPLSMAKENWRKPVVLTTDDRKKVWQSKELHGRFYRALHEPSVDFLASVSWLRFGDLFGETEGFVCAIMDEVILTNNYRRYIMKDGTVDVCRACHRPGESIRHIISGCSRLANGEYLHRHNQVARIIHQQLALKYKLVDSEVPYYKYVPDPVLENDHVTLYWDRSIITDRTIVANKPDIVVIDRLARRAMIVDVTIPHDGNLVKAEKEKQIKYLDLAHEVVDMWNVDSAVIVPIVVTANGLIADSLDQHLSRLSLGGWIKGQIQKAVLLDTARIVRRFLSLQP

SEQ ID NO: 28314 - protein, 1202 aa, Cosmia trapezina
MLTRSAARARPPPPDSSLSSASPPPVPSPTVGAVMTPAAAVASSSSDEYFSPPTSPTPVRRQGRGRPPRSLGLRGQPAPSRVPAAGGCVQRMRWTQSMNENVMRAYYGSTEGGTNLTAYRVRMLSLFQELEPTVNVSAQRISDQVRVIQRNHRLDDAALDRLRSEVLSNHIISNPTQTAVQPSIIDALPPRSNHVVEEEDDMVATVSSQCNDRLRSALEDAFREYRSTPTELRPRLPRLPMHKKNRALMCALDSLLKDFFESSENLVDTHSILYCAAVAACRLANVKFPNCDGATRPKPAVPAWQCRIERRIDGARVLIGKLYCFRQGNTRPRVMRFVKRAFLGTGISPPEYMSRVTERIDFLKQKVCAWASRIRRYKRRVDRYAQNRMFQSDERWVYRAWERPEQNVTDLCRPDDAATSTFWRSIWSVPVCHVEAGWMRDVERVCEAIPEMEPVLITPLDVARAVRPLPNWKSPGPDGLHNFWLKWLISSHTRLASQFQSSLESGSLPQFLTTGVTHLLHKSGSPAEPKNYRPITCLSTIYKLLTSILRAKINMHIDSNSIMSTSQNGCRNGSRGTKELLLIDMAISQQVRRSRKDLSTCWIDYKKAYDSVSHAWLMRVLELYKIDATLRTFLESCMGQWRTVLRYPGCRRIQGNDEPVRIKRGIFQGDSLSPLWFCLALNPLSTLLEDSGLGYRLRRGGQVISHLLYMDDLKLFAPNKLRLMELLKVTETFSSAIRMEFGVDKCAVMHVKRGEIMESEGIQLSDSIHLRSLSSSETYKYLGMSEALGINVADMKQSLRERFFGRLKKVLISLLSGGNKVRAFNGWVMPVLMYSFGILKWTQTELDALDRRVRTMLTANRMHHPRSSVMRLYIPRKCGGRGFLNAKTLHNREVCSLREYFLKSDVGMHRDVVAVDKGLTPLSMAKENWRKPVVLTTDDRKNVWQSKELHGRFYRALHEPGVDFLASVSWLRFGDLFGETEGFVCAIMDEVILTNNYRRYIMKDGTVDVCRACHRPGESIRHIISGCSRLANGEYLHRHNQVARIIHQQLALKYKLVDSEVPYYKYVPDPVLENDHVTLYWDRSIITDRTIVANKPDIVVIDRLARRAMIVDVTIPHDGNLVKAEKEKQIKYLDLAHEVVDMWNVNSAVIVPIVVTANGLMADSLDQHLSRLSLGGWIKGQIQKAVLLDTARIVRRFLSLQP

SEQ ID NO: 28315 - protein, 1198 aa, Mamestra brassicae
MITRAAARRAHPPPPGSSLSSASPTPDIGSQVSPVVAVASSSSDEYFSPPTSPTPVRRQGRGRPPRSLGSRGQPALSRVPAAGGCVQRMRWTQSMNENVMRAYYGSTEGGTNLTAYRVRMLSLFQDLEPTVNVSAQRLSDQVRVIQHNCRLDDAALERLRSEVLSNLIISTPTQTVVQAPASGAITPRLNNGSDEVDDRVVTVSSQCNDRLRSALEDALREYRLTPTELRPRLPRLPMHKKNRALVCALDSLLQNIFESSESLVDTHSILFCGAVAACRIANVKFPSCDEAIRPKPAAPAWQCRIERRIDEARALIGKLYCFREGNTRPRVMRFVRRAFSGTGISPREYTFRVTERIDFLKQKVCAWANRIRRYKRRVDRYSQNRMFQSDERWVYRAWERPEQSVTDVYRPDDVATSTFWRSIWSVPICHAEGGWMRDVERVCEAIPQMEKITITTLDIAKAVRPLPNWKSPGPDGLHNFWLKWYSSSHALLASQFQSSLESGSLPQFLTTGITHLLHKTGSPAEPKNYRPITCLSTVYKLLTSILRAKINEHIESNSIMSASQNGCRKGSRGTKELLLIDMAISQQVRRSRKDLSTCWIDYKKAYDSVPHTWLMKVLELYKIDATLRTFLESCMRQWKTVLRYPGCQPIQGSDEPVWIKRGIFQGDSLSPLWFCLALNPLSTLLEDSGLGYRLRRGGQAISHLLYMDDLKLFAPNNLRLMELLKVTETFSSAIRMEFGVDKCAVMHVKKGEIMESEGIQLSDSIQVRSLSSTESYKYLGMSEALGINGTDMKQSLRERFFGRLKKVLNSLLSGGNKVRAFNGWVMPVLMYTFGILKWTQTELDALDRRVRTLLTANRMHHPRSSVMRLYIPRKCGGRGFLNAKTLHNREMCSLREYFLKADVGMHRDLVAVDKGLTPLSMAKENWRKPVILTTDDRKEVWKGKELHGRFYRALYGSDVDFSASVAWLRFGDLFGETEGFVCAIMDEVILTNNYRKHIMKDGTVDVCRACHRPGESIRHIISGCSRLANGEYLHRHNQVARIIHQQLALKYKLVDSEVPYYKYVPDPVLENDHVTLYWDRSIITDRTIVANKPDIVVIDRLARRTMIIDVTIPHDENLVKAEKEKQIKYLDLAHEVVDMWNVDSAVIVPIVITANGLMAKSFDDHLSKLALRGWIKGLIQKAVLLDTARIVRFLSLEP

SEQ ID NO: 28316 - protein, 1111 aa, Mamestra brassicae
MRWTQSMNENVMRAYYGSTEGGTNLTAYRVRMLSLFQDLEPTVNVSAQRLSDQVRVIQRNHRLDDAALDRLRSEVLNNLIISTPTQTAVKAPVNGRITPRPNNVSDEVDDRVVTVSSQCNDRLRSALEDALREYRSTPTELRPRLPRLPMHKKNRALVCALDSLLQNIFESSESLVDTHSILYCGAVAACRIANVKFPGCDETIRPKPAAPAWQRRIERRIDETRALIGKLYCSREGNTRPRVMRFVRRAFSGTEISPRDFTSRVTERIDFLKQKVCAWASRIRRYKRRVDRYSQNRMFQSDERWVYRAWERPEQSVTDVCRPDDVATSIFWRSIWSVPICHAEGGWMRDVERVCEAIPQMEKITITTLDVAKAVRPLPNWKSPGPDGLHNFWLKWYSSSHALLASQFQSSLDSGSLPQFLTTGVTHLLHKTGSPTEPKNYRPITCLSTVYKLLTSILRAKINEHIESNSIMSASQNGCRKGSRGTKELLLIDMAISQQVRRSRKDLSTCWIDYKKAYDSVPHTWLMKVLELYKIDATLRTFLESCMRQWKTVLRYPGCRPIQGSDEPVWIKRGIFQGDSLSPLWFCLALNPLSTLLEDSGLGYRLRRGGQAISHLLYMDDLKLFAPNNLRLMELLKVTETFSSAIRMEFGVDKCAVMHVKKGEIMESEGIHLSDSIQVRSLSSTETYKYLGMLEALGINGTDMKQSLRERFFGRLKKVLNSLLSGGNKVRAFNGWVMPVLMYTFGILKWTQTELDALDRRVRTLLTANRMHHPPSSVMRLYIPRKCGGRGFLNAKTLHNREMCSLREYFLKADVGMHRDVVAVDRGLTPLSMAKENWRTPVILTTDDRKEVWKGKELHGRFYRALHGSDVDFSASVAWLRFGDLFGETEGFVCAIMDEVILTNNYRRHIMKDGTVDMCRACHRPGESIRHIISGCSRLANGEYLHRHNQVARIIHQQLALKYNLVDSEVPYYKYVPDPVLENDHVTLYWDRSIITDRTIVANKPDIVVIDRLARRTMIIDVTIPQDENLVKAEKEKQIKYLDLAHEVVDMWNVESAVIVPIVVTANGLMAKSFDDHLSKLALRSWVKGLIQKAVLLDTARIVRRFLSLEP

SEQ ID NO: 28317 - protein, 1206 aa, Noctua fimbriata
MITRSRAKQLQEAHTPSPGSSLSSASQPPRRATSVSTVSPVAAVASSSSDEFFSPPSTPPPSPRRRGRGRPPAGLGPRGQPAPNRVPAAGGNVSRMRWTQSINEQVMRAYYGATEGGTNLTAYRVGMLSLFQVLEPTVNVSAQRLSDQVRVIQRNHMLDDAVLDRLRSEVLSNRIVLTPAQTAVQASVIDATPPRFNPAVVEEDDRVAVVSSQCNDRLRSALEDALREYRSTPTELRPRLPRLPMHNKNRALVCALDSQLENIFESSENLVDTHSILYCGAVAACRLANVKFPNCDVATRPKPAVPAWQRRIERRIDGARVLIGKLHCFREGNTRPRVMRFVRRAFSGTGISPQEYMSRVTERIDFLKQKVYAWANRIRRYKRRVDRYSQNRMFQSDERWVYRAWERPELNMTDVCRPDDAATSSFWRSIWSVPVCHTEADWMRDVERVCEPIPEMEPILITPLDIARAVRPLPNWKSPGPDGLHNFWLKWLSSSHTCLASQFQSSLESGSLPQFLTTGVTHLLHKSGSPAEPKNYRPITCLSTVYKLLTSILRAKINTHIDKNYIMSASQNGCRNGSRGTKELLLIDMAISQQVRRSRKDLSTCWIDYKKAYDSVPHTWLMRVLELYKIDATLRAFLESCMGQWRTVLPYPGCRQIQGNDEPVWIKRGIFQGDSLSPLWFCLALNPLSTLLEDSGLGYRLRRGGQVISHLLYMDDLKLFAPNKLRLMELLKVTETFSSAIRMEFGVDKCAVMYVKQGEIMESEGIQLSDSIHLRTLSSTESYKYLGMSEALGINVTDMKQSLKERFFGRLNKVLHSLLSGGNKVRAFNGWVMPVLMYSFGVLKWTQTELDALDRRVRTLLTANRMHHPRSSVMRLYIPRKCGGRGFLNAKSLHNREMCSLREYFLKVEVGMHRDVVAVDKGLTPLSMAKENWRKPEVLTTDDRKEVWQGKELHGRFYRALHGPDVDFLASVSWLRFGDLFGETEGFVCAIMDEVMLTNNYRKYIMKDGTVDVCRACHRPGESIRHIISGCSRLANGEYLHRHNQVARIIHQQLALKYKLVESEVPYYKYVPDPVLEKDHVTLYWDQSIITDRTIVANKPDIVVIDRSARRVMIVDVTIPHDENLVKAEKEKQIKYLDLAHEVVDMWNVNSAIIVPIVVTANGLIAKSLDDHLSKLSLGGWIKGLIQKAVLLDTARIVRRFLSLEP

SEQ ID NO: 28318 - protein, 1202 aa, Noctua fimbriata
MITRAAYRRARLPPPDPSLSSASPPPESSPIVSAVTPAVAVASSSSDEYFSPPTSPTPVRRQGRGRPPRSLGLRGHPAPSRVPAAGGCVQRMRWTHSINENVMRAYYGSTEGGTNLTAYRVGMLSLFQVLEPTVNVSAQRLSDQVRVIQRNHMLDDAVLDRLRSEVLSNRIVLTPAQTAVQASVIDATPPRFNPAVVEEDDRVAVVSSQCNDRLRSALEDALREYRSTPTELRPRLPRLPMHNKNRALVCALDSQLENIFESSENLVDTHSILYCGAVAACRLANVKFPNCDVATRPKPAVPAWQRRIERRIDGARVLIGKLHCFREGNTRPRVMRFVRRAFSGTGISPQEYMSRVTERIDFLKQKVYAWANRIRRYKRRVDRYSQNRMFQSDERWVYRAWERPELNMTDVCRPDDAATSSFWRSIWSVPVCHTETDWMRDVERVCEPIPEMEPILITRLDIARAVRPLPNWKSPGPDGLHNFWLKWLSSSHTCLASQFQSSLESGSLPQFLTTGVTHLLHKSGSPAEPKNYRPITCLSTVYKLLTSILRAKINTHIDKNSIMSASQNGCRSRSRGTKELLLIDMAISQQVRRSRKDLSTCWIDYKKAYDSVPHTWLMRVLELYKVDATLRAFLESCMGQWRTVLRYPGCGQIQGNDEPVWIKRGIFQGDSLSPLWFCLALNPLSTLLEDSGLGYRLRRGGQVISHLLYMDDLKLFAPNKLQLMELLKVTETFSSAIRMEFGVDKCAVMNVKQGEIMESEGIQLSDSIHLRTLSSTESYKYLGMSEALGINVTDMKQSLKERFFGRLNKVLHSLLSGGNKVRAFNGWVMPVLMYSFGVLKWTQTELDALDRRVRTLLTANRMHHPRSSVMRLYIPRKCGGRGFLNAKSLHNREMCSLREYFLKVEVGMHRDVVAVDKGLTPLSMAKENWRKPEVLTTDDRKEVWQGKELHGRFYRALHGPDVDFLASVSWLRFGDLFGETEGFVCAIMDEVMLTNNYRKYIMKDGTVDVCRACHRPGESIRHIISGCSRLANGEYLHRHNQVARIIHQQLALKYKLVESEVPYYKYVPDPVLEKDHVTLYWDQSIITDRTIVANKPDIVVIDRSARRVMIVDVTIPHDENLVKAEKEKQIKYLDLAHEVVDMWNVNSAIIVPIVVTANGLIAKSLDDHLSKLSLGGWIKGLIQKAVLLDTARIVRRFLSLEP

SEQ ID NO: 28319 - protein, 1202 aa, Noctua fimbriata
MLTRAAARRARLPPPDPSLSSASPPPESSHIVSAVTPAVAVASSSSDEYFSPPTSPTPVRRQGRGRPPRSLGLRGHPAPSRVPAAGGCVQRMRWTHSINENVMRAYYGSTEGGTNLTAYRVGMLSLFQVLEPTVNVSAQRLSDQVRVIQRNHMLDDAVLDRLRSEVLSNRIVLTPAQTAVQASVIDATPPRFNPAVVEEDDRVAVVSSQCNDRLRSALEDALREYRSTPTELRPRLPRLPMHNKNRALVCALDSQLENIFESSENLVDTHSILYCGAVAACRLANVKFPNCDVATRPKPAVPAWQRRIERRIDGARVLIGKLHCFREGNTRPRVMRFVRRAFSGTGISPQEYMSRATERIDFLKQKVYAWANRIRRYKRRVDRYSQNRMFQSDERWVYRAWERPELNMTDVCRPDDAATSSFWRSIWSVPVCHTEADWMCDVERVCEPIPEMEPILITPLDIARAVRPLPNWKSPGPDGLHNFWLKWLSSSHTCLASQFQSSLESGSLPQFLTTGVTHLLHKSGSPAEPKNYRPITCLSTVYKLLTSILRAKINTHIDKNSIMSASQNGCRNGSRGTKELLLIDMAISQQVRRSRKDLSTCWIDYKKAYDSVPHTWLMRVLELYKIDATLRAFLESCMGQWRTVLRYPGCRQMQGNDEPVWIKRGIFQGDSLSPLWFCLALNPLSTLLEDSGLGYRLRRGGQVISHLLYMDDLKLFAPNELRLMELLKVTETFSSAIRMEFGVDKCAVMYVKQGEIMESEGIQLSDSIHLRTLSSTESYKYLGMSEALGINVTDMKQSLKERFFGRLNKVLHSLLSGGNKVRAFNGWVMPVLMYSFGVLKWTQTELDALDRRVRTLLTANRMHHPRSSVMRLYIPRKCGGRGFLNAKSLHNREMCSLREYFLKVEVGMHRDVVAVDKGLTPLSMAKENWRKPEVLTTDDRKEVWQGKELHGRFYRALHGPDVDFLASVSWLRFGDLFGETEGFVCAIMDEVMLTNNYRKYIMKDGTVDVCRACHRPGESIRHIISGCSRLANGEYLHRHNQVARIIHQQLALKYKLVESEVPYYKYVPDPVLEKDHVTLYWDQSIITDRTIVANKPDIVVIDRSARRVMIVDVTIPHDENLVKAEKEKQIKYLDLAHEVVDMWNVNSAIIVPIVVTANGLIAKSLDDHLSRLSLGGWIKGLIQKAVLLDTARIVRRFLSLEP

SEQ ID NO: 28320 - protein, 1202 aa, Noctua fimbriata
MITRAAHRRARLPPPDPSLSSASPPPESSPIVSAVTPAVAVASSSSDEYFSPPTSPTTVRRQGRGRPPRSLGLRGHPAPSRVPAAGGCVQRMRWTHSINENVMRAYYGSTEGGTNLTAYRVGMLSLFQVLEPTVNVSAQRLSDQVRVIQRNHMLDDAVLDRLRSEVLSNRIVLSPAQTAVQTSVIDAAPPRFNPAVVEEDDMVAMVSSQCNDRLRSALEDALREYRSTPTELRPRLPRLPMHNKNRALVCALDSQLKNIFESSENLVDTHSILYCGAVAACRLANVKFPNYDVATRPKPVVPAWQRRIERRIDGARVLIGKLHCFREGNTRPRVMRFVRRAFSGTGISPQEYMSRVTERIDFLKQKVYAWANRIRRYKRRVDRYSQNRMFQSDERWVYRAWERPELNMANVCRPDDATTSSFWRSIWSVPVCHTEADWMRDVERVCEPIPEMEPILITPLDIARAVRPLPNWKSPGPDGLHNFWLKWLSSSHTCLASQFQSSLESGSLPQFLTTGVTHLLHKSGSPAEPKNYRPITCLSTVYKLLTSILRAKINTHIDKNSIMSASQNGCRNGSRGTKELLLIDMAISQQVRRSRKDLSTCWIDYKKAYDSVPHTWLMRVLELYKIDATLRAFLESCMGQWRTVLRYPGCRQIQGNDEPVWIKRGIFQGDSLSPLWFCLALNPLSTLLEDSGLGYRLRRGGQVISHLLYMDDLKLFAPNKLRLMELLKVTETFSSAIRMEFGVDKCAVMYVKQGEIMESEGIQLLDSIHLRTLSSTESYKYLGMSEALGINVTDMKQSLKERFFGRLNKVLHSLLSGGNKVRAFNGWVMPVLMYSFGVLKWTQTELDALDRRVRTLLTANRMHHPRSSVMRLYIPRKCGGRGFLNAKSLHNREMCSLREYFFKVEVGMHRDVVAVDKGLTPLSMAKENWRKPEVLTTDDRKEVWQGKELHGRFYRALHGPDVDFLASVSWLRFGDLFGETEGFVCAIMDEVMLTNNYRKYIMKDGTVDVCRACHRPGESIRHIISGCSRLANGEYLHRHNQVARIIHQQLALKYKLVESEVPYYKYVPDPVLEKDHVTLYWDQSIITDRTIVANKPDIVVIDRSARRVMIVDVTIPHDENLVKAEKEKQIKYLDLAHEVVDMWNVNSAIIVPIVVTANGLIAKSLDDHLSKLSLGGWIKGLIQKAVLLDTARIVRRFLSLEP

SEQ ID NO: 28321 - protein, 962 aa, Noctua fimbriata
MHNKNRALVCALDSQLENIFESSENLVDTHSILYCGAVAACRLANVKFPNCDVATRPKPAEPAWQRRIERRIDGARVLIGKLHCFREGNTRKRVMRFVRRAFSGTGISPQEYMSRVTERIDFLKQKVYAWANRIRRYKRRVNRYSQNRMFQSDERWVYRAWERPELNMTDVCRPDDAATSSFWRSIWSVPVCHTEADWMRDVERVCEPIPEMEPILSTPLDIARAVRPLPNWKSPGSDGLHNFWLKWLSSSHTCLASQFQSSLESGSLPQFLTTGVTHLLHKSGSPAEPKNYRPITCLSTVYKLLTSILRAKINTHIDKNSIMSASQNGCRNGSRGTKELLRIDMAFSQQVRRSRKDLSTCWIDYKKAYDSVPHTWLMRVLELYKIDATLRAFLESCMGQWRTVLRYPGCRQIQGNDEPVWIKRGIFQGDSLSPLWFCLALNPLSTLLEDSGLGYRLRRGGQVISHLLYMDDLKLFGPNKLQLMELLKVTETFSSAIRMEFGVDKCAVMYVKRGEIMESEGIQLSDSIHLRSLSSSESYKYLGMSEALGINVTDMKQSLKERFFGRLNKVLHSLLSGGNKVRAFNGWVMPVLMYSFGVLKWTQTELDALDRRVRTLLTANRMHHPRSSVMRLYIPRKCGGRGFLNAKSLHNREMCSLREYFLKVEVGMHRDVVAVDKGLTPLSMAKENWRKPEVLTTDDRKEVWQGKELHGRFYRALHGPDVDFLASVSWLRFGDLFGETEGFVCAIMDEVMLTNNYRKYIMKDGTVDVCRACHRPGESIRHIISGCSRLANGEFLHRHNQVARIIHQQLALKYKLVESEVPYYKYVPDPVLEKDYVTLYWDQSIITDRTIVANKPDIVVIDRSARRVMIVDVTIPHDENLVKAEKEKQIKYLDLAHEVVDMWNVNSAIIVPIVVTANGLIAKSLDDHLSKFSLGGWIKGLIQKAVLLDTARIVRRFLSLEP

SEQ ID NO: 28322 - protein, 1202 aa, Noctua fimbriata
MLTRAAARRARLPPPDPSLSSASPPPESSHIVSAVTPAVAVASSSSDEYFSPPTSPTPVRRQGRGRPPRSLGLRGHPAPSRVPAAGGCVQRMRWTHSINENVMRAYYGSTEGGTNLTAYRVGMLYLFQVLEPTVNVSAQRLSDQVRVIQRNHMLDDAVLDRLRSEVLSNRIVLTPAQTAVQASVIDATPPRFNPAVVEEDDRVAVVSSQCNDRLRSALEDALREYRSTPTELRPRLPRLPMHNKNRALVCALDSQLKNIFESSENLVDTHSILYCGAVAACRLANVKFPNCDVATRPKPAVPAWQRRIERRIDGARVLIGKLHCFREGNTRPRVMRFVRRAFSGTGISPQEYMSRATERIDFLKQKVYAWANRIRRYKRRVDRYSQNRMFQSDERWVYRAWERPELNMTDVCRPDDAATSSFWRSIWSVPVCHTEADWMCDVERVCEPIPEMEPILITPLDIARAVRPLPNWKSPGPDGLHNFWLKWLSSSHTCLAFQFQSSLESGSLPQFLTTGVTHLLHKSGSPAEPKNYRPITCLSTVYKLLTSILRAKINTHIDKNSIMSASQNGCRNGSRGTKELLLIDMAISQQVRRSRKDLSTCWIDYKKAYDSVPHTWLMRVLELYKIDATLRAFLESCMGQWRTVLRYPGCRQIQGNDEPVWIKRGIFQGDSLSPLWFCLALNPLSTLLEDSGLGYRLRRGGQVISHLLYMDDLKLFAPNKLRLMELLKVTETFSSAIRMEFGVDKCAVMYVKQGEIIESEGIQLSDSIHLRTLSSTESYKYLGMSEALGINVTDMKQSLKERFFGRLNKVLHSLLSGGNKVRAFNGWVMPVLMYSFGVLKWTQTELDALDRRVRTLLTANRMHHPRSSVMRLYIPRKCGGRGFLNAKSLHNREMCSLREYFLKVEVGMHRDVVAVDKGLTPLSMAKENWRKPEVLTTDDRKEVWQGKELHGRFYRALHGPDVDFLASVSWLRFGDLFGETEGFVCAIMDEVMLTNNYRKYIMKDGTVDVCRACHRPGESIRHIISGCSRLANGEYLHRHNQVARIIHQQLALKYKLVESEVPYYKYVPDPVLEKDHVTLYWDQSIITDRTIVANKPDIVVIDRSARRVMIVDVTIPHDENLVKAEKEKQIKYLDLAHEVVDMWNVNSAIIVPIVVTANGLIAKSLDDHLSRLSLGGWIKGLIQKAVLLDTARIVRRFLSLEP

SEQ ID NO: 28323 - protein, 1202 aa, Noctua fimbriata
MITRAAYRRARLPPPDPSLSSASPPPESSPIVSAVTPAVAVASSSSDEYFSPPTSPTPVRRQGRGRPLRSLGLRGHPAPSRVPAAGGCVQRMRWTHSINENVMRAYYGSTEGGTNLTAYRVGMLSLFQVLEPTVNVSAQQLSDQVRVIQRNHMLDDAVLDRLRSEVLSNRIVLTPAQTEVQASVIDATPPRFNPAVVEEDDRVAVVSSQCNDRLRSALEDALREYRSTPTELRPRLPRLPMHNKNRALVCALDSQLENIFESSENLVDTHSILYCGAVAACRLANVKFPNCDVATRPKPAVPAWQRRIERRIDGARVLIGKLHCFREGNTRPRVMRFVRRAFSGTGISPQEYMSRVTERIDFLKQKVYAWANRIRRYKRRVDRYSQNRMFQSDERWVYRAWERPELNMTDVCRPDDAATSSFWRSIWSVPVCHTEADWMRDVERVCEPIPEMEPILITPLDIARAVRPLPNWKSPGPDGLHNFWLKWLSSSHTCLASQFQSSLESGSLPQFLTTGVTHLLHKSGSPPEPKNYRPITCLSTVYKLLTSILRAKINTHIDKNSIMSASQNGCRSGSRGTKELLLIDMAISQQVRRSRKDLSTCWTDYKKAYDSVPHTWLMRVLELYKIDATLRAFLESCMGQWRTVLRYPGCGQIQGNDEPVWIKRGIFQGDSLSPLWFCLALNPLSTLLEDSGLGYRLRRGGQVISDLLYMDDLKLFAPNKLQLMELLKVTETFSSAIRMEFGVDKCAVMYVKRGEIMESEGIQISDSIHLRSLSSTESYKYLGMSEALGINVTDMKQSLKERFFGRLNKVLHSLLSGGNKVRAFNGWVIPVLMYSFGVLKWTQTELDALDRRVRTLLTANRMHHPRSSVMRLYIPRKCGGRGFLNAKSLHNREMCSLREYFLKVEVGMHRDVVAVDKGLTPLSMAKENWRKPEVLTTDDRKEVWQGKELHGRFYRALHGPDVDFLASVSWLRFGDLFGETEGFVCAIMDEVMLTNNYRKYIMKDGTVDVCRACHRPGESIRHIISGCSRLANGEYLHRHNQVARIIHQQLALKYKLVESEVPYYKYVPDSVLEKDHVTLYWDQSIITDRTIVANKPDIVVIDRSARRVMIVDVTIPHDENLVKAEKEKQIKYLDLAHEVVDMWHMNSAVIVPIVVTANGLIAKSLDDHLSKLSLGGWIKGLIQKAVLLDTARIVRRFLSLEP

SEQ ID NO: 28324 - protein, 1080 aa, Noctua fimbriata
MLSLFQVLEPTINVSAQRLSDQVRVIQRNHMLDDAVLDRLRSEVLSNRIVFTPAQTAVQASVIDATPPRFNPAVEEEDDRVAVVSSQCNDRLRSALEDALREYRSTPTELRPRLPRLPMHNKNRALVCALDSQLKNLFESSENLVDAHSILYCGAVAACRLANVKFPNCDVASRPKPAVPAWQRRIECRIDGARVLIGKLHCFREGNTRPRVMRFVRRAFSGTGISPQEYMSRVTERIDFLKQKVYAWANRIRRYKRRVDRYSQNCMFQSDERWVYRAWERPELNMTDVCRPDDAATSSFWRSIWSVPVCHTEADWMRDVEQVCEPIPEMEPILITPLDVARAVRPLPNWKSPGPDGLHNFWLKWLSSSHTCLASQFQSSLESGSLPQFLTTGVTHLLHKSGSPAEPKNYRPITCLSTVYKLLTSILRAKINTHIDKNSIMSASQNGCRNGSRGTKELLLIDMAISQQVRRSRKDLSTCWIDYKKAYDSVPHTWLMRVLELYKIDATLRAFLESCMGQWRTVLRYPGCRQIQGNDEPVWIKRGIFQGDSLSPLWFCLALNPLSTLLEDSGLGYRLRRGGQVISHLLYMDDLKLFAPNKLQLMELLKVTETFSSAIRMEFGVDKCAVMYVKQGEIMESEGIQLSDSIHLRTLSSTESYKYLGMSEALGINVTDMKQSLKERFFGRLNKVLHSLLSGGNKVRAFNGWVMPVLMYSFGVLKWTQTELDALDRRVRTLLTANRMHHPRSSVMRLYIPRKCGGRGFLNAKSLHNREMCSLREYFLKVEVGMHRDVVAVDKGLTPLSMAKENWRKPEVLTTDDRKEVWQGKELHGRFYRALHGPDVDFLASVSWLRFGDLFGETEGFVCAIMDEVMLTNNYRKYIMKDGTVDVCRACHRPGESIRHIISGCSRLANGEYLHRHNQVARIIHQQLALKYKLVESEVPYYKYVPDPVLEKDHVTLYWDQSIITDRTIVANKPDIVVIDRSARRVMIVDVTIPHDENLVKAEKEKQIKYLDLAHEVVDMWNVNSAIIVPIVVTANGLIAKSLDDHLSKLSLGGWIKGLIQKAVLLDTARIVRRFLSLEP

SEQ ID NO: 28325 - protein, 1202 aa, Noctua fimbriata
MITRAAYRRARLPPPDPSLSSASPPPESSPIVSAVTPAVPVASSSSDEYFSPPTSPTPVRRQGRGRPPRSLGLRGHPAPSRVPAAGGCVQRMRWTHSINENVMRAYYGSTEGGTNLTAYRVRMLSLFQVLEPTVNVSAQRLSDQVRVIQRNHMLDDAVLDRLRSEVLSNRVILTPAQTAVQASVIDATPPRFNPAVVEEDDRVAVVSSQCNDRLRSALEDALREYRSTPTELRPRLPRLPMHNKNRALVCALDSQLKNIFESSENLVDTHSILYCGAVAACRLANVKFPNCDVATRPKPAVPAWQCRIERRIDGARVLIGKLHCFREGNTRPRVMRFVRRAFSGTGISPQEYMSRVTERIDFLKQKVYAWANRIRRYKRRVDRYSQNRMFQSDERWVYRAWERPELNMTDVCRPDDAATSSFWRSIWSVPVCHTEADWMRDVERVCEPIPEMEPILITPLDIARAVRPLPNWKSPGPDGLHNFWLKWLSSSHTCLASQFQSSLESGSLPQFLTTGVTHLLHKSGSPAEPKNYRPITCLSTVYKLLTSILRAKINTHIDKNSIMSASQNGCRKGSRGTKELLLIDMAISQQVRRSRKDLSTCWIDYKKAYDSVPHTWLMRVLELYKIDATLRAFLESCMGQWRTVLRYPGCRQIQGNDEPVWIKRGIFQGDSLSPLWFCLALNPLSTLLEDSGLGYRLRRGGQVISHLLYMDDLKLFAPNKLQLMELLKVTENFSSAIRMEFGVDKCAVMYVKQGEIMESEGIQLSDSIHLRTLSSTESYKYLGMSEALGINVTDMKQSLKERFFGRLNKVLHSLLSGGNKVRAFNGWVMPVLMYSFGVLKWTQTELDALDRRVRTLLTANRMHHPRSSVMRLYIPRKCGGRGFLNAKSLHNREMCSLREYFLKVEVGMHRDVVAVDKGLTPLSMAKENWRKPEVLTTDDRKEVWQGKELHGRFYRALHGPDVDFLASVSWLRFGDLFGETEGFVCAIMDEVMLTKNYRKYIMKDGTVDVCRACHRPGESIRHIISGCSRLANGEYLHRHNQVARIIHQQLALKYKLVESEVPYYKYVPDPVLEKDHVTLYWDQSIITDRTIVANKPDIVVIDRSARRVMIVDVTIPHDENLVKAEKEKQIKYLDLAHEVVDMWNVNSAIIVPIVVTANGLIAKSLDDHLSKLSLGGWIKGLIQKAVLLDTARIVRRFLSLEP

SEQ ID NO: 28326 - protein, 1199 aa, Noctua fimbriata
MITRAAYRRARLTTPDSPLSSASPPPDPGSPVSPAAAVASSSSDEYFSPPTSPTPVRRQGRGRPPRSLGLRGHPAPSRVPATGGSVQRMRWTHSINENVMRAYYGSTEGGTNLTAYRVGMLSLFQVLEPTVNVSAQRLSDQVRVIQRNHMLDEAVLDRLRSEVLSNRIILTPTQTAVQASVVDATPPRFNPAVVEEDDRVAVVSSQCNDRLRSALEDALREYRSTPTELRPRLPRLPMHNKNRALVCALDSQLKNIFESSENLVDTHSILYCGAVAACRLANVKFPNCDVATRPKPAVPAWQRRIERRIDGARVLIGKLYCFREGNTRPRVMRFVRRAFLGTEISPQEYMSRVTERIDFLKQKVYAWANRIRRYKRRVDRYSQNRMFQSDERWVYRAWERPELNMTDVCRPDDAATCSFWRSIWSVPVCHTEADWMRDVERVCEPIPEMEPILITPLDIARAVRPLPNWKSPGPDGLHNFWLKWLSSSHTCLASQFQSSLESGSLPQFLTTGVTHLLHKSGSPAEPKNYRPITCLSTVYKLLTSILRVKINTHIDKNSIMSASQNGCRNGSRGTKELLLIDMAISQQVRRSRKDLSTCWIDYKKAYDSVPHTWLMRVLELYKIDATLRAFLESCMGQWRTVLRYPGCRQIQGNDEPVWIKRGIFQGDSLSPLWFCLALNPLSTLLEDSGLGYRLRRGGQVISHLLYMDDLKLFAPNKLRLMELLKVTETFSSAIRMEFGVDKCAVMYVKQGEIMESEGIQLSDSIHLRTLSSTESYKYLGMSEALGVNVTDMKQSLKERFFGRLNKVLHSLLSGGNKVRAFNGWVMPVLMYSFGVLKWTQTELDALDRRVRTLLTANRMHHPRSSVMRLYIPRKCGGRGFLNAKSLHNREMCSLREYFLKVEVGMHRDVVAVDKGLTPLSMAKENWRKPEVLTTDDRKEVWQGKELHGRFYRALHGPDVDFLASVSWLRFGDLFGETEGFVCAIMDEVMLTNNYRKYIMKDGTVDVCRACHRPGESIRHIISGCSRLANGEYLHRHNQVARIIHQQLALKYKLVESEVPYYKYVPDPVLEKDHVTLYWDQSIITDRTIVANKPDIVVIDRSARRVMIVDVTVPHDENLVKAEKEKQIKYLDLAHEVVDMWNVNSAIIVPIVVTANGLIAKSLDDHLSKLSLGGWIKGLIQKAVLLDTARIVRRFLSLEP

SEQ ID NO: 28327 - protein, 1202 aa, Noctua fimbriata
MITRAAYRRARLPPPDPSLSSASPPPESSPIVSAVTPAVAVASSSSDEYFSPPTSPTSVRRQGRGRPPRSLGLRGHPAPSRVPAAGGCVQRMRWTHSINENVMRAYYGSTEGGTNLTAYRVGMLSLFQVLEPTVNVSAQRLSDQVRVIQRNHMLDDAVLDRLRSEVLSNRIVLTPAQTAVQASVIDATPPRFNPAVVEEDDRVAVVSSQCNDRLRSALEDALREYRSTPTELRPRLPRLPMHNKNRALVCALDSQLENIFESSENLVDTHSILYCGAVAACRLANVKFPNFDVATRPKPAVPAWQRRIERRIDGARVLIGKLHCFREGNTRPRVMRFVRRAFSGTGISPQEYMSRVTERIDFLKQKVYAWANRIRRYKRRVDRYSQNRMFQSDERWVYRAWERPELNMTDVCRPDDAATSSFWRSIWSVPVCHTEADWMRDVERVCEPIPEMEPILITRLDIARAVRPLPNWKSPGPDGLHNFWLKWLSSSHTCLASQFQSSLESGSLPQFLTTGVTHLLHKSGSPAEPKNYRPITCLSTVYKLLTSILRAKINTHIDKNSIMSASQNGCRNGSRGTKELLLIDMAISQQVRRSRKDLSTCWIDYKKAYDSVPHTWLMRVLELYKIDATLRAFLESCMGQWRTVLRYPGYRQIQGNDEPVWIKRGIFQGDSLSPLWFYLALNPLSTLLEDSGLGYRLRRGGQVISHLLYMDDLKLFAPNKLQLMELLKVTETFSSAIRMEFGVDKCAVMYVKRGEIMESEGIQLSDSIHLRSLSSSESYKYLGMSEALGINVTDMKQSLKERFFGRLNKVLHSLLSGGNKVRAFNGWVMPVLMYSFGVLKWSQTELDALDRRVRTLLTANRMHHPRSSVMRLYIPRKCGGRGFLNAKSLHNREMCSLREYFLKVEVGMHRDVVAVDKGLTPLSMAKENWRKPEVLTTDDRKEVWQGKELHGRFYRALHGPDVDFLASVSWLRFGDLFGETEGFVCAIMDEVMLTNNYRKYIMKDGTVDVCRACHRPGESIRHIISGCSRLANGEYLHRHNQVARIIHQQLALKYKLVESEVPYYKYVPDPVLEKDHVTLYWDQSIITDRTIVANKPDIVVIDRSARRVMIVDVTIPHDENLVKAEKEKQIKYLDLAHEVVDMWNVNSAIIVPIVVTANGLIAKSLDDHLSKLSLGGWIKGLIQKAVLLDTARIVRRFLSLEP

SEQ ID NO: 28328 - protein, 868 aa, Atethmia centrago
MRFVRRAFSGTGISPREYMSRVTERIDFLKQKVCAWASRIRRYKRRVDRYTQNRMFQSDERWVYRAWERPEQNETDMCRPDDATTTAFWRSIWSEPVCHAEADWMRDVERVCETIPEMEVVVITPSDIARAVRPLPNWKSPGPDGLHNFWLKWLTSSHTCLASQFQSSLESGSLPQFLTTGITHLLHKSGSPAEPKNYRPITCLSTVYKLLTSILRAKINTHIDSNSIMSASQNGCRNGSRGTKELLLIDMAISQQVRRSRKDLSTCWIDYKKAYDSVPHTWLMKVLELYKIDTTLRTFLESCMGQWRTVLRYPGCRRIQGNDEPVWIKRGIFQGDSLSPLWFCLALNPLSTLLEDSGLGYRLRRGGQVISHLLYMDDLKIFAPNKLRLMELLKVTETFSGAIRMEFGVDKCAVMHVKRGEIMESEGIQLSDSIHLRSLSSPESYKYLGMSEALGINVTDMKQLLKERFFGRLKKVLISLLSGGNKVRAFNGWVMPVLMYSFGILKWTQTELDALDRRVRTLLTANRMHHPRSSVMRLYIPRKCGGRGFLNAKTLHNREICSLREYFLKAEVGMHRDVVAVDKGLTPLSMAKENWCKPVVLTTDDRKEIWQNKELHGRFYRALHEPDVDFLASVSWLRFGDLFGETEGFVCAIMDEVILTNNYRRHIMKDGTVDVCRACHCPGESIRHIISGCSRLANGEYLHRHNQVARIIHQQLALKYKLVNSEVPYYKYVPDPVLENDHVTLYWDRSIITDRTIVANKPDIVVIDRLARRAMIVDVTIPHDDSLVKAEKEKQIKYLDLAHEVVDMWNVNSAVIVPIVVTANDLMAESLNHHLSRLSLGGWIKGLIQKAVLLDTARIVRRFLSLEP

SEQ ID NO: 28329 - protein, 964 aa, Atethmia centrago
MHKKNRALVCTLDSLLKDFFESSEDLVDTSTHSILYCAAVAACRLANVKFPNCDGATRPKPAVPAWQCRIERRIDGARVLIGKLYCFREGNTRPRVMRFVRRAFSGTGISPREYMSRVTERIDFLKQKVCAWASRIRRYKRRVDRYTQNRMFQSDERWVYRAWERPEQNETDVCRPDDATTTAFWRSIWSVPVCHAEADWMRDVERVCETIPEMDVVIITPSDIARAVRPLPNWKSPGPDGLHNFWLKWLTSSHTCLASQFQSSLESGSLPQFLTTGITHLLHKSGSPAEPKNYRPITCLSTVYKLLTSILRAKINTHIDSNSIMSASQNGCRNGSRGTKELLLIDMAISQQVRRFRKDLSTCWIDYKKAYDSVPHTWLMRVLEFYKIDTTLRTFLESCMGQWRTVLRYPGCRQIQGNDEPVWIKRGIFQGDSLSPLWFCLALNPLSTLLEDSGLDYRLRRGGQVISHLLYIDDLKIFAPNKLQLMELLKVTETFSSAIRMEFGVDKCAVMHVKRGEIMESEGIQLSDSIHLRSLSSPESYKYLGMSEALGINVTDMKQSLKERFFGRLKKVLISPLSGGNKVRAFNGWVMPVLMYSFGILKWTQTELDALDRRVRTLLTANRMHHPRSSVMKLYIPRKCGGRGFLNAKTLHNREICSLREYFLKTEVGMHRDVVAVDKGLTPLSMAKENWCKPVILTTDDRKEIWQNKELHGRFYRALHEPNVDFLASVSWLRFGDLFGETEGFVCAIMDEVILTNNYRRHIMKDGTVDVCRACHRPGESIRHIISGCSRLANGEYLHRHNQVARIIHQQLALKYKLVNSEVPYYKYAPDPVLENDHVTLYWDRSIITDRTIVANKPDIVVIDRLARRAMILDVTIPHDENLVKAEKEKQIKYLDLAHEVVDMWNVDSAVIVPIVVTANGLMAESLNHHLSRLSLGGWIKGLIQKAVLLDTARIVRRFLSLES

SEQ ID NO: 28330 - protein, 1203 aa, Atethmia centrago
MLTRAASKRARPPPPDSSLSSASPPPVSSPTVSAVITPAAVVASSSSDEYFSPPTSPTPVRRQGRDRPPKSLGLRGHPAPSRVPAAGGCVQRMRWTQFMNENVMRAYYGSTEGGTNLTAYRVRMLSLFQELEPTVNVSAQRLSDQVRVIQRNRRLDDATLDRLRSEVLSNYIISTPAQTAVHTPIIDVIPPRSNHGVEEEDDRAATVSSQCNVRLRSALEDAFREYRSTPTELRPRLPRLPMHKKNRALMCALDSQLKVFFESSEDLVDTHSILYCAAVAACRLANVKFPNSDGATRPKPAVPAWQCRIERRIDKARVLIGKLYCFREGNTRPRVMRFVRRAFSGTGISPREYMSHITERIDFLKQKVCAWASRIRRYKRRVDRYTQNRMFQSDERWVYRAWERPKQNVTDVGRPDDATTTAFWRSIWSVPVCHVEADWMRDVERVCETIPEMEVVIITPSDIARAVRPLPNWKSPGPDGLHNFWLKWLTSSHTCLASQFQSSLESGSLPQFMTTGITHLLHKSGSPAEPKNYRPITCLSTVYKLLTSILRAKINTHIDSNSIMSASQNGCRNGSRGTKELLLIDMAISQQVRRSRKDLSTCWIDYKKAYDSVPHTWLMRVLELYKIDTTLRTFLESCMGQWRTVLRYPGCRQIQGNDEPVWIKRGIFQGDSLSPLWFCLALNPLSMQLEDSGLGYRLKRGGQIISHLLYMDDLKIFAPNKLQLMKLLKVTETFSSAIRMEFGVDKCAVMHVKRGEIMESEGIQLSDSIHLRSLSSPESYKYLGMSEALGINVTDMKQSLKERFFGRLKKVLISLLSGGNKVRAFNSWVMPVLTYSFGILKWTQTELDALDRRVRTLLTANRMHHPRSSVMRLYIPRKCGGRGFLNAKTLHNREICCLREYFLKTEVGMHRDVVAVDKGLTPLSMAKENWCKPVVLTTDDRKEIWQSKELHGRFYRALHEPDVDFLASVSWLRFGDLFGETEGFVCAIMDEVILTNNYRRHIMKDGTVDVCRACHRPGESIRHIISGCSRLANGEYLHRHNQVARIIHQQLALKYKLVNSEVPYYKYVPDPVLENDHVTLYWDRSIITDRTIVANKPDIVVIDRLARRAMIVDVTIPHDDNLVKAEKEKQIKYLDLAHEVVDMWNVNSAVIVPIVVTANGLMARSLNHHLSRLALDGWIKGLIQKAVLLDTARIVRRFLSLEP

SEQ ID NO: 28331 - protein, 1203 aa, Atethmia centrago
MLTRAASKRARPPPPDSSLSSASPPPVSSPTVSAVITPAAVVASSSSDEYFSPPTSPTPVRRQGRDRPPKSLGLRGHPAPSRVPAAGGCVQRMRWTQSMNENVMRAYYGSTEGGTNLTAYRVRMLSLFQELEPTVNVSAQRLSDQVRVIQRNRRLDDATLDRLRSEVLSNYIISTPAQTAVHTPIIDVIPPRSNHGVEEEDDRAATVSSQCNVRLRSALEDAFREYRSTPTELRPRLPRLPMHKKNRALMCALDSQLKVFFESSEDLVDTHSILYCAAVAACRLANVKFPNSDGATRPKPAVPAWQCRIERRIDKARVLIGKLYCFREGNTRPRVMRFVRRAFSGTGISPREYMSHITERIDFLKQKVCAWASRIRRYKRRVDRYTQNRMFQSDERWVYRAWERPKQNVTDVCRPDDATTTAFWRSIWSVPVCHVEADWMRDVERVCETIPEMEVVIITPSDIARAVRPLPNWKSPGPDGLHNFWLKWLTSSHTCLASQFRSSLESGSLPQFMTTGITHLLHKSGSPAEPKNYRPITCLSTVYKLLTSILRAKINTHIDSNSIMSASQNGCRNGSRGTKELLLIDMAISQQVRRSRKDLSTCWIDYKKAYDSVPHTWLMRVLELYKIDTTLRTFLESCMGQWRTVLRYPGCRQIQGNDEPVWIKRGIFQGDSLSPLWFCLALNPLSMQLEDSGLGYRLRRGGQIISHLLYMDDLKIFAPNKLQLMKLLKVTETFSSAIRMEFGVDKCAVMHVKRGEIMESEGIQLSDSIHLRSLSSPESYKYLGMSEALGINVTDMKQSLKERFFGRLKKVLISLLSGGNKVRAFNSWVMPVLTYSFGILKWTQTELDALDRRVRTLLTANRMHHPRSSVMRLYIPRKCGGRGFLNAKTLHNREICSLREYFLKTEVGMHRDVVAVDKGLTPLSMAKENWCKPVVLTTDDRKEIWQSKELHGRFYRALHEPDVDLLASVSWLRFGDLFGETEGFVCAIMDEVILTNNYRRHIMKDGTVDVCRACHRPGESIRHIISGCSRLANGEYLHRHNQVARIIHQQLALKYKLVNSEVPYYKYVPDPVLENDHVTLYWDRSIITDRTIVANKPDIVVIDRLARRAMIVDVTIPHDDNLVKAEKEKQIKYLDLAHEVVDMWNVNSAVIVPIVVTANGLMARSLNHHLSRLALDGWIKGLIQKAVLLDTARIVRRFLSLEP

SEQ ID NO: 28332 - protein, 1202 aa, Atethmia centrago
MLTRSAARARPPPPDSSLSSASPPPVPNPTVSAVTTPAAVVASSSSDEYFSPPTSPTPVRRQGRGRPPKSLGLRGQLAPSRVPAAGGCVQRMRWTQSMNENVMRAYYGSTEGGTNLTAYRVRMLSLFQKLEPTVNVSAQRLSDQVRVIQRNHRLDDAALDGLRSEVLSNHIVSTPAQTATHAPIINAIPPRSNHDVEEEDDRVATVSSQCNVRLRSALEDAFREYRSTPTELRPRLPRLPMHKKNTALVCALDSLLKDFFESSEDLVDTHSILYCAAVAACRLANVKFPNCDGATRPKPAVPAWQCRIERRIDGARVLIGKLYCFREGNTRPRVMRFVRRAFSGTGISPREYMSRVTERIDFLKQKVCAWASRIRRYKRRVDRCTQNRMFQSDERWVYRSWERPEQNETDVCRPDDATTTAFWRSIWSVPVCYAEADWMRDVERVCETIPEMEVVIITPSDIARAVRPLPNWKSPGPDGLHNFWLKWLTSSHTCLASQFQSSLESGSLPQFLTTGITHLLHKSGSPAEPKNCRPITCLSTVYKLLTSILRAKINTHIDSNSIMSASQNGCRNGSRGTKELLLIDMAISQQVRRFRKDLSTCWIDYKKAYDSVPHTWLMRVLELYKIDTTLRTFLESCMGQWRTVLRYPGCRQIQGNDEPVWIKRGIFQGDSLSPLWFCLALNPLSTLLEDSDLGYRLRRGGQVISHLLYMDDLKIFAPNKLQLMELLKVTETFSSAIRMEFGVDKCAVMHVKRGEIMEPEGIQLSDSIHLRSLSSPESYKYLGMSEALGINVTDMKQSLKERFFGRLKKVLISPLSGGNKVRAFNGWVMPVLMYSFGILKWTQTELDALDRRVRTLLTANRMHHPRSSVMRLYIPRKCGGRGFLNAKTLHNREICSLREYFLKTEVGMHRDVVAVDKGLTPLSMAKENWCKPVILTTDDRKEIWQNKELHGRFYRALHEPDVDFLASVSWLRFGDLFGETEGFVCAIMDEVILTNNYRRHIMKDGTVDVCRACHRPGESIRHIISGCSRLANGEYLHRHNQVARIIHQQLALKYKLVNSEVPYYKYAPDPVLENDHVTLYWDRSIITDRTIVANKPDIVVIDRLARRAMIVDVTIPHDENLVKAEKEKQIKYLDLAHEVVDMWNVDSAVIVPIVVTANGLMAESLNHHLSRLSLGGWIKGLIQKAVLLDTARIVRRFLSLES

SEQ ID NO: 28333 - protein, 1211 aa, Mesoligia furuncula
MLTRLATRRARLPPPDSSLSSAPPPPEPSPIESAVTPAVAVASSSSDEYFSPPTSPTPVRRQGRGRPPNSLGLRGHPAPSRVPATGGCVQRMRWTQSMNENVMRAYYGSTEGGINLTAYRDRMLSLFQELEPTVNVSAQRLSDQVRVIQRLSDQVRVIQRNHRLDDIALDRLRSEVLSNHIVTTSAQTAAQASTVDAIPPRFNHVEEEDDRVDTVSSQCNVRLRSALEDALREYRSTPTELRPRLPRLPMHKKNRALVCALDSQLKNFFESSEDLVDTHSILYCAAVAACRLANVKFPSCDGATRPKLAVPAWQRRIERRIDGARVLIGKLYCFREGNTRPRVMRFVRRAFSGTGISPREYMSRLTERIDFLKQKVCAWASRIRRYKRRVDRYTQNRMFQSDERWVYRAWERPEQNVTDVCRPDDAATSAFWCSIWSVPVCHTEAGWMQDVERVCESIPQMEKVLIMPSDVARAVRPLPNWKSPGPDGLHNFWLKWLISSHTCLASQFQSSLESGSLPQFLTTGVTHLLHKSGSPAEPKNYRPITCLSTVYKLLTFILRAKINTHIESNSIMSASQNGCRNGSRGTKELLLIDMAISQQVRRSRKDLSTCWIDYKKAYDSVPHTWLMRVLELYKIDATLRTFLESCMGQWKTVLRYPGCRQIQGNDEPVWIKRGIFQGDSLSPLWFCLALNPLSTLLEDSGLGYRLRRGGQVISHLLYMDDLKLFAPNKLRLMELLKVTETFSSAIRMQFGVDKCAVMHVKRGEIMESEGIQLSDSISLRSLSSSESYKYLGMSEALGINDADMKQSLKERFFCRLKKVLISLLSGGNKVRAFNGWVMPVLMYSFGILKWTQTELDALDRRVRTLLTANRMHHPRSSMMRLYIPRKCGGRGFLNAKTLHNREVCSLREYFLKAEVGMHRDVVAVDKGLTPLSMAKENWRKPVVLSTDDRKKVWQSKELHGRFYRALHEPGVDFIASVSWLRFGDLFGETEGFVCAIMDEVILTDNYRRHIMKDGTVDVCRACHRPGESIRHIISGCSRLANGEYLHRHNQVARIIHQQLALKYKLVDSEVPYYKYVPDPVLENDHVTLYWDRSIITDRTIVANKPDIVVIDRLARRTMIVDVTIPHDGNLVKAEKEKEIKYQDLAHEVVDMWNVSSAIIVPIVVSANGLMAESLDQHLSRLSLGGWIKGLIQKAVLLDTARIVRRFLSLEP

SEQ ID NO: 28334 - protein, 1199 aa, Xestia c-nigrum
MITRAASRRALIPSPDSSLSSASPPPDPGSPVSPVAAVASSSSDEYFSPPTSPTPVRRAGRGRPPKGLGLRGQQAPSRVPATGGCVQRMKWTQLMNENVMRAYYGSTEGGTNLTAYRVRMLSLFQDLEPTVNASAQRLSDQVRVIQRNHLLDGAALDRLRSEVLSNRIILTPAQTAIQASFIDANPPRPNPAVVEEDDRVATVSSQCNDRLRSALEDALHEYRSTSAELRPRLPRLPMHKKNRALVCALDSQLKNVFESSEDLVDTHSILFCGAVAACRLANVKFPNYDLATRPKPAVPAWQRRIERRIDGARVLIGKLHCFREGNTRPRVMRFVRRAFSGTEISPQEYMSRVTERIDFLKQKVYAWASRIRRYKRRVDRYSQNRMFQSDERWVYRAWERPQQNMTDVCRPDDAATSSFWRSIWSVPVCHSEADWMRDVERVCEPIPTMEPILITPLDIARAVRPLPNWKSPGPDGLHNFWLKWFSSSHTCLASQFQSSLESGSLPQFLTTGITHLLHKSGSPAEPKNYRPITCLSTVYKLLTSILRTKINTHVDSNSIMSASQNGCRNGSRGTKELLLVDMAISQQVRRARKDLSTCWIDYKKAYDSVPHSWLRRVLELYKIDATLRTFLESCMGQWRTVLRYPGCRQIQGNDEPVWIKRGIFQGDSLSPLWFCLALNPVSTLLENSGLGYRLRKDGQVISHLLYMDDLKLFAPNKLQLMELLKVTETFSSAIGMEFGVDKCAVMYVKRGKIMGSEGLQLSDSIHLRSLSSSESYKYLGMSEALGINVTDMKQSLKERFFGRLKKVLNSLLSGGNKVRAFNGWVMPVLMYSFGILKWTQTELDALDRRVRTLLTENRMHHPRSSVMRLYIPRKCGGRGFLNAKTLHNREVCSLREYFLKADVGMHRDVVAVDKGLTPLSMAKENWRKPVVLTTDDRKKEWQGKELHGRFYRALHGPDVDFLASVSWLRFGDLFGETEGFVCAIMDEVMLTNNYRKYIMKDGTVDVCRACHCPGESIRHIISGCSRLANGEYLHRHNQVARIIHQQLALKFKLVESEVPYYKYVPDPVLVKDHVTLYWDQSIITDRTIVANKPDIVVIDRSARRVMIIDVTIPHDENLVKAEKEKQMKYLDLAHEVRDMWNMNSVIIVPIVVTANGLIAKSLDEHLSKLSLGGWIKGLIQKAVLLDTARIVRRFLSLQP

SEQ ID NO: 28335 - protein, 962 aa, Xestia c-nigrum
MHKKNRALVCALDSQLKNVFESSEDLVDTHSILFCGAVAACRLANVKFPNYDLATRPKPAVPAWQRRIERRIDGARVLIGKLHCFREGNTRPRVMRFVRRAFSGTEISPQEYMSRVTERIDFLKQKVYAWASRIRRYKRRVDRYSQNRMFQSDERWVYRAWERPQQNMTDVCRPDDAATSSFWRSIWSVPVCHSEADWMRDVERVCEPIPTMEPILITPLDIARAVRPLPNWKSPGPDGLHNFWLKWFSSSHTCLASQFQSSLESGSLPQFLTTGITHLLHKSGSPAEPKNYRPITCLSTVYKLLTSILRTKINTHVDSNSIMSASQNGCRNGSRGTKELLLIDMAISQQVRRARKDLSTCWIDYKKAYDSVPHSWLRRVLELYKIDATLRTFLESCMGQWRTVLRYPGCRQIQGNDEPVWIKRGIFQGDSLSPLWFCLALNPVSTLLENSGLGYRLRKDGQVISHLLYMDDLKLFAPNKLQLMELLKVTETFSSAIGMEFGVDKCAVMYVKRGKIMGSEGLQLSDSIHLRSLSSSESYKYLGMSEALGINVTDMKQSLKERFFGRLKKVLNSLLSGGNKVRAFNGWVMPVLMYSFGILKWTQTELDALDRRVRTLLTENRMHHPRSSVMRLYIPRKCGGRGFLNAKTLHNREVCSLREYFLKADVGMHRDVVAVDKGLTPLSMAKENWRKPVVLTTDDRKKEWQGKELHGRFYRALHGPDVDFLASVSWLRFGDLFGETEGFVCAIMDEVMLTNNYRKYIMKDGTVDVCRACHCPGESIRHIISGCSRLANGEYLQRHNQVARIIHQQLALKFKLVESEVPYYKYVPDPVLVKDHVTLYWDQSIITDRTIVANKPDIVVIDRSARRVMIIDVTIPHDENLVKAEKEKQMKYLDLAHEVRDMWNMNSVIIVPIVVTANGLIAKSLDEHLSKLSLGGWIKGLIQKAVLLDTARIVRRFLSLQP

SEQ ID NO: 28336 - protein, 1202 aa, Omphaloscelis lunosa
MLTRSAARSARLSSPDSPLSSASPPPVPSPIVNAVSTPAAVVASSSSDEYFSPPTSPTPVRRQGRGRPPRSLGLRGQPAPSRVPAAGGCVQRMRWTQLMNENVMRAYYGSTEGGTNLTAYRVRMLSLFQELEPTVNVSAQRLSDQVRVIQRNHRLDDTALDRLRSEVLSNHIVSTRAQTAAQDSNIDPTPPRFNHGVEEDDRVATVSSQCNDRLRSALEDAFREYRYTPTELRPRLPRLPMHKKNRALVCALDSQLTNFFESSEDLIDTHSILYCAAFAACRLANVKFPNYDGTTRPKPVVPAWQCRIERRIDGARVLIGKLYCFREGNTRPRVMRFVRRAFLGTGISPQEYMSRVTERIDFLKQKVCAWASRIRRYKRRVDRYTQNRMFQSDERWVYRAWGRPEQNVTDVCRPDDAATSAFWRSIWSVPVCHTEAGWMQDVERVCETIPEMDAVFITPLDVARAVRPLPNWKSPGPDGLHNFWLKWLSSSHTRLASQFQSSLESGLLPQFLTTGVTHLLHKSGNPAEPKNYRPITCLPKVYKLLTSILRTKINTHIDSNSIMSASQNGCRNGSRGTKELLLIDMAISQQVRRSRKDLSTCWIDYKKAYDSVPHTWLMRVLELYKVHTTLRTFLMSCMGQWRTVLRYPGCRQTQGNDEPVWIKRGIFQGDSLSPVWFCLALNPLSTLLEGSGLGYRLRRGGQVISHLLYMDDLKLFAPNKLRLMELLKVTETFSGAIRMEFGVDKCAVMHVKRGEIMESEGTQLSDSIHLRSLSSAENYRYLGMSESLGINVAHMKQSLKERFFGRLKKVLISFLSGGNKVRAFNGWVMPVLMYSFGILKWTQTELDALDRRVRTLLTANRMHHPRSSVMRLYIPRKCGGRGFLNAKTLHNREVCSLREYFFKADVGMHRDVVAVDNGLTPLSMAKENWRKPVVLTTDDRKEVWQSKALHGRFYRALHEPGVDFLASVSWLRFGDLFGETEGFICAIMDEVILTNNYRRHIMKDGTVDVCRACHRPGESIRHIISGCSRLANGEYLHRHNQVARIIHQQLALKYKLVDSEVPYYRYVPDPVLENDHVTLYWDRSIITDRTIIANKPDIVVIDRLARRAMIVDVTIPHDENLVKAEKEKQIKYLDLAHEVVDMWNVSSAIIVPIVVTANGLMAESLDQHLSRLSLGGWIKRLIQKAVLLDTARIVRRFLSLQP

SEQ ID NO: 28337 - protein, 868 aa, Omphaloscelis lunosa
MRFVRRAFSGTEISPQDYMSRVTERIDFLKQKVCAWASRIRRYKRRVDRYTQNRMFQSDERWVYRAWERPEQNVTEVCRPDDAATSAFWRSIWSVPVCHTEAGWMQDVERVCETIPEMDAVFITPLDVARAVRPLPNWKSPGPDGLHNFWLKWLSSSHTRLASQFQSSLESGSLPQFLTTGVTHLLHKSGNPAEPKNYRPITCLSTVYKLLTSILRTKINTHIDSNSIMSVSQNGCRNGSRGTKEFLLIDMAISQQVRRSRKDLSTCWIDYKKAYDSVPHTWLMRVLELYKVDTTLRTFLMSCMGQWRTVLRYPGCRRTQGNDEPVWIKRGIFQGDSLSPLWFCLALNPLSTLLEDLGLGYRLRRDGQVISHLLYMDDLKLFAPNKLRLMELLKVTETFSSAIRMEFGVDKCAVMHVKRGEIMESEGIQLSDSIHLRSLSSAENYRYLGMSESLGINVADMKQSLKERFFGRLKKVLISFLSGGNKVRAFKGWVMPVLMYSFGILKWTQTELDALDRRVRTLLTANRMHHPRSSVMRLYIPRKCGGRGFLNAKTLHNRDVCSLREYFFKADVGMHRDVVAVDNGLTPLSMAKENWHKPVVLTTDDRKELWQSKALHGRFYRALHEPGVDFLASVSWLRFGDLFGETEGFICAIMDEVILTNNYRRHIMKDGTVDVCRACHRPGESIRHIISGCSRLANGEYLHRHNQVARIIHQQLALKYKLVDSEVPYYKYVPDPVLENDHATLYWDRSIITDRTIVANKPDIVVIDRLARHAMIVDVTIPHDENLVKAEKEKQIKYLDLAHEVVDMWNVSSAIIVPIVVTANGLMAKSLDQHLSRLSLDGWIKRLIQKAVLLDTARIVRRFLSLQP

SEQ ID NO: 28338 - protein, 1202 aa, Omphaloscelis lunosa
MLTRSAARSARLPPPDSPLSSASPPPVPSPIVNAVSTPAAVVASSSSDEYFSPPTSPTPVRRQGRGRPPRSLGLRGQPAPSRVPAAGGCVQRMRWTQLMNENVMRAYYGSTEGGTNLTAYRVRMLSLFQELEPTVNVSAQRLSDQVRVIQRNHRLDDIALDRLRSEVLSNHIVTTRAQTAAQESNIDPTPPRFNHGVEEDDRVATVSSQCNDRLRSALEDAFREYRYTPTELRPRLPRLPMHKKNRALVCALDSQLTNFFESSEDLIDTHSILYCAAVAACRLANVKFPNYDGATRPKPVVPAWQCRIERRIDGARVLIGKLYCFREGNTRPRVMRFVRRAFLGTGISPQEYMSRVTERIDFLKQKVCAWASRIRRYKRRVDRYTQNRMFQSDERWVYRAWERPEQNVTDVCRPDDAATSAFWRSIWSVPVCHTEAGCMQDVERVCETIPEMDAVFITPLDVARAVRPLLNWKSPGPDGLHNFWLKWLSSSHTRLASQFQSSLESGLLPQFLTTGVTHLLHKSGNPAEPKNYRPITCLPTVYKLLTSILRTKINTHIDSNSIMSASQNGCRNGSRGTKELLLIDMAISQQVRRSRKDLSTCWIDYKKAYDSVPHTWLMRVLELYKVHTTLRTFLMSCMGQWRTVLRYPGCRQTQGNDEPIWIKRGIFQGDSLSPLWFCLALNPLSTLLEGSGLGYRLRRGGQVISHLLFMDDLKLFAPNKLRLMELLKVTETFSGAIRMEFGVDKCAVMHVKRGEIMESEGTQLSDSIHLRSLSSAENYRYLGMSESLGINVADMKQSLKERFFGRLKKVLISFLSGGNKVRAFNGWVMPVLMYSFGILKWTQTELDALDRRVRTLLTANRMHHPRSSVMRLYIPRKCGGRGFLNAKTLHNREVCSLREYFFKADVGMHRDVVAVDNGLTPLSMAKENWRKPVVLTTDDRKEVWQSKALHGRFYRALHEPGVDFLASVSWLRFGDLFGETEGFICAIMDEVILTNNYRRHIMKDGTVDVCRACHRPGESIRHIISGCSRLANGEYLHRHNQVARIIHQQLALKYKLVDSEVPYYKYVPDPVLENDHVTLYWDRSIITDRTIIANKPDIVVIDRLARRAMIFDVTIPHDENLVKAEKEKQIKYLDLAHEVVDMWNVSSAIIVPIVVTANGLMAESLDQHLSRLSLGGWIKRLIQKAVLLDTARIVRRFLSLQP

SEQ ID NO: 28339 - protein, 868 aa, Sesamia nonagrioides
MRFVRQAFSGTGISPREYINNVTERIDFLKQKVCAWASRIRRYKKRVDRYTQNRMFQSDERWVYRAWERPEQNEADECRPDDATTSAFWRGIWSVSVCHTEGDWTQDVEQVCETIPEMDNILITPLDVATAVRSLPNWKSPGPDGLHNFWLKWLSSSHTCLASQFQSSLESGSLPQFLTTGITHLLHKSGSTAEPKNYRPITCLPTVYKVLTSILKAKINNHLDSNSIMSVSQNGCRSGSRGTKELLLIDMAISQQVRRSRKDLSTCWIDYKKAYDSVPHTWLMRVLELYKINATLRTFLRSCMGQWKTVLRYPGSRQIQGNDEPVWIKRGIFQGDSLSPLWFCLALNPLSTLLEDSGLGYRLKRGGQVISHLLYMDDLKLFAPNKLHLMKLLNVTETFSSGIKMEFGVDKCAVIHVKRGQIMESEGITLPDSIHLRSLSSFESYKYVGMSEALGINDADMKQSLKERFFGRLRKVLNSLLSGGNKVRAFNGWVMPVLMYSFGILKWTQTELDALDRRVRTLLTANRMHHPRSSVMRLYIPRKCGGRGFLNAKTLHNREVCSLREYFLKTVVGMHHDAVTVDKGLTPLSMAKENWHKPIILTTDDRRMVWQSKELHGRFYRALHGPDVDFLASVSWLRFGDLFGETEGFVCAIMDEVILTNNYRRYIMKDGTIDVCRACHRPGESIRHIISGCSRLANSEYLHRHNQVARIIHQQLALKYKLVDSEVPYYKYVPDPVLENDHVTLYWDRSIITDRTIVANKPDIVVIDRLARLAMIVDVTIPHDGNLVKAEKEKQMKYLDLAHEVVDMWNVNSAVIVPIVVSANGLIAKSLDQHLLRLSLGSWIKGLIQKAVLLDTARIVRRFLSLEP

SEQ ID NO: 28340 - protein, 1202 aa, Sesamia nonagrioides
MLTRQAARRARSPPPDSSPSSASPPPVPSANVSAVTTPVAVVASSSSDEYFSPPTSPRPVRRQGKGRPPKSLGLRGHPAPSRVLAAGGCVQRMRWTQTMNENVMRAYYRATEGGTHLTAYRERMLSLFQALEPTVNVSAQRLSDQVRVIQRNHRLDDIALDRLRSEVLSNQITPTLTQTAAQASIIDAAPPRSNRVEEEDDRVETVSSQYNDRLRNALEDAFRDYRSTPTDLRPRLPRLPMHKKNRALVCALDSLLKNFFESSEDLIDTHSILYCAAVAACRLAKVKFPNCEEAARPKPAVPAWQRRIERRIDGTRVLIGKLYCFRDGNTRPRVMRFVRQAFSGTGISPREYINHLTERIDFLKQKVCAWASRIRRYKRRVDRYTQNRMFQSDERWVYRAWERPEQNEADVCRPDDATTSAFWRGIWSVSVCHTEGNWIQNVEQVCETIPEMDTILITPSDVAAAVRSLPNWKSPGPDGLHNFWLKWLSSSHTCLASQFQSSLESGSLPQFLTTGITHLLHKSGSTAEPKNYRPITCLPTVYKVLTSILKAKINKHLISNSIMSVSQNGCKSGSRGTKELLLIDMAISQQVRRSRKDLSTCWIDYKKAYDSVPHTWLMRVLELYKVNATLRTFLRSCMGQWKTVLRYPGSRRIQGNDEPVWIKRGIFQGDSLSPLWFCLALNPLSTLLEDSGLGYRLKRGGQVISHLLYMDDLKLFAPNKLHLMKLLNVTETFSSGIKMEFGVDKCAVMHVKRGQIMESEGITLPDSIHLRSLSSFESYKYLGMSEALGINDADMKQSLKERFFGRLKKVLKSLLSGGNKVRAFNGWVMPVLMYSFGILKWTQTELDALDRRVRTLLTANRMHHPRSSVMRLYIPRKCGGRGFLNAKTLHNREVCSLREHFFKTVVGMHHDVVTVDKGLTPLSMAKENWHKPIILTTDDRKLIWQSKELHGRFYRALHEPDVDFLASVSWLRFSDLFGETEGFVCAIMDEVILTNNYRRYIMKDGTIDVCRACHHPGESIRHIISGCSRLANSEYLHRHNQVARIIHQQLALKYKLVDSEVPYYKYVPDPVLENDHVTLYWDRSIITDRTIVANKPDIVVIDRLARLAMIVDVTIPHDGNLVKAEKEKQIKYLDLAHEIVDMWNVNSAVIVPIVVSANGLIAKSLDQHLLRLSLGSWIKGLIQKAVLLDTARIVRRFLSLEP

SEQ ID NO: 28341 - protein, 1202 aa, Sesamia nonagrioides
MLTRSATRKARPPPPDSLLSSASPPPVSSPIVNAVTTSAAAVASSSSDEYFSPPTSPTPVRRQGRGRPPKSLGLRGHPAPSRVPAVGGCVQRMRWSQTMNENVMRAYYGATEGGTNLTAYRERMLSLFQALEPTVNVSAQRLSDQVRVIQRNHRLDDTALDRLRSEVLSNQIAPTLIQTAALASIIDAVPPRSNRVEEEDDGVDTVSSQYNDRLRSTLEDAFREYRFTPTDLRPRLPRLPMHKKNRALVSALDSQLKNVFESSEDLIDTHSILFCGAVAACRLANIKFPNCDEANRPRPAVPAWQHRIERRIDGARVLIGKLYCFREGNTRPRVMRFVRQAFSGTGISPREYISHVTERIDFLKQKVCAWASRIRRYKRRVDRYTQNRMFQSDERWVYRAWERTEQNEADVCRPDDAATSAFWRSIWSVPVCHAEGDWIQDVEQVCEMIPEMDTILITPIDVATAVRSLPNWKSPGPDGLHNFWLKWLSSSHTCLASQFQSSLESGSLPQFLTTGITHLLHKSGSTAEPNNYRPITCSPTVYKVLTSILKAKINKHLDSNSIMSVSQNGCRSGSRGTKELLLIDMAISQQVRRARKDLSTCWIDYKKAYDSVPHTWLMRVLELYKVNATLRTFLRSCMGQWKTVLRYPGSRRIQGNDEPVWIKRGIFQGDSLSPLWFCLALNPLSTLLEDSGLGYRLRRGGQVISHLLYMDDLKLFAPNKLHLMKLLNVTETFSSGIKMEFGVDKCAVMHVKRGQIMESEGITLPDSIHLRSLSSVESYKYLGMSEALGINDADMKQSLKERFFGRLKKVLKSLLSGGNKVRAFNGWVMPVLMYSFGILKWTQTELDALDRRVRTLLTANRMHHPRSSVMRLYIPRKCGGRGFLNAKTLHNREVCSLREHFLKTVVGMHHDVVTVDKGLTPLSMAKENWHKPIILTTNDRKMIWQSKELHGRFYRALHEPDVDFLASVSWLRFSDLFGETEGFVCAIMDEVILTNNYRRYIMRDGTIDVCRACHHPGESIRHIISGCSRLANGEYLHRHNQVARIIHQQLALKYKLVDSEVPYYKYVPDPVLENDHATLYWDRSIITDRTIVANKPDIVVIDRLARLAMIVDVTIPHDGNLVKAEKEKQIKYLDLAHEVVDMWNVNSAVIVPIVVSANGLIAKSLDQHLLRLSLGSWIKGLIQKAVLLDTARIVRRFLSLEP

SEQ ID NO: 28342 - protein, 1201 aa, Sesamia nonagrioides
MLTRSATRKARPPPPDSLLSSVSPPPVSSPIVNAVTTSAAAVASSSSDEYFSPPTSPTPVRRQGRGRPPKSLGLRGHPAPSRVPAVGGCVQRMRWSQSMNENVMRAYYGATEGGTNLTAYRERMLSLFQALEPTVNVSAQRLSDQVRVIQRNHRLDDTVLDRLRSEVLSNQIVPTLTQTAALASIIDAVPPRSNRVEEVDDGVETVSSQYNDRLRSTLEDAFREYRSTPTDLRPRLPRLPMHKKNRALVSALDSQLKNIFESSEDLIDTHSILFCGAVAACRLANIKFPNCEANRPRPAVPAWQHRIECRIDGARVLIGKLYCFREGNTRPRVMRFVRQAFSGTGISPREYISHVTERIDFLKQKVCAWASRIRRYKRRVDRYTQNRMFQSDERWVYRAWERTEQNEADVCRPDDAATSAFWRSIWSVPVCHAEGDWIQDVEQVCEMIPEMDTILITPIDVATAVRSLPNWKSPGPDGLHNFWLKWLSSSHTCLASQFQSSLESGSLPQFLTTGITHLLHKSGSTAEPNNYRPITCLPTVYKVLTSILKAKINKHLDSNSIMSVSQNGCRSGSRGTKELLLIDMAISQQVRRSRKDLSTCWIDYKKAYDSVPHTWLMRVLELYKVNATLRTFLRSCMGQWKTVLRYPGSRRIQGNDEPVWIKRGIFQGDSLSPLWFCLALNPLSTLLEDSGLGYRLRRGGQVISHLLYMDDLKLFAPNKLHLMKLLNVTETFSSGIKMEFGVDKCAVMHVKRGQIMESEGITLPDSIHLRSLSSVESYKYLGMSEALGINDADMKQSLKERFFGRLKKVLKSLLSGGNKVRAFNGWVMPVLMYSFGILKWTQTELDALDRRVRTLLTANRMHHPRSSVMRLYIPRKCGGRGFLNAKTLHNREVCSLREHFLKTVVGMHHDVVTVDKGLTPLSMAKENWHKPIILTTDDRKIIWQSKELHGRFYRSLHEPDVDFLASVSWLRFSDLFGETEGFVCAIMDEVILTNNYRRYIMRDGTIDVCRACHHPGESIRHIISGCSRLANGEYLHRHNQVARIIHQQLALKYKLVDSEVPYYKNVPDPVLENDHATLYWDRSIITDRTIVANKPDIVVIDRLARLAMIVDVTIPHDGNLVKAEKEKQIKYLDLAHEVVDMWNVNSAVIVPIVVSANGLIAKSLDQHLLRLSLGSWIKGLIQKAVLLDTARIVRRFLSLEP

SEQ ID NO: 28343 - protein, 1199 aa, Mamestra configurata
MLTRAALQRARPPPPDPSLSSASPPPDIGSPLSPAVAVASSSSDEYFSPPTSPTPVRRQGRGRPPRGLGPRGQPAPSRVPATGGCVQRMRWTQSMNENVMRAYYGSTEGGTNLTAYRVRMLSLFQDLEPTVNVSAQRLSDQVRVIQRNHRLDDAALDRLRSEVLNNLIISTPTQTAVQAPVNGRITPRPNNVSDEVDDRVVTVSSQCNDRLRSALEDALREYRSTPTELRPRLPRLPMHKKNRALVCALDSLLQNIFESSESLVDTHSILYCGAVAACRIANVKFPGCDEAIRPKPAAPAWQRRIERRIDETRALIGKLYCFREGNTRPRVMRFVRRAFSGTEISPRDFTSRVTERIDFLKQKVCAWASRIRRYKRRVDRYSQNRMFQSDERWVYRAWERPEQSVTDVCRPDDVATSIFWRSIWSVPICHAEGGWMRDVERVCEAIPQMEKITITTLDVAKAVRPLPNWKSPGPDGLHNFWLKWYSSSHALLASQFQSSLDSGSLPQFLTTGVTHLLHKTGSPTEPKNYRPITCLSTVYKLLTSILRAKINEHIESNSIMSASQNGCRKGSRGTKELLLIDMAISQQVRRSRKDLSTCWIDYKKAYDSVPHTWLMKVLELYKIDATLRTFLESCMRQWKTVLRYPGCRPIQGSDEPVWIKRGIFQGDSLSPLWFCLALNPLSTLLEDSGLGYRLRRGGQAISHLLYMDDLKLFAPNNLRLMELLKVTETFSSAIRMEFGVDKCAVMHVKKGEIMESEGIQLSDSIQVRSLSSTETYKYLGMSEALGINGTDMKQSLRERFFGRLKKVLNSLLSGGNKVRAFNGWVMPVLMYTFGILKWTQTELDALDRRVRTLLTANRMHHPRSSVMRLYIPRKCGGRGFLNAKTLHNREMCSLREYFLKADVGMHRDVVAVDKGLTPLSMAKENWRTPVILTTDDRKEVWKGKELHGRFYRALHGSDVDFSASVAWLRFGDLFGETEGFVCAIMDEVILTNNYRRHIMKDGTVDMCRACHRPGESIRHIISGCSRLANGEYLHRHNQVARIIHQQLALKYKLVDSEVPYYKYVPDPVLENDHVTLYWDRSIITDRTIVANKPDIVVIDRLARRTMIIDVTIPHDENLVKAEKEKQIKYLDLAHEVVDMWNVDSAVIVPIVVTANGLMAKSFDDHLSKLALRSWVKGLIQKAVLLDTARIVRRFLSLEP

SEQ ID NO: 28344 - protein, 868 aa, Mamestra configurata
MRFVRRAFSGTGISPREYTFRVTERIDFLKQKVCAWANRIRRYKRRVDRYSQNRMFQSDERWVYRAWERPEQSVTDVYRPDDVATSTFWRSIWSVPICHAEGGWMRDVERVCEAIPQMEKITITTLDIAKAVRPLPNWKSPGPDGLHNFWLKWYSSSHALLASQFQSSLESGSLPQFLTTGITHLLHKTGSPAEPKNYRPITCLSTVYKLLTSILRAKINEHIESNSIMSASQNGCRKGSRGTKELLLIDMAISQQVRRSRKDLSTCWIDYKKAYDSVPHTWLMKVLELYKIDATLRTFLESCMRQWKTVLRYPGCRPIQGSDEPVWIKRGIFQGDSLSPLWFCLALNPLSTLLEDSGLGYRLRRGGQAISHLLYMDDLKLFAPNNLRLMELLKVTETFSSAIRMEFGVDKCAVMHVKKGEIMESEGIQLSDSIQVRSLSSTETYKYLGMSEALGINGTDMKQSLRERFFGRLKKVLNSLLSGGNKVRAFNGWVMPVLMYTFGILKWTQTELDALDRRVRTLLTANRMHHPRSSVMRLYIPRKCGGRGFLNAKTLHNREMCSLREYFLKADVGMHRDVVAVDKGLTPLSMAKENWRTPVILTTDDRKEVWKGKELHGRFYRALHGSDVDFSASVAWLRFGDLFGETEGFVCAIMDEVILTNNYRRHIMKDGTVDMCRACHRPGESIRHIISGCSRLANGEYLHRHNQVARIIHQQLALKYNLVDSEVPYYKYVPDPVLENDHVTLYWDRSIITDRTIVANKPDIVVIDRLARRTMIIDVTIPHDENLVKAEKEKRIKYLDLAHEVVDMWNVDLAVIVPIAVTANGLMAKSFDDHLSKLALRGWIKGLIQKAVLLDTARIVRRFLSLEP

SEQ ID NO: 28345 - protein, 931 aa, Noctua janthe
MTSKLYIIFCFFILIIIIINDVAIRPKPAVPTWQRRIECRIDEARVLIGKLHCFREGNTRPRVMRFVRRAFSGTGISPQEYMSRVTERIDFLKQKVYAWANRIRRYKRRVDRYSQNRIFQSDERWVYRAWERPEQNMTDVCRPDDAATSSFWRSIWSVPVCHTEADWMRDVERACEPIPEMEPILITSIDIARAVRPLPNWKSPGPDGLHNFWLKWLSSSHTCLASQFQSSLESGSLPQFLTTGVTHLLHKSGSPAEPKNYRPITCLSTVYKLLTSILRVKINTHIDKNFIMSASQNGCRNRSRGTKELLLIDMAISQQVRRSRKDLSTCWIDYKKAYDSVPHTWLMRVLELYKIDATLRAFLESCMGQWRTVLRYPGCRQIQGNDEPVWIKRGIFQGDSLSPLWFCLALNPLSTLLEDSGLGYRLRRGGQVISHLLYMDDLKLFAPNKLRLMELLKVTETFSNAIRMEFGVDKCAVMYVKRGEIMESEGIQLSDSIHLRSLSSSETYKYLGMSESLGINVTDMKQSLRERFFGRLNKVLNSLLSGGNKVRAFNGWVMPVLMYSFGVLKWTQTELDALDRRVRTLLTANRMHHPRSSVMRLYIPRKCGGRGFLNAKTLHNREICSLREYFLKTEVGMHRDVVAVDKGLTPLSMAKENWRKPVVLTTDDRKEVWQGKELHGRFYRALHGPDVDFLASVSWLRFGDLFGETEGFVCAIMDEVMLTNNYRKYIMKDGTVDVCRACHRPGESIRHIISGCSRLANGEYLHRHNQVARIIHQQLALKYKLVESEVPYYKYVPDPVLEKDHVTLYWDRSIITDRTIVANKPDIVVIDRLARRVMIVDVTIPHDENLVKSEKEKQIKYLDLAHEVVGMWNVNSAIIVPIVVTANGLIAKSLDDHLSRLSLGGWIKGLIQKAVLLDTARIVRRFLSLEP

SEQ ID NO: 28346 - protein, 1111 aa, Noctua janthe
MRWTQTINENVMRAYYGSTEGGTNLTAYRVRMLSLFQVLEPIVNVSAQRLSDQVRVIQRNHMLDDAALDRLRSEVLSNRIVLAPAQTAVQPSAIDATPPRSNPAVVEEDDRVAMVSSQCNDRLRSALEDALREYRSTPTKLRPRLPRLPMHNKNRALVCALDSQLKNIFESSENLVDTHSILYCGAVAACRLANVKFPNYDVAIRPKPAVPTWQRRIEYRIDEARVLIGKLHCFREGNTRPRVMRFVRRAFSGTGISPQEYMSRVTERIDFLKQKVYAWANRIRRYKRRVDRYSQNRIFQNDERWVYRAWERPEQNMTDVCRPDDAATSSFWRSIWSVPVCHTEADWMRDVERACEPIPEMEPILITPIDIARAVRPLPNWKSPGPDGLHNFWLKWLSSSHTCLASQFQSSLESGSLPQFLTTGVTHLLHKSGSPAEPKNYRPITCLSTVYKLLTSILRVKINTHIDKNFIMSASQNGCRNGSRGTKELLLIDMAISQQVRRSRKDLSTCWIDYKKAYDSVPHTWLMRVLELYKINATLRAFLESCMGQWRTVLRYPGCRQIQGNDEPVWIKRGIFQGDSLSPLWFCLALNPLSTLLEDSGLGYRLRRGGQVISHLLYMDDLKLFAPNKLRLMELLKVTETFSNAIRMEFGVDQCAVMYVKRGEIMESEGIQLSDSIHLRSLSSSESYKYLGMSESLGINVTDMKQSLRERFFGRLNKVLNSLLSGGNKVRAFNGWVMPVLMYSFGVLKCTQTELDALDRRVRTLLTANRMHHPRSSVMRLYIPRKCGGRGFLNAKTLHNREICSLREYFLKTEMGMHRDVVAVDKGLTPLSMAKENWRKPVVLTTDDRKEVWQGKELHGRFYRALHGPDVDFLASVSWLRFGDLFGETEGFVCAIMDEVMLTNNYRKYIMKDGTVDVCRACHRPGESIRHIISGCSRLANGEYLHRHNQVARIIHQQLALKYKLVESEVPYYKYVPDPVLEEDHVTLYWDRSIITDRTIVANKPDIVVIDRLARRVMIVDVTIPHDENLVKAEKEKQIKYLDLAHEVVDMWNVNSAIIVPIVVTANGLIAKSLDDHLSRLSLGGWIKGLIQKAVLLDTARIVRRFLSLEP

SEQ ID NO: 28347 - protein, 1200 aa, Mythimna ferrago
MLTRTAARRARHPPPDSSLSSTSPPPDPGSSVSPVAAAASSSSDEYFSPPTSPTPVRRPGRGRPPNGLGPRGQPAPSRVPAAGGCVQRMKWTQSINENVMRAYYGATEGGTNLTAYRVRMLSLFQELEPSVNVTTQRLSDQVRVIQRNHRLDDAALDRLRSEVLSNRIISTPTQTQTAAPRATDAIMPRSNHGDDEADDRVVTVSSQCNDRLRSALEDALREYRSTPIARRPRLPRLPMHKKNRALVCALDSLLENVFESSVNLVDTHSILYCGAIAACRLANVKLLSCDEATRPKPAVPAWQYRIERRIDGARALIGKLYCFREGNTRPRVMRFVRRAFSGTGISPREYSSHVTERIDFLKQKVCAWASRIRRYKRRVDRYSQNRMFQSDERWVYRAWERPEQNVTDVLRPDDAATNAFWRSIWSVPVCHTEGGWMRDVERVCEAIPEMEKVIISSTDVARAVRPLPNWKSPGPDGLQNFWLKWYSSSHALLASQFQSSLESGSLPQFLTTGVTHLLHKTGSTAEPKNYRPITCLSTVYKLLTSILRTKINKHIENNSIMSASQNGCRNGSRGTKELLLIDMAISQQVRRSRKDLSTCWIDYKKAYDSVPHTWLMRVMELYKIDATLRTFLESCMGGWNTVLRYPGCRTIRGDDEPIWIKRGIFQGDSLSPLWFCLALNPLSTLLEDSGLGYRLRRGGQVLSHLLYMDDLKLIAPNKLRLMELLKVTENFSSAIRMEFGVDKCAVMHVKRGEIMESEGVQLSDSIHLRSLSSTETYKYLGMSEALGINVTDMKQSLKERFFGRLKKVLNSLLSGGNKVRAFNGWVMPVLMYSFGILKWTQTELDALDRRVRTLLTANRMHHPRSSVMRLYIPRKCGGRGFLNAKTLHNREVCSLREYFLKTDVGMHRDVVAVDKGLTPLSMAKENWRKPVVLTTDDRKEVWKGKELHGRFFRALHEPDVDFSASVAWLRFSNLFGETEGFVCAIMDEVILTNNYRRHIMKDGTIDVCRACHRPGESIRHIISGCSRLANGEYLHRHNQVARILHQQLALKYNLVDSEVPYYRYVPDPVLENDHVTLYWDRSIITDRTIVANKPDIVVIDRLARRAMIVDVTIPHDENLVKAEKEKQIKYLDLAHEVVDMWNVDSAIIVPIVVTANGLIAKSFDDHLSKLSLHGWIKGLIQKAVLLDTARIVRRFLSLGP

SEQ ID NO: 28348 - protein, 1202 aa, Noctua pronuba
MLTRAAARRARLSPPDSSLSSASPLPESSPIVSAVTPAVAVASSSSDEYFSPPTSPTPVRRQGRGRPPTRLGLRGHPAPSRVPATGGCVQRMRWTHQINENVMRAYYGSTEGGTNLTAYRVRMLSLFQVLEPTVNVSAQRLSDQVRVIQRNHMLDDTVLDRLRSEVLSNRIVLTPSQTVVQTTAIDVSPPRSNPAVVEEDDRVATVSSQCNDRLRSALEDALREYRYTPTELRPRLPRLPMHKKNRALVCALDSQLKNLFESSEDLVDTHSILYCGAVAACRLAKLKFTNSDAATRPKPAVPAWQCRIERRIDGARVLIGKLHCFREGNTRPRVMRFVRRAFSGTGISPQEYMSRVTERIDFLKQKVYAWANRIRRYKRRVDRYSQNRMFQSDERWVYRAWERPEQNMTDVCRPDDATTSSFWSSIWSVPVCHTEGDWMRAVERVCEPIPEMEPILITSLDVARSVRPLPNWKSPGPDGLHNFWLKWLSSSHTCLASQFQSSLESGALPQFLTTGVTHLLHKSGNPAEPKNYRPITCLSTVYKLLTSILRAKINTHIDKNSIMSASQNGCRNGSRGTKELLLIDMAISQQVRRSRKDLSTCWIDYKKAYDSVPHTWLMRVLELYKIDATLRTFLESCMGQWRTVLRYPGCRQIQGNDEPVWIKRGIFQGDSLSPLWFCLALNPLSTLLEDSGLGYRLRRGGQVISHLLYMDDLKLFAPNKLRLMELLKVTETFSSAIRMEFGVDKCAVMYVKRGEIMESEGIQLSDSIHLRSLSSSESYKYLGMSEALGINVTDMKQSLRERFFGRLKKVLNSLLSGGNKVRAFNGWVMPVLMYSFGILKWTQTELDALDRRVRTLLTANRMHHPRSSVMRLYIPRKCGGRGFLNAKTLHNRELCSLREYFLKAEVGMHRDVVAVDKGLTPLSMAKENWRKPVVLTTDDRKEVWQGKELHGRFYRALHGPDVDFLASVSWLRFGDLFGETEGFVCAIMDEVMLTNNYRKYIMKDGTVDVCRACHRPGESIRHIISGCSRLANGEYLHRHNQVARIIHQQLALKYKLVESEVPYYKYVPDPVLEKDHVTLYWDRSIITDRTIVANKPDIVVIDRSARRVMIVDVTIPHDENLVKAEKEKQIKYLDLAHEVVDMWNVNSAIIVPIVVTANGLMAKSLDDHLSRLSLGGWIKGLIQKAVLLDTARIVRRFLSLEP

SEQ ID NO: 28349 - protein, 962 aa, Ochropleura plecta
MHKKNRALVCALDSQLKNLFESSEDLVDTHSILYCGAVAVCRLANVKFPNCDVATRPKPSVPAWQCRIERRIDEARALIGKLYCFREGNTRPRVMRFVRRAFSGTGISPQEYMSRTTERIDFLKQKVYAWANRIQRYKRRVDRYSQNRMFRSDERWVYRAWERPEQSVTDVCRPDDVATSSFWHSIWSVRVCHTEAGWMRDVERVCETIPEMEPILITSLDIASAVRPLPNWKSPGPDGLHNFWLKWLSSSHTRLASQFQSCLESGSLPQFLTTGVTHLLYKSGSPAEPKNYRPITCLSTVYKLLTSILRAKINSHIVKNSIISASQNGCRNGSRGTKELLLIDMAISQQVRRSRKDLSTCWIDYKKAYDSVPHTWLKRVLELYKIDTTLRTFLESCMGQWRTVLRYPGCRQIQGNDEPVWIKRGIFQGDSLSPLWFCLALNPLSTLLEDSGLGYRLRRGGQVISHLFYMDDLKLFAPNKLRLMELLKVTETFSNAIRMEFGVDKCAVMYVKRGEIMESEGIHLSDSIHLRSLSSSESYKYLGMSEALGINVADMKQLSRERFFGRLKKVLKSLLSGGNKVRAFNSWVMPVLMYSFGILKWTQTELDALDRRVRTLLTANRMHHPRSSVMRLYIPRKCGGRGFLNAKTLHNREVCSLREYFLKTDVGMHRDVVAVDKGLTPLSMAKENWRKPVVLTTDYRKEVWQGKELHGRFYKALHGPDVDFLASVSWLRFGDLFGETEGFVCAIMDEVMLTNNYRKYIMKDGTVDVCRACHRPGESIRHIISGCSRLANGEYLHRHNQVARIIHQQLALKYNLVESEVPYYKYVPDPVLEKDHVTLYWDRSIITDRTIVANKPDIVVIDRSARRVMIIDVTIPHDENLVKAEKEKQLKYLDLAHEVVDMWNVNSAIIVPIVITANGLIAKSLDEHLSKLSLGRWIKGLIQKAVLLNTARIVRRFLSLEP

SEQ ID NO: 28350 - protein, 1206 aa, Ochropleura plecta
MLTRRRAQEQQTLPPSPGSSLSPASQPPGRATRVSAVSQVAAVASSSSDEFFSPPSSPPPPTRQRRGRGRPPAGLGSRGQQVPIRVPAAGGNVSRMRWTSFINENVMRAYYGSTEGGTNLTAYRVRMLSLFQDLEPTINVSAQRLSDQVRVIQRNHLLDDAALDRLRSEVLSNRVILTTPQTAVQASAIDVTQPRSNPAVVEEDDRVATVSSQCNERLRSALEDALRDYRSTPTELRPRLPRLPMHKKNRALVCALDSQLKNLFESSENLVDTHSILYCGAVAVCRVANVKFQNSDVATRPKPSVPVWQCRIERRIDEARVLIGKLYCFREGNTRPRVMRFVRRAFSGTGISPQEYLSCTTERIDFLKQKVYAWANRIRRYKRRVDRYSQNRMFRSDERWVYRAWERPEQSVTDVCRPDDVATSSFWHSIWSVPVCHTEADWMRDVERVCETIPEMEPILITSIDIASAVRPLPNWKSPGPDGLHNFWLKWLSSSHTRLASQFQSCLESGSLPQFLTTGITHLLYKSGSPAEPKNYRPITCLSTVYKLLTSILRAKINSHIDKNSIMSASQNGCRNGSRGTKELLLIDMAISQQVRRSRKDLSTCWIDYKKAYDSVPHTWLKRVLELYKIDATLRAFLESCMGQWRTVLRYPGCRQIQGNDEPVWIKRGIFQGDSLSPLWFCLALNPLSTLLEDSGLGYRLRRGGKVISHLLYMDDLKLFAPNKLRLMELLKVTETFSNAIRMEFGVDKCAVMYVKRGEIMESEGIQLSDSIHLRSLSSSESYKYLGMSEALGINVADMKQLLRERFFGRLKKVLKSLLSGGNKVRAFNSWVMPVLMYSFGILKWTQTELDALDRRVRTLLTGNRMHHPRSSVMRLYIPRKCGGRGFLNAKTLHNREVCSLREYFLKTDVGMHRDVVAVDKGLTPLSMAKENWRKPVVLTTNDRKVVWQGKELHGRFYKALHGPDVDFLASVSWLRFGDLFGETEGFVCAIMDEVMLTNNYRKYIMKDGTVDVCRACHRPGESIRHIISGCSRLANSEYLHRHNQVARVIHQQLALKYNLVESEVPYYKYVPDPVLEKDHVTLYWDRSIITDRTIVANKPDIVVIDRSARRVMIIDVTIPHDENLVKAEKEKQLKYLDLAHEVVDMWNVNSAIIVPIVITANGLIAKSLDEHLSKLSLGGWIKGLIQKAVLLNTARIVRRFLSLEP

SEQ ID NO: 28351 - protein, 1206 aa, Ochropleura plecta
MLTRRRAQEQQTLPPSPGSSLSSASQPPGRATRVSAVSPVAAVASSSSDEFFSPPSSPPPPTRQRRGRGRPPAGLGSRGQQVPIRVPAAGGNVSRMRWTSFINENVMRAYYGSTEGGTNLTAYRVRMLSLFQDLEPTINVSAQRLSDQVRVIQRNHLLDDAALDRLRSEVLGNRAILTTPQTAVQASAIDMTQPRSNPAVVEEDDRVATVSSQCNERLRSALEDALRDYRSTPTELRPRLPRLPMHKKNRALVCALDSQLKNLFESSENLVDTHSILYCGAVAVCRVANVKFQNSDVATRPKPSVPVWQCRIERRIDEARVLIGKLYCFREGNTRPRVMRFVRRAFSGTGISPQEYLSCTTERIDFLKQKVYAWTNRIRRYKRRVDRYSQNRMFRSDERWVYRAWERPEQSVTDVCRPDDVATSSFWHSIWSVPVCHTEADWMRDVERVCETIPEMEPILITSIDIASAVRPLPNWKSPGPDGLHNFWLKWLSSSHTHLASQFQSCLESGSLPQFLTTGITHLLYKSGSPAEPKNYRPITCLSTVYKLLTSILRAKINSHIDKNSIMSASQNGCRNGSRGTKELLLIDMAISQQVRRSRKDLSTCWIDYKKAYDSVPHTWLKRVLELYKIDATLRAFLESCMGQWRTVLRYPGCRQIQGNDEPVWIKRGIFQGDSLSPLWFCLALNPLSTLLEDSGLGYRLRRGGQVISHLLYMDDLKLFAPNKLRLMELLKVTETFSNAIRMEFGVDKCAVMYVKRGEIMESEGIQLSDSIHLRSLSSSESYKYLGMSEALGINVADMKQLLRERFFGRLKKVLKSLLSGGNKVRAFNSWVMPVLMYSFGILKWTQTELDALDRRVRTLLTGNRMHHPRSSVMRLYIPRKCGGRGFLNAKTLHNREVCSLREYFLKTDVGMHRDVVAVDKGLTPLSMAKENWRKPVVLTTDDRKVVWQGKELHGRFYKALHGPDVDFLASVSWLRFGDLFGETEGFVCAIMDEVMLTNNYRKYIMKDGTVDVCRACHRPGESIRHIISGCSRLANSEYLHRHNQVARVIHQQLALKYNLVESEVPYYKYVPDPVLEKDHVTLYWDRSIITDRTIVANKPDIVVIDRSARRVMIIDVTIPHDENLVKAEKEKQLKYLDLAHEVVDMWNVNSAIIVPIVVTANGLIAKSLDEHLSKLSLGGWIKGLIQKAVLLDTARIVRRFLSLEP

SEQ ID NO: 28352 - protein, 1199 aa, Hecatera dysodea
MLTRAATLRARHPPPGSPLSSASPPPDIESQVSPAVAVASSSSDEYFSPPTSPPPVRWQGRGRPPRGLGPRGQPAPSRVPATGGCVQRMRWTQSMNENVMRAYYGSTEGGINLTAYRVRMLSLFQDLEPTVNVSAQRLSDQVRVIQRSHRLDEAALDRLRSEVLNNLIISTPTQTAVQAPGSGAIIPRPIHVCDEVVDRVVTVSSQCNDRLRSALEDALREYRSTPTELRPRLPRLPMHKKNRALVCALDSLLKNIFESSENLVDTHSILYCGAVAACRVANVKFSNSDGATRPKNAVPAWQCRIERRIDEARVLIGKLYCFREGNTRPRVMRFVRRAFLGTEISPQEYMSRVTERIDFLKQKVCAWANRIRRYKRRVDRYSQNRMFQSDERWVYRAWERPEQSVTDVCRPDDVTTNTFWRSIWSVPVCHAEGGWMRDVERVCEAIPQMEKITITTVDIATAVRPLPNWKSPGPDGLHNFWLKWYSSSHALLASQFQSSLDSGSLPQFLTTGITHLLHKTGSPAEPKNYRPITCLSTVYKLLTSILRVKINEHIESNSIMSYSQNGCRKGSRGTKELLLIDMAISQQVRRSRKDLSTCWIDYKKAYDSVPHTWLLKVLELYKVDATLRTFLESCMRQWKTVLRYPGCRPIQGNEEPVWIKRGIFQGDSLSPLWFCLALNPLSTLLEDSGLGYRLRRGGQTISHLLYMDDLKLFAPNNLRLMELLKVTETFSSAIRMEFGVDKCAVMHVKKGEIMESEGIQLSDSIQVRSLSSTETYKYLGMSEALGINGADMKQSLKERFFGRLKKVLNSLLSGGNKVRAFNGWVMPVLMYSFGILKWTQTELDALDRRVRTLLTANRMHHPRSSVMRLYIPRKCGGRGFLNAKTLHNREMCSLREYFLKADVGMHRDVVAVDKGFTPLSMAKENWRKPVIPTTDDRREVWRGKELHGRFYRALYGSDVDFSASVAWLRFGDLFGETEGFVCAIMDEVILTNNYRRHIMKDGTVDVCRACHRPGESIRHIISGCSRLANGEYLHRHNQVARIIHQQLALKYKLVDSEVPYYKYVPDPVLENDHATLYWDRSIITDRTIIANKPDIVVIDRLARRTMIIDVTIPHDENLVKAEKEKQIKYLDLAHEVVDMWNVDSAVIVPIVVTANGLMAKSFDEHLSKLALHGWLKGLIQKAVLLDTARIVRRFLSLEP

SEQ ID NO: 28353 - protein, 963 aa, Hecatera dysodea
MHKKNRALVCALDSLLKNIFESSENLVDTHSILYCGAVAACRVANVKFSNSDGATRPKNAAPAWQCRIERRIDEARVLIGKLYCFREGNTRPRVMRFVRRAFLGTEISPQEYMSRVTERIDFLKQKVCAWANRIRRYKRRVDRYSQNRMFQSDERWVYRAWERPEQSVTDVCRPDDVTTNTFWRSIWSVPVCHAEGGWMRDVERVCEAIPQMEKITIITTVDIATAVRPLPNWKSPGPDGLHNFWLKWYSSSHALLASQFQSSLDSGSLPQFLTTGITHLLHKTGSPTEPKNYRPITCLSTVYKLLTSILRVKINEHIESNSIMSYSQNGCRKGSRGTKELLLIDMAISQQVRRSRKDLSTCWIDYKKAYDSVPHTWLLKVLELYKVDATLRTFLESCMRQWKTVLRYPGCRPIQGNEEPVWIKRGIFQGDSLSPLWFCLALNPLSTLLEDSGLGYRLRRGGQTISHLLYMDDLKLFAPNNLRLMELLKVTETFSSAIRMEFGVDKCAVMHVKKGEIMESEGIQLSDSIQVRSLSSTETFKYLGMSEALGINGADMKQSLKERFFGRLKKVLNSLLSGGNKVRAFNGWVMPVLMYSFGILKWTQTELDALDRRVRTLLTANRMHHPRSSVMRLYIPRKCGGRGFLNAKTLHNREMCSLREYFLKADVGMHRDVVAVDKGFTPLSMAKENWRKPVIPTTDDRREVWRGKELHGRFYRALYGSDVDFSASVAWLRFGDLFGETEGFVCAIMDEVILTNNYRRHIMKDGTVDVCRACHRPGESIRHIISGCSRLANGEYLHRHNQVARIIHQQLALKYKLVDSEVPYYKYVPDPVLENDHATLYWDRSIITDRTIIANKPDIVVIDRLARRTMIIDVTIPHDENLVKAEKEKQIKYLDLAHEVVDMWNMDSAVIVPIVVTANGLMAKSFDEHLSKLALHGWLKGLIQKAVLLDTARIVRRFLSLEP

SEQ ID NO: 28354 - protein, 1199 aa, Hecatera dysodea
MLTRAATLRARHPPPGSPLSSASPPSDIESQVSPAAAVASSSSDEYFSPPTSPPPVRRQGRGRPPRGLGPRGQPAPSRVPATGGCVQRMRWTQSMNENVMRAYYGSTEGGINLTAYRVRMLSLFQDLEPTVNVSAQRLSDQVRVIQRSHRLDEAALDRLRSEVLNNLIISTPTQTAVQAPGSGAIIPRPIHVCDEVVDRVVTVSSQCNDRLRSALEDALREYRSTPTELRPRLPRLPMHKKNRALVCALDSLLKNIFESSENLVDTHSILYCGAVAACRVANVKFSNSDGATRPKNAAPAWQCRVERRIDEARVLIGKLYCFREGNTRPRVMRFVRRAFLGTEISPQEYMSRVTERIDFLKQKVCAWANRIRRYKRRVDRYSQNRMFQSDERWVYRAWERPEQSVTDVCRPDDVTTNTFWRSIWSVPVCHAEGGWMRDVERVCEAIPQMEKITITTVDIATAVRPLPNWKSPGPDGLHNFWLKWYSSSHALLASQFQSSLDSGSLPQFLTTGITHLLHKTGSPAEPKNYRPITCLSTVYKLLTSILRVKINEHIESNSIMSYSQNGCRKGSRGTKELLLIDMAISQQVRRSRKDLSTCWIDYKKAYDSVPHTWLLKVLELYKVDATLRTFLESCMRQWKTVLRYPGCRPIQGNEEPVWIKRGIFQGDSLSPLWFCLALNPLSTLLEDSGLGYRLRRGGQTISHLLYMDDLKLFAPNNLRLMELLKVTETFSSAIRMEFGVDKCAVMHVKKGEIMESEGIQLSDSIQVRSLSSTETYKYLGMSEALGINGADMKQSLKERFFGRLKKVLNSLLSGGNKVRAFNGWVMPVLMYSFGILKWTQTELDALDRRVRTLLTANRMHHPRSSVMRLYIPRKCGGRGFLNAKTLHNREMCSLREYFLKADVGMHRDVVAVDKGFTPLSMAKENWRKPVIPTTDDRREVWRGKELHGRFYRALHGSDVDFSASVAWLRFGDLFGETEGFVCAIMDEVILTNNYRRHIMKDGTVDVCRACHRPGESIRHIISGCSRLANGEYLHRHNQVARIIHQQLALKYKLVDSEVPYYKYVPDPVLENDHATLYWDRSIITDRTIIANKPDIVVIDRLARRTMIIDVTIPHDENLVKAEKEKQIKYLDLAHEVVDMWNVDSAVIVPIVVTANGLMAKSFDEHLSKLALHGWLKGLIQKAVLLDTARIVRRFLSLEP

SEQ ID NO: 28355 - protein, 1202 aa, Mythimna impura
MIMLTRAATRRARPSPLGSSLSSASPPPVLGSPVSPTAAVASSSSDEYFSPPTSPTPVRRPRRGRPPKSLGPRGQPAPSRVPATGGCVQRMKWTQSMNENVMRAYYGSTEGGTNLTAYRVRMLSLFQELEPTVNVTAQRLSDQVRVIQRNHRLDGAALDRLRSEVLSNRIISTPSQTQTEAPQATDAILPRSNHIDDEADDRVVTVSSQCNDRLRSALEDVLREYRSTPIALRPRLPRLPMHKKNRALVCALDSLLENVFESSVNLADTHSILYCGAIAACRLANVKLPSCDGATRPKPAAPAWQCRIERRIDEARALIGKLYCFREGNTRPRVMRYVRRAFSGTEISPREYLSRVTERIDFLKQKVCAWANRIRRYKRRVDRYSQNRMFQSDERWVYRAWERPEQNVTDVTHPDAVATNTFWRNIWSVPVCHTEDGWMREVERVCEAIPEMEKIVISPIDVARAVRPLPNWKSPGPDGLQNFWLKWYSSSHALLASQFQSSLESGSLPQFLTTGVTHLLHKTGSTAEPKNYRPITCLSTVYKLLTSILRTKINKHIDSNSIMSASQNGCMNGSRGTKELLLIDMAISQQVRRSRKDLSTCWIDYKKAYDSVPHTWLMRVLELYKIDATLRTFLESCMGQWNTVLRYPGCRSIRRDDEPIWIKRGIFQGDSLSPLWFCLPLNPLSTLLEESGLGYRLRRGGQVLSHLLYMDDLKLIAPNKLRLMELLKVTETFSSAIRMEFGVDKCAVMHVKRGEIMESEGIQLSDSIHFRSLSSSETYKYLGMSEALGINVADMKQSLKERFFGRLKKVLNSLLSGGNKVRAFNGWVMPVLMYSFGILKWTQTELDAVDRPVRTLLTANRMHHPRSSVMRLYIPRKCGGRGFLNAKTLHNREVCSLREYFHKTDVGMHRDVVAVDKGLTPLSMAKENWRKPVVLTTDDRKEVWKSKELHGRFYRALYESDIDFAASVAWLRFSNLFGETEGFICAIMDEVILTNNYRRYIMKDGTVDVCRACHRPGESIRHIISGCSRLANGEYLHRHNQVARIIHQQLALKYNLVDYEVPYYRYVPDPVLENDHVTLYWDRSIITDRTIVANKPDIVVIDRLARRVMIVDVTIPHDENLVKAEKEKQIKYLDLAHEVVDMWNVDSAVIVPIVVTANGLIAKSFDDHLSKLSLRGWIKGLIQKAVLLDTARIVRRFLSLEP

SEQ ID NO: 28356 - protein, 1199 aa, Phlogophora meticulosa
MITRAATRRARPPSPDSPLSSASPPPDLGSPVTPAVAAASSSSDEYFSPPTSPTPVRRQGRGRPPKSLGSRGQPAPSQVPATGGCVQRMRWTQSMNENVMRAYYGSTEGGTNLTAYRVRMLSLFQGFEPTVNVSAQRLSDQVRVIQRNHRLDDAALDRLRSEMLSNHIVLTSTQTAVQAPAFNAILPRSNHVSNEADDRVDTVCSRYNDRLRSALEDALREYRSTPTELRPRLPRLPMHRKNRALVCALDSLLKNFFESSGDLVDTHSILYCAAVAACRLANVKFPKNDLAIRPQPAVPAWQSRIERRIDGARVLIGKLYCFREGNTRPRVMRFVKRAFSGTGISPREYMSRIVERIDFLKQKVCAWANRIRRYKRRVDRYSQNRMFQSDERWVYRAWERPEQDVAGEHRPDDVATNAFWRSIWSVPAHHVEAHWMSDYESVCETIPEMEKIIITPEDMATAVRPVPNWKSPGPDGLHNFWLKWLSSSHTRLASQFQSCLESGSLPQFLTTGITHLLYKSGSTTEPKNYRPITCLSTVYKLLTSILRAKITEHIVGNSIMSASQNGCRNGSRGTKELLLIDMAISQQVRRSRKDLSTCWIDYKKAYDSVPHAWLTRVLELYKIDATLRTFLASCMGQWKTVLRYPGCRQIQGNAEPIWIKRGIFQGDSLSPLWFCLALNPLSTLLEDSGLGYRLKRGGQVISHLLYMDDLKLFAPNNLRLMELLKITESFSSAIRMEFGVDKCAVMHVKRGEIVESEGIQLSDSIHLRSLSSSENYKYLGMSEALGINATDMKQSLKERFFGRLKKVLNCLLSGGNKVRAFNGWVMPVLMYSFGILKWTQTELDALDRRVRTLLTANRMHHPRSSVMRLYIPRKCGGRGFLNAKTLHNREVCNLRDYFLKTEVGMHRDVVAVDKGLTPLSMAKENWRKPVVLTTDDRKQVWQSKELHGRFYRALHGPDVDFLASVSWLRFGDLFGETEGFVCAIMDEVILTNNYRKHIMKDGTVDMCRACHRPGESIRHIISGCSRLANGEYLHRHNQVARIIHQQLALRYKLVESEVPYYKYVPDPVLEDDHVTLYWDRSIITDRTIVANKPDIVVIDRLARRAMIVDVTIPHDENLVKAEKEKQIKYLDLAHEVVDMWNVDSAVIVPIVVTANGLLAKSLDDHLSRLSLHGWIKGLIQKAVLLDTARIVRRFLSLQP

SEQ ID NO: 28357 - protein, 1199 aa, Phlogophora meticulosa
MLTRAAKRRARPPSPDSPLSSASPPPDLGSPVTPTVAAASSSSDEYFSPPTSPTPVRRQGRGRPPKSLGSRGQPAPSQVPATGGCVQRMRWTQSMNENVMRAYYGSTEGGTNLTAYRARMLSLFQVLEPTVNVSAQRLSDQVRVIQRNHRLDDTALDRLRSEVLNNHIVLTSTQTAVQASIINATPSPSNHVSEEADDRVVTVSSQCNEKLRSALEDALREYRSTPTELRPRLPRLPMHKKNRALVCNLDSLLKELFESSGDLVDTHSILYCAAVAACRLANVKFPNNDVAIRPKPAVPAWQSRIERRIDGARVLIGKLYCFREGNTRPRVMRFVRRAFAGTGISPREYMSRIVERIDFLKQKVYAWANRIRRYKRRVDRYSQNRMFQSDERWVYRAWERPEQDVADVRRPDDTTTNTFWRNIWSVPVCHTEAHWIRDVERVCETITEMEKIIITPLDVATAVRPLPNWKAPGPDGLHNFWLKWLGSSHTRLASQFQSCLESGSLPQFLTTGITHLLYKSGSTTEPKNYRPITCLSTVYKLLTSILRAKIAEHIVGNSIMSASQNGCRNGSRGTKELLLIDMAISQQVRRSHKDLSTCWIDYKKAYDSVPHAWLMRVLELYKIDATLRTFLESCMGQWRTVLRYPGCRQIQGNDEPIWIKRGIFQGDSLSPLWFCLALNPLSTLLEDSGLGYRLRRGGQVISHLLYMDDLKLFASNNLQLMELLKITESFSSTIRMEFGVDKCAVMHVKRGEIVESEGIQLPDSIQLRSLSSSDNYKYLGMSEALGINVTDMKQSLKERFFGRLKKVLNSLLSGGNKVRAFNGWVMPVLMYSFGILKWTQTELDALDRRVRTLLTANRMHHPRSSVMRLYIPRKCGGRGFLNAKTLYNREVCNLRDYFLKTEVGMHRDVVAVDKGLTPLSMAKENWRKPVVLTTDDRKQVWQSKELHGRFYRALHGPDVDFIASVSWLRFGDLFGETEGFVCAIMDEVILTNNYRKHIMKDGTVDMCRACHRPGESIRHIISGCSRLANGEYLHRHNQVARIIHQQLALRYKLVESEVPYYKYVPDPVLEDDHVTLYWDRSIITDRTIVANKPDIVVIDRLARRAMIVDVTIPHDENLVKAEKEKQIKYLDLAHEVVDMWNVDSAVIVPIVVTANGLLAKSLDDHLSRLSLHGWIKGLIQKAVLLDTARIVRRFLSLQP

SEQ ID NO: 28358 - protein, 962 aa, Xestia xanthographa
MHKTNRALVCALDSQLKNIFESSENLVDTHSILFCGAVAACRLANVKFPNCDVANRPKPAVPAWQRRIERRIGGARVLIGKLYCFREGNTRPRVMRFVRRAFSGTEISPQEYMSRVTERIDFLKQKVYAWANRIRRYKRRVDRYSQNRMFQSDERWVYRAWERPEQNMTDVCRPDDAATSSFWRSIWSVPVCHTEADWMRDVERVCEPIPEMEPIFITPLDVARAVRPLPNWKSPGPDGLHNFWLKWFSSSHTCLASQFQSSLESGSLPQFLTTGVTHLLHKSGSPAEPKNYRPITCLSTIYKLLTSILRVKINTHIDKNSIMSASQNGCRNGSRGTKELLLIDMAISQQVRRSRKDLSTCWIDYKKAYDSVPHTWLMRVLELYKIDTTLRTFLESCMGQWRTVLRYPGCRQIQGSDDPVWIKRGIFQGDSLSPLWFCLALNPLSTLLENSGLGCRLRKDGQVISHLLYMDDLKLFASNKLRLMELLKVTETFSNAIRMEFGVDKCAVMYVKRGEIMESEGLQLSDSIQLRSLSSSETYKYLGMSEALGINITDMKQSLKERFFSRLRKVLNSLLSGGNKVRAFNGWVMPVLMYSFGILKWTQTELDALDRRVRTLLTESRMHHPRSSVMRLYIPRKCGGRGFLNAKTLHNREVCSLREYFLKAEVGMHRDVVAVDKGLTPLSMAKENWHKPEVLTTDDRKEVWQGKELHGRFYRALHGPDVDFLASVSWLRFGDLFGETEGFVCAIMDEVMLTNNYRKYIMKDGTVDMCRACHLPGESIRHIISGCSRLANGEYLHRHNQVARIIHQQLALKYKLVESEVPYYKYVPDPVLESDHVTLYWDRSIITDRTIVANKPDIVMIDRSARRVMIIDVTIPHDENLVKAEKEKQIKYLDLAHEVRDMWNMNSVIIVPIVVTANGLIAKSFDDHLSKLSLGGWIKGLIQKAVLLDTARIVRRFLSLQP

SEQ ID NO: 28359 - protein, 1201 aa, Xestia xanthographa
MMLTRAAAARRARLPTPDSSLSSASPPPDPGSPVSPVAAVASSSSDEYFSPPTSPPPVRRAGRGRPPKGLGLRGQQAPSRVPATGGCVQRMKWTQAMNENVMRAYYGSTEGGTNLTAYRARMLSLFQDLEPTVNVSAQRLSDQVRVIQRNHRLDDAALDRLRSEVLSNLIILTPTQTAVQVSAINVTLPRSNPAVVEEDDRVSTVSSQCNDRLRSALEDALREYRSTPTEIRPRLPRLPMHKKNRALVCALDSQLKNIFKSSEDLVDTHSILFCGAVAACRLANVKFPNCDVATRPKPAVPAWQRRIERRIDEARVLIGKLYCFREGNTRPRVMRFVRRAFSGTEISPQEYMSRVTERIDFLKQKVYAWANRIRRYKRRVDRYSQNRMFQSDERWVYRAWERSEQNMTNVCRPDDVATSSFWRSIWSVPVCHTEADWMRDVERVCEPIPEMEPIFITPLDVARAVRPLPNWKSPGPDGLHNFWLKWFSSSHTCLASQFQSSLESGSLPQFLTTGITHLLHKSGSPAEPKNYRPITCLSTVYKLLTSILRVKINTHIDKNSIMSASQNGCRNGSRGTKELLLIDMAISQQVRRSRKDLSTCWIDYKKAYDSVPHTWLMRVLELYKIDTTLRTFLESCMGQWRTVLRYPGCRQIQGSDEPVWIKRGIFQGDSLSPLWFCLALNPLSTLLENSGLGCRLRKDGQVISHLLYMDDLKLFAPNKLRLMELLKVTETFSSAIRMEFGVDKCAVMYVKRGEIMESEGLQLSDPIHLRSLSSSETYKYLGMSEALGINITDMKQSLKERFFGRLRKVLNSLLSGGNKVRAFNGWVMPVLMYSFGILKWTQTELDALDRRVRTLLTESRMHHPRSSVMRLYIPRKCGGRGFLNAKTLHNREVCSLREYFLKAEVGMHRDVVAVDKGLTPLSMAKENWHKPEVLTTDDRKEVWQGKELHGRFYRALHGPDVDFLASVSWLRFGDLFGETEGFVCAIMDEVMLTNNYRKYIMKDGTVDVCRACHLPGESIRHIISGCSRLANGEYLHRHNQVARIIHQQLGLKYKLVESEVPYYKYVPDPVLEKDHVTLYWDRSIITDRTIVANKPDIVMIDRSARRVMIIDVTIPHDENLVKAEKEKQIKYLDLAHEVRDMWNMNSVIIVPIVVTANGLIAKSFDDHLSKLSLGGWIKGLIQKAVLLDTARIVRRFLSLQP

SEQ ID NO: 28360 - protein, 1202 aa, Cosmia trapezina
MLTRSAARARPPPPDSSLSSASPPPVSSPTVSAVTTPAAVVASSSSDEYFSPPTSPIPVRRQGRGRPPKSLGLGGQPAPSRVPAAGGCVQRMRWTQSMNENVMRAYYGSTEGGTNLTAYRVRMLSLFQELEPTVNVSAQRLSDQVRVIQRNHRLDDAALDRLRSEILSDRIVSTQAQTAVQDSIIDALPPRSNHVVEEEDDRVATVSSQSNDRLRSALEDAFREYRSTPTELRPRLPRLPMHKKNRALVCALDSHLKDFFESSEDLVDTHSILYCAAVAACRLANVKFPNCDGANRSKPAVPAWQCRIERRIDGARVLIGKLYCFREGNTRPRVMRFVGRAFSGTGISPPEYMSRVTERIDFLKQKVCAWASRIRRYKRRVDRYTQNRMFQSDERWVYRAWERPEQNVTDVCRPDDAATSAFWRSIWSVPVCHAEAGWMQDVERVCETIPEMETVLITPLDVARAVRPFPNWKSPGPDGLHNFWLKWLISSHICLASQFQSSLESGSLPQFLTTGVTHLLHKSGSPVEPKNYRPITCLSTVYKLLTSILRAKINTHIASNSIISASQNGCRTGSRGTKELLLIDMAISQQVRRSRKDLSTCWIDYKKAYDSVPHTWLLKVLELYKIDATLRTFLESCMGQWRTVLRYPGCRQIRGNDEPVWIKRGIFQGDSLSPLWFCLALNPLSTLLEDSGLGYRLRRGGQVISHLLYMDDLKLFAPNELRLMELLKVTETFSGAIRMEFGVDKCAVMHVKRGEIMESEGIQLTDSIYLRSLSSSETYKYLGMSEALGINVAGVKQSLKERFFGRLKKVLISLLSGGNKVRAFNGWVMPVLMYSFGILKWTQTELDALDRRVRTLLTANRMHHPRSSVMRLYIPRKCGGRGFLNAKTLHNREVCSLREYFLKADVGMHRDVVAVDKGLTPLSMAKENWRKPVLLTTDDRRKVWQSKELHGRFYRALHEPGVDFLASVSWLRFSDLFGETEGFVCAIMDEVILTNNYRRYIMKDGTVDVCRACHRPGESIRHIISGCSRLANGEYLHRHNQVARIIHQQLALKYKLVDSEVPYYKYVPDPVLENDHVTLYWDRSIITDRTIVANKPDIVVIDRLARRAMIVDVTIPHDGNLVKAEKEKEIKYLDLAREVVDMWNVDSAVIVPIVVTANGLIADSLDQHLSRLSLGGWIKGQIQKAVLLDTARIVRRFLSLQP

SEQ ID NO: 28361 - protein, 1199 aa, Mamestra brassicae
MITRAAARRAHPPPPGSSLSSASPTPDIGSQVSPVVAVASSSSDEYFSPPTSPTPVRRQGRGRPPRSLGSRGQPALSRVPAAGGCVQRMRWTQSMNENVMRAYYGSTEGGTNLTAYRVRMLSLFQDLEPTVNVSAQRLSDQVRVIQHNCRLDDAALERLRSEVLSNLIISTPTQTVVQAPASGAITPRPNNGSDEVDDRVVTVSSQCNDRLRSALEDALREYRLTPTELRPRLPRLPMHKKNRALVCALDSLLQNIFESSESLVDTHSILFCGAVAACRIANVKFPSCDEAIRPKPAAPAWQCRIERRIDEARALIGKLYCFREGNTRPRVMRFVRRAFSGTGISSREYTFRVTERIDFLKQKVCAWANRIRRYKRRVDRYSQNRMFQSDERWVYRAWERPEQSVTDVYRPDDVATSTFWRSIWSVPICHAEGGWMRDVERVCEAIPQMEKITITTLDIAKAVRPLPNWKSPGPDGLHNFWLKWYSSSHALLASQFQSSLESGSLPQFLTTGITHLLHKTGSPAEPKNYRPITCLSTVYKLLTSILRAKINEHIESNSIMSASQNGCRKGSRGTKELLLIDMAISQQVRRSRKDLSTCWIDYKKAYDSVPHTWLMKVLELYKIDATLRTFLESCMRQWKTVLRYPGCQPIQGSDEPVWIKRGIFQGDSLSPLWFCLALNPLSTLLEDSGLGYRLRRGGQAISHLLYMDDLKLFAPNNLRLMELLKVTETFSSAIRMEFGVDKCAVMHVKKGEIMESEGIQLSDSIQVRSLSSTESYKYLGMSEALGINGTDMKQSLRERFFGRLKKVLNSLLSGGNKVRAFNGWVMPVLMYTFGILKWTQTELDALDRRVRTLLTANRMHHPRSSVMRLYIPRKCGGRGFLNAKTLHNREMCSLREYFLKADVGMHRDVVAVDKGLTPLSMAKENWRKPVILTTDDRKEVWKGKELHGRFYRALYGSDVDFSASVAWLRFGDLFGETEGFVCAIMDEVILTNNYRKHIMKDGTVDVCRACHRPGESIRHIISGCSRLANGEYLHRHNQVARIIHQQLALKYKLVDSEVPYYKYVPDPVLENDHVTLYWDRSIITDRTIVANKPDIVVIDRLARRTMIIDVTIPHDENLVKAEKEKQIKYLDLAHEVVDMWNVDSAVIVPIVITANGLMAKSFDDHLSKLALRGWIKGLIQKAVLLDTARIVRRFLSLEP

SEQ ID NO: 28362 - protein, 1199 aa, Mamestra brassicae
MITRAAARRAHPPPPGSPLSSASPTPDIGSQVSPVVAVASSSSDEYFSPPTSPTPVRRQGRGRPPRSLGSRGQPALSRVPAAGGCVQRMRWTQSMNENVMRAYYGSTEGGTNLTAYRVRMLSLFQDLEPTVNVSAQRLSDQVRVIQHNCRLDDAALERLRSEVLSNLIISTPTQTVVQAPASGAITPRPNNGSDEVDDRVVTVSSQCNDRLRSALEDALREYRLTPTELRPRLPRLPMHKKNRALVCALDSLLQNIFESSESLVDTHSILFCGAVAACRIANVKFPSCDEAIRPKPAAPAWQCRIERRIDEARALIGKLYCFREGNTRPRVMRFVRRAFSGTGISSREYTFRVTERIDFLKQKVCAWANRIRRYKRRVDRYSQNRMFQSDERWVYRAWERPEQSVTDVYRPDDVATSTFWRSIWSVPICHAEGGWMRDVERVCEAIPQMEKITITTLDIAKAVRPLPNWKSPGPDGLHNFWLKWYSSSHALLASQFQSSLESGSLPQFLTTGITHLLHKTGSPAEPKNYRPITCLSTVYKLLTSILRAKINEHIESNSIMSASQNGCRKGSRGTKELLLIDMAISQQVRRSRKDLSTCWIDYKKAYDSVPHTWLMKVLELYKIDATLRTFLESCMRQWKTVLRYPGCQPIQGSDEPVWIKRGIFQGDSLSPLWFCLALNPLSTLLEDSGLGYRLRRGGQAISHLLYMDDLKLFAPNNLRLMELLKVTETFSSAIRMEFGVDKCAVMHVKKGEIMESEGIQLSDSIQVRSLSSTESYKYLGMSEALGINGTDMKQSLRERFFSRLKKVLNSLLSGGNKVRAFNGWVMPVLMYTFGILKWTQTELDALDRRVRTLLTANRMHHPRSSVMRLYIPRKCGGRGFLNAKTLHNREMCSLREYFLKADVGMHRDVVAVDKGLTPLSMAKENWRKPVILTTDDRKEVWKGKELHGRFYRALYGSDVDFSASVAWLRFGDLFGETEGFVCAIMDEVILTNNYRKHIMKDGTVDVCRACHRPGESIRHIISGCSRLANGEYLHRHNQVARIIHQQLALKYKLVDSEVPYYKYVPDPVLENDHVTLYWDRSIITDRTIVANKPDIVVIDRLARRTMIIDVTIPHDENLVKAEKEKQIKYLDLAHEVVDMWNVDSAVIVPIVITANGLMAKSFDDHLSKLALRGWIKGLIQKAVLLDTARIVRRFLSLEP

SEQ ID NO: 28363 - protein, 1199 aa, Mamestra brassicae
MITRAAARRAHPPPPGSSLSSASPTPDIGSQVSPVVAVASSSSDEYFSPPTSPTPVRRQGRGRPPRSLGSRGQPAPSRVPAAGGCVQRMRWTQSMNENVMRAYYGSTEGGTNLTAYRVRMLSLFQDLEPTVNVSAQRLSDQVRVIQHNCRLDDAALERLRSEVLSNLIISTPTQTVVQAPASGAITPRPNNGSDEVDDRVVTVSSQCNDRLRSALEDALREYRLTPTELRPRLPRLPMHKKNRALVCALDSLLQNIFESSESLVDTHSILFCGAVAACRIANVKFPSCDEAIRPKPASPAWQCRIERRIDEARALIGKLYCFREGNTRPRVMRFVRRAFSGTGISPREYTFRVTERIDFLKQKVCAWANRIRRYKRRVDRYSQNRMFQSDERWVYRAWERPEQSVTDVYRPDDVATSTFWRSIWSVPICHAKGGWMRDVERVCEAIPQMEKITITTLDIAKAVRPLPNWKSPGPDGLHNFWLKWYSSSHALLASQFQSSLESGSLPQFLTTGITHLLHKTGSPAEPKNYRPITCLSTVYKLLTSILRAKINEHIESNSIMSASQNGCRKGSRGTKELLLIDMAISQQVRRSRKDLSTCWIDYKKAYDFVPHTWLMKVLELYKIDATLRTFLESCMRQWKTVLRYPGCQPIQGSDEPVWIKRGIFQGDSLSPLWFCLALNPLSTLLEDSGLGYRLRRGGQAISHLLYMDDLKLFAPNNLRLMELLKVTETFSSAIRMEFGVDKCAVMHVKKGEIMESEGIQLSDSIQVRSLSSTESYKYLGMSEALGINGTDMKQSLRERFFGRLKKVLNSLLSGGNKVRAFNGWVMPVLMYTFGILKWTQTELDALDRRVRTLLTANRMHHPRSSVMRLYIPRKCGGRGFLNAKTLHNREMCSLREYFLKADVGMHRDVVAVDKGLTPLSMAKENWRKPVILTTDDRKEVWKGKELHGRFYRALYGSDVDFSASVAWLRFGDLFGETEGFVCAIMDEVILTNNYRKHIMKDGTVDVCRACHRPGESIRHIISGCSRLANGEYLHRHNQVARIIHQQLALKYKLVDSEVPYYKYVPDPVLENDHVTLYWDRSIITDRTIVANKPDIVVIDRLARRTMIIDVTIPHDENLVKAEKEKQIKYLDLAHEVVDMWNVDSAVIVPIVITANGLMAKSFDDHLSKLALRGWIKGLIQKAVLLDTARIVRRFLSLEP

SEQ ID NO: 28364 - protein, 1199 aa, Mamestra brassicae
MLTRAALQRARPPPPDPSLSSASPPPDIGSPLSPAVAVASSSSDEYFSPPTSPTPVRRQGRGRPPRGLGPRGQPAPSRVPATGGCVQRMRWTQSMNENVMRAYYGSTEGGTNLTAYRVRMLSLFQDLEPTVNVSAQRLSDQVRVIQRNHRLDDAAIDRLRSEVLNNLIISTPTQTAVQAPINGRITPRPNNVSDEVDDRVVTVSSQCNDRLRSALEDALREYRSTPTELRPRLPRLPMHKKNRALVCALDSLLQNIFESSESLVDTHSILYCGAVAACRIANVKFPGCDEAIRPKPAAPAWQRRIERRIDETRALIGKLYCFREGNTRPRVMRFVRRAFSGTEISPRDFTSRVTERIDFLKQKVCAWASRIRRYKRRVDRYSQNRMFQSDERWVYRAWERPEQSVTDVCRPDDVATSIFWRSIWSVPICHAEGGWMRDVERVCEAIPQMEKITIKTLDVAKAVRPLPNWKSPGPDGLHNFWLKWYSSSHALLASQFQSSLDSGSLPQFLTTGVTHLLHKTGSPTEPKNYRPITCLSTVYKLLTSILRAKINEHIESNSIMSASQNGCRKGSRGTKELLLIDMAISQQVRRSRKDLSTCWIDYKKAYDSVPHTWLMKVLELYKIDATLRTFLESCMRQWKTVLRYPRCRPIQGSDEPVWIKRGIFQGDSLSPLWFCLALNPLSTLLEDSGLGYRLRRGGQAISHLLYMDDLKLFAPNNLRLMELLKVTETFSSAIRMEFGVDKCAVMHVKKGEIMESEGIHLSDSIQVRSLSSTETYKYLGMLEALGINGTDMKQSLRERFFGRLKKVLNSLLSGGNKVRAFNGWVMPVLMYTFGILKWTQTELDALDRRVRTLLTANRMHHPRSSVMRLYIPRKCGGRGFLNAKTLHNREMCSLREYFLKADVGMHRDVVAVDKGLTPLSMAKENWRTPVILTTDDRKEVWKGKELHGRFYRALHGSDVDFSASVAWLRFGDLFGETEGFVCAIMDEVILTNNYRRHIMKDGTVDMCRACHRPGESIRHIISGCSRLANGEYLHRHNQVARIIHQQLTLKYNLVDSEVPYYKYVPDPVLENDHVTLYWDRSIITDRTIVANKPDIVVIDRLARRTMIIDVTIPHDENLVKAEKEKQIKYLDLAHEVVDMWNVESAVIVPIVVTANGLMAKSFDDHLSKLALRSWVKGLIQKAVLLDTARIVRRFLSLEP

SEQ ID NO: 28365 - protein, 1202 aa, Noctua fimbriata
MITRAAYRRARLPPPDPSLSSASPPPESSPIVSAVTPAVAVASSSSDEYFSPPTSPTPVRRQGRGRPPRSLGLRGHPAPSRVPAAGGCVQRMRWTHSINENVMRAYYGSTEGGTNLTAYRVGMLSLFQVLEPTVNVSAQRLSDQVRVIQRNHMLDDAVLDRLRSEVLSNRIVLTPAQTAVQASVIDATPPRFNPAVVEEDDRVAVVSSQCNDRLRSALEDALREYRSTPTELRPRLPRLPMHNKNRALVCALDSQLENIFESSENLVDTHSILYCGAVAACRLANVKFPNCDVATRPKPAVPAWQRRIERRIDGARVLIGKLHCFREGNTRPRVMRFVRRAFSGTGISPQEYMSRVTERIDFLKQKVYAWANRIRRYKRRVDRYSQNRMFQSDERWVYRAWERPELNMTDVCRPDDAATSSFWRSIWSVPVCHTEADWMRDVERVCEPIPEMEPILITRLDIARAVRPLPNWKSPGPDGLHNFWLKWLSSSHTCLASQFQSSLESGSLPQFLTTGVTHLLHKSGSPAEPKNYRPITCLSTVYKLLTSILRAKINTHIDKNSIMSASQNGCRSGSRGTKELLLIDMAISQQVRRSRKDLSTCWIDYKKAYDSVPHTWLIRLLELYKIDATLRAFLESCMGQWRTVLRYPGCGQIQGNDEPVWIKRGIFQGDSLSPLWFCLALNPLSTLLEDSGLGYRLKRGGQVISHLLYMDDLKLFAPNKLQLMELLKVTETFSSAIRMEFGVDKCAVMYVKQGEIMESEGIQLSDSIHLRTLSSTESYKYLGMSEALGINVTDMKQSLKERFFGRLNKVLHSLLSGGNKVRAFNGWVMPVLMYSFGVLKWTQTELDALDRRVRTLLTANRMHHPRSSVMRLYIPRKCGGRGFLNAKSLHNREMCSRREYFLKVEVGMHRDVVAVDKGLTPLSMAKENWRKPEVLTTDDRKEVWQGKELHGRFYRALHGSDVDFLASVSWLRFGDLFGETEGFVCAIMDEVMLTNNYRKYIMKDGTVDVCRACHRPGESIRHIISGCSRLANGEYLHRHNEVARIIHQQLALKYKLVESEVPYYKYVPDPVLEKDHVTLYWDQSIITDRTIVANKPDIVVIDRSARRVMIVDVTIPHDENLVKAEKEKQIKYLDLAHEVVEMWNVNLAIIVPIVVTANGLIAKSLDDHLSKLSLGGWIKGLIQKAVLLDMARIVRRFLSLEP

SEQ ID NO: 28366 - protein, 1111 aa, Noctua fimbriata
MRWTYSINENVMRAYYGSTEGGTNLTAYRVGMLSLFQVLEPTVNVSAQRLSDQVRVIQRNHMLDDTVLDRLRSEVLSNRIVLTPAQTAVQASVIDATPPRFNPAVVEEDDRVAVVSSQCNDRLRSALEDALREYRSTPTELRPRLPRLPMHNKNRALVCALDSQLKNIFESSENLVDTHSILYCGAVAACRLANVKFPNCDVATRPKPAVPAWQRRIERRIDGARVLIGKLHCFREGNTRPRVMRFVRRAFSGTGISPQEYMSRVTERIDFLKQKVYAWANRIRRYKRRVDRYSQNRMFQSDERWVYRTWERPELNMADVCRPDDATTSSFWRRIWSVPVCHTEADWMHDVERVCEPIPEMEPVLITPLDIARAVRPLPNWKSPGLDGLHNFWLKWLSTSHTCLASQFQSSLESGSFPQFLTTGVTHLLHKSGSPAEPKNYRPITCLSTVYKLLTSILRAKINTHIDKNSIMSASQNGCRNGSRGTKELLLIDMAISQQVRRSRKDLSTCWIDYKKAYDSVPHTWLMRVLELYKIDATLRAFLESCMGQWRTVLRYPGCRQIQGNDEPVWIKRGIFQGDSLSPLWFCLALNPLSTLLEDSGLGYRLRRGGQVISHLLYMDDLKLFAPNKLRLMELLKVTETFSSAIRMEFGVDKCAVMYVKQGEIMESEGIQLSDSIHLRTLSSTESYKYLGMSEALGINVTDMKQSLKERFFGRLNKVLHSLLSGGNKVRAFNGWVMPVLMYSFGVLKWTQTELDALDRRVRTLLTANRMHHPRSSVMRLYIPRKCGGRGFLNAKSLHNREICSLREYFLKVEVGMHRDVVAVDKGLTPLSMAKENWRKPEVLTTDDRKEVWQGKELHGRFYRALHGPDVDFLASVSWLRFGDLFGETEGFVCAIMDEVMLTNNYRKYIMKDGTVDVCRACHRPGESIRHIISGCSRLANGEYLHRHNQVARIIHQQLALKYKLVESEVPYYKYVPDPVLEKDHVTLYWDQSIITDRTIVANKPDIVVIDRSARRVMIVDVTIPHDENLVKAEKEKQIKYLDLAHEVVDMWNVNSAIIVPIVVTANGLIAKSLDDHLSRLSLGGWIKGLIQKAVLLDTARIVRRFLSLEP

SEQ ID NO: 28367 - protein, 1202 aa, Noctua fimbriata
MLTRAAARRARLPPPDPSHSSASPPPESSHIVSAVTPAVAVASSSSDEYFSPPTSPTPVRRQGRGRPPRSLGLRGHPAPSRVPAAGGCVQRMRWTHSINENVMRAYYGSTEGGTNLTAYRVGMLSLFQVLEPTISVSAQRLSDQVRVIQRNHMLDDAVLDRLRSEVLSNRIVFTPAQTAVQASVIDATPPRFNPAVVEEDDRVAVVSSQCNDRLRSALEDALREYRSTPTELRPRLPRLPMHNKNRALVCALDSQLKNLFESSENLVDTHSILYCGAVAACRLANVKFPSCDVATRPKPAVPAWQRRIERRIDGARVLIGKLHCFREGNTRPRVMRFVRRAFSGTGISPQEYMSRVTERIDFLKQKVYAWANRIRRYKRRVDRYSQNRMFQSDERWVYRAWERPDQNMTDVCRPDDAATSSFWRSIWSVPVCHTEADWMRDVEQVCEPIPEMEPILITPLDVARAVRPLPNWKSPGPDGLHNFWLKWLSSSHTCLASQFQSSLESGSLPQFLTTGVTHLLHKSGSPAEPKNYRPITCLSTVYKLLTSILRAKINTHIDKNSIMSASQNGCRNGSRGTKELLLIDMAISQQVRRSRKDLSTCWIDYKKAYDSVPHTWLMRVLELYKIDATLRAFLESCMGQWRTVLRYPGCRQIQGNDEPVWIKRGIFQGDSLSPLWFCLALNPLSTLLEDSGLGYRLRRGGQVISHLLYMDDLKLFAPNKLRLMELLKVIETFSSAIRMEFGVDKCAVMYVKQGEIMESEGIQLSDSIHLRTLSSTESYKYLGMSEALGINVTDMKQSLKERFFGRLNKVLHSLLSGGNKVRAFNGWVMPVLMYSFGVLKWTQTELDALDRRVRTLLTANRMHHPRSSVMRLYIPRKCGGRGFLNAKSLHNREMCSLREYFLKVDLGMHRDVVAVDKGLTPLSMAKENWRKPEVLTTDDRKEVWQGKELHGRFYRALHGPDVDFLASVSWLRFGDLFGETEGFVCAIMDEVMLTNNYRKYIMKDGTVDVCRACHRPGESIRHIISGCSRLANGEYLHRHNQVARIIHQQLALKYKLVESEVPYYKYVPDPVLEKDHVTLYWDQSIITDRTIVANKPDIVVIDRSARRVMIVDVTIPHDENLVKAEKEKQIKYLDLAHEVVDMWHVNSAIIVPIVVTANGLIAKSLDEHLSKLSLGGWIKGLIQKAVLLDTARIVRRFLSLEP

SEQ ID NO: 28368 - protein, 1206 aa, Noctua fimbriata
MITRSRAKQLQEAHTPSPGSSLSSASQPPRRATSVSTVSPVAAVASSSSDEFFSPPSTPPPSPRRRGRGRPPAGLGPRGQPAPNRVPAAGGNVSRMRWTQSINEQVMRAYYGATEGGTNLTAYRVGMLSLFQVLEPTINVSAQRLSDQVRVIQRNHMLDDAVLDRLRSEVLSNRIVFTPAQTAVQASVIDATPPRFNPAVVEEDDRVAVVSSQCNDRLRSALEDALREYRSTPTELRPRLPRLPMHNKNRALVCALDSQLKNLFESSENLVDTHSILYCGAVAACRLANVKFPNCDVATRPKPAVPAWQRRIECRIDGARVLIGKLHCFREGNTRPRVMRFVRRAFSGTGISPQEYMSRVTERIDFLKQKVYAWANRIRRYKRRVDRYSQNRMFQSDERWVYRAWERPDQNMTDMCRPDDAATSSFWRSIWSVPVCHTEADWMRDVEQVCEPIPEMQPILITPLDVARAVRPLPNWKSPGPDGLHNFWLKWLSSSHTCLASQFQSSLESGSLPQFLTTGVTHLLHKSGSPVEPKNYRPITCLSTVYKLLTSILRAKINTHIDKNSIMSASQNGCRNGSRATKELLLIDMAISQQVRRSRKDLSTCWIDYKKAYDLVPHTWLMRVLELYKIDATLRAFLESCMGQWRTVLRYPGCRQIQGNDEPVWIKRGIFQGDSLSPLWFCLALNPLSTLLEDSGLGYRLRRGGQVISHLLYMDDLKLFAPNKLQLMELLKVTETFSSAIRMEFGVDKCAVMYVKQGEIMESEGIQLSDSIHLRTLSSTESYKYLGMSEALGINVTDMKQSLKERFFGRLNKVLHSLLSGGNKVRAFNGWVMPVLMYSFGVLKWTQTELDALDRRVRTLLTANRMHHPRSSVMRLYIPRKCGGRGFLNAKSLHNREMCSLREYFLKVEVGMHRDVVAVDKGLTPLSMAKENWRKPEVLTTDDRKEVWQGKELHGRFYRALHGPDVDFLASVSWLRFGDLFGETEGFVCAIMDEVMLTNNYRKYIMKDGTVDVCRACHRPGESIRHIISGCSRLANGEYLHRHNQVARIIHQQLALKYKLVESEVPYYKYVPDPVLEKDHVTLYWDQSIITDRTIVANKPDIVVIDRSARRVMIVDVTIPHDENLVKAEKEKQIKYLDLAHEVVDMWNVNSAIIVPIVVTANGLIAKSLDDHLSKLSLGGWIKGLIQKAVLLDTARIVRRFLSLEP

SEQ ID NO: 28369 - protein, 1202 aa, Noctua fimbriata
MITRAAYRRARLPPPDPSLSSASPPPESSPIVSAVTPAVAVASSSSDEYFSPPTSPTPVRRQGRGRPPRSLGLRGHPAPSRVPAAGGCVQRMRWTHSINENVMRAYYGSTEGGTNLTAYRVGMLSLFQVLEPTVNVSTQRLSDQVRVIQRNHMLDDAVLDRLRSEVLSNRIVLTPAQTAVQASVIDATPPRFNPAVVEEDDRVAVVSSQCNDRLRSALEDALREYRSTPTELRPRLPRLPMHNKNRALVCALDSQLENIFESSENLVDTHSILYCGAVAACRLANVKFSNCDVATRPKPAVPAWQRRIERRIDGARVLIGKLHCFREGNTRPRLMRFVRRAFSGTGISPQEYMSRVTERIDFLKQKVYAWANRIRRYKRRVDRYSQNRMFQSDERWVYRAWERPELNMTDVCRPDDAATSSFWRSIWSVPVCHTEADWMRDVERVCEPIPEMEPILITPLDIARAVRPLPNWKSPGPDGLHNFWLKWLSSSHTCLASQFQSSLESGSLPQFLTTGVTHLLHKSGSPAEPKNYRPITCLSTVYKLLTSILRAKINTHIDKNSIMSASQNGCRNGSRGTKELLLIDMAISQQVRRSRKDLSTCWIDYKKAYDSVPHTWLMRVLELYKIDATLRAFLESCMGQWRTVLRYPGCRQIQGNDEPVWIKRGIFQGDSLSPLWFCLALNPLSTLLEDSGLGYRLRRGGQVISHLLYMDDLKLFAPNKLQLMELLKVTETFSSAIRMEFGVDKCAVMYVKRGEIMESEGIQLSDFIHLRSLSSSESYKYLGMSEALGINVTDMKQSLKERFFGRLNKVLHSLLSGGNKVRAFNGWVMPVLMYSFGVLKWTQTELDALDRRVRTLLTANRMHHPRSSVMRLYIPRKCGGRGFLNAKSLHNREMCSLREYFLKVEVGMHRDVVAVDKGLTPLSMAKENWRKPEVLTTDDRKEVWQGKELHGRFYRALHGPDVDFLASVSWLRFGDLFGETEGFVCAIMDEVMLTNNYRKYIMKDGTVDVCRACHRPGESIRHIISGCSRLANGEYLHRHNQVARIIHQQLALKYKLVESEVPYYKYVPDPVLEKNHVTLYWDQSIITDRTIVANKPDIVVIDRSARRVMIVDVTIPHDENLVKAEKEKQIKYLDLAHEVVDMWHVNSAIIVPIVVTANGLIAKSLDDHLSKLSLGGWIKGLIQKAVLLDTARIVRRFLSLEP

SEQ ID NO: 28370 - protein, 1202 aa, Noctua fimbriata
MITRAASRRARLPPPDQSLSSASPPPESSPIVSAVTPAVAVASSSSDEYFSPPTSPTPVRRQGRGRPPRSLGLRGHPAPSRVPAAGGCVQRMRWTHSINENVMRAYYGSTEGGTNLTAYRVGMLSLFQVLEPTINVSAQRLSDQVRVIQRNHMLDDAVLDRLRSEVLSNRIVFTPAQTAVQASVIDATPPRFNPAVVEEDDRVAVVSSQCNDRLRSALEDALRDYRSTPTELRPRLPRLPMHNKNRALVCALDSQLKNLFESSENLVDTHSILYCGAVAACRLANVKFPNCDVATRPKPAVPAWQRRIECRIDGARVLIGKLHCFREGNTRPRVMRFVRRAFSGTGISPQEYMSRVTERIDFLKQKVYAWANRIRRYKRRVDRYSQNRMFQSDERWVYRAWERPDQNMTDMCRPDDAATSSFWRSIWSVPVCHTEADWMRDVEQVCEPIPEMEPILITPLDVARAVRPLPNWKSPGPDGLHNFWLKWLSSSHTCLASQFQSSLESGSLPQFLTTGVTHLLHKSGSPAEPKNYRPITCLSTVYKLLTSILRAKINTHIDKNSIMSASQNGCRNGSRATKELLLIDMAISQQVRRSRKDLSTCWIDYKKAYDSVPHTWLMRVLELYKIDATLRAFLESCMGQWRTVLRYPGCRQIQGNDEPVWIKRGIFQGDSLSPLWFCLALNPLSTLLEDSGLGYRLRRGGQVISHLLYMDDLKLFAPNKLQLMELLKVTETFSSAIRMEFGVDKCAVMYVKQGEIMESEGIQLSDSIHLRTLSSTESYKYLGMSEALGINVTDMKQSLKERFFGRLNKVLHSLLSGGNKVRAFNGWVMPVLMYSFGVLKWTQTELDALDRRVRTLLTANRMHYPRSSVMRLYIPRKCGGRGFLNAKSLHNREMCSLREYFLKVEVGIHRDVVAVDKGLTPLSMAKENWRKPEVLTTDDRKEVWQGKELHGRFYRALHGPDVDFLASVSWLRFGDLFGETEGFVCAIMDEVMLTNNYRKYIMKDGTVDVCRACHRPGESIRHIISGCSRLANGEYLHRHNQVARIIHQQLALKYKLVESEVPYYKYVPDPVLEKDHVTLYWDQSIITDRTIVANKPDIVVIDRSARRVMIVDVTIPHDENLVKAEKEKQIKYLDLAHEVVDMWNVNSAIIVPIVVTANGLIAKSLDDHLSKLSLGGWIKGLIQKAVLLDTARIVRRFLSLEP

SEQ ID NO: 28371 - protein, 1050 aa, Noctua fimbriata
MLDDAVLDRLRSEVLSNRIVLTPAQTAVQASVVDATPPRFNPAVVEEDDRVAVVSSQCNDRLRSALEDALREYRSTPNELRPRLPRLPMHNKNRALVCALDSQLKNIFESSENLVDTHSILYCEAVAACRLANVKFPNCDVATRPKPAEPAWQRRIERRIDGARVLIGKLYCFREGNTRPRVMRFVRRAFLGTEISPQEYVSRVTERIDFLKQKVYAWANRIRRYKRRVDRYSQNRMFQSDERWVYRAWERPELNMRDVCRPDDAATCSFWRSIWSVPVCHTEVDWMHDVERVCEPIPEMEPILITPLDIARAVRPLPNWKSPGPDGLHNFWLKWLSSSHTCLASQFQSSLESGSLPQFLTTGVTHLLHKSGSPAEPKNYRPITCLSTVYKLLTSILRVKINKHIEKNSIMSASQNGCRNGSRGTKELLLIDMAISQQVRRSRKDLSTCWIDYKKAYDSVPHTWLMRVLELYKIDATLRAFLESCMGQWRTVLRYPGCRQIQGNDEPVWIKRGIFQGDRLSPLWFCLALNPLSTLLEDSGLGYRLRRGGQVISHLLYMDDLKLFAPNKLRLMELLKVTETFSSAIRMEFGVDKCAVMYVKRGEIMESEGIQLSDSIHLRSLSSSGSYKYLGMSEALGINVTDIKQTLKERFFGRLNKVLNSLLSGGNKVRAFNGWVMPVLMYSFGVLKWTQTELDALDRRVRTLLTANRMHHPRSSVMRLYIPWKCGGRGFLNAKSLHNREMCSLKEYFFKVEVGMHRDVVAVDKGLTPLSMAKENWRKPEVLTTDDRKEVWQGKELHGRFYRALHGPDVDFLASVSWLRFGDLFGETEGFVCAIMDEVMLTNNYRKYIMKDGTVDVCRACHRPGESIRHIISGCSRLANGEYLHRHNQVARIIHQQLALKYKLVESEVPYYKYVPDPVLEKDHVTLYWDQSIITDRTIVANKPDIVVIDRSARRVMIVDVTIPHDENLVKAEKEKQIKYLDLAHEIVDMWNVNSAIIVPIVVTANGLIAKSLDDHLSKLSLGGWIKGLIQKAVLLDTARIVRRFLSLEP

SEQ ID NO: 28372 - protein, 962 aa, Atethmia centrago
MHKKNRALVCALDSLLKDFFESSEDLVDTHSILYCAAVAACRLANVKFPNCDGATRPKPAVPAWQCRIERRIDGARVLIGKLYCFREGNTRPRVMRFVRRAFSGTGISPREYMSRVTERIDFLKQKVCAWASRIRRYKRRVDRCTQNRMFQSDERWVYRSWERPEQNETDVCRPDDATTTAFWRSIWSVPVCHAEADWMRDVERVCETIPEMEVVIITPSDIARAVRPLPNWKSPGPDGLHNFWLKWLTSSHTCLASQFQSSLESGSLPQFLTTGITHLLHKSGSPAEPKNYRPITCLSTVYKLLTSILRAKINTHIDSNSIMSASQNGCRNGSRGTKELLLIDMAISQQVRRFRKDLSTCWIDYKKAYDSVPHTWLMRVLELYKIDTTLRTFLESCMGQWRTVLRYPGCRQIQGNDEPVWIKRGIFQGDSLSPLWFCLALNPLSTLLVDSGLGYRLRRGGQVISHLLYMDDLKIFAPNKLQLMVLLKVTETFSSAIRMEFGVDKCAVMHVKRGEIMEPEGIQLSDSIHLRSLSSPESYKYLGMSEALGINVTDMKQSLKERFFGRLKKVLISPLSGGNKVRAFNGWVMPVLMYSFGILKWTQTELDALDRRVRTLLTANRMHHPRSSVMRLYIPRKCGGRGFLNAKTLHNREICSLREYFLKTEVGMHRDVVAVDKGLTPLSMAKENWCKPVILTTDDRKEIWQNKELHGRFYRALHEPDVDFLASVSWLRFGDLFGETEGFVCAIMDEVILTNNYRRHIMKDGTVDVCRACHRPGESIRHIISGCSRLANGEYLHRHNQVARIIHQQLALKYKLVNSEVPYYKYAPDPVLENDHVTLYWDRSIITDRTIVANKPDIVVIDRLARRAMIVDVTIPHDENLVKAEKEKQIKYLDLAHEVVDMWNVDSAVIVPIVVTANGLMAESLNHHLSRLSLGGWIKGLIQKAVLLDTARIVRRFLSLES

SEQ ID NO: 28373 - protein, 1111 aa, Atethmia centrago
MRWTQSMNENVMRAYYGSTEGGTNLTAYRVRMLSLFQKLEPTVNVSAQRLSDQVRVIQRNHRLDDAALDRLRSEVLSNHIVSTPAQTATHAPIINAIPPRSNHDVEEEDDRVATVSSQCNVRLRSALEDAFREYRSTLTELRPRLPRLPMHKKNRALVCTLDSLLKDFFESSEDLVDTHSILYCAAVAACRLANVKFPNCDGATRPKPAVPAWQCRIERRIDGARVLIGKLYCFREGNTRPRVMRFVRRAFSGTGISPREYMSRVTERIDFLKQKVCAWASRIRRYKRRVDRYTQNRMFQSDERWVYRAWERPEQNETDVCRPDDATTTAFWRSIWSVPVCHAEADWMRDVERVCETIPEMDVVIITPSDIARAVRPLPNWKSPGPDGLHNFWLKWLTSSHTCLASQFQSSLESGSLPQFLTTGITHLLHKSGSPAEPKNYRPITCLSTVYELLTSILRAKINTHIDSNSIMSASQNGCRNGSRGTKELLLIDMAISQQVRRFRKDLSTCWIDYKKAYDSVPHTWLMRVLEFYKIDTTLRTFLESCMGQWRTVLRYPGCRQIQGNDEPVWIKRGIFQGDSLSPLWFCLALNPLSTLLEDSGLGYRLRRGGQVISHLLYMDDLKIFAPNKLQLMELLKVTETFSSAIRMEFGVDKCAVMHVKRGEIMESEGIQLSDSIHLRSLSSPESYKYLGMSEALGINVTDMKQSLKERFFGRLKKVLISPLSGGNKVRAFNGWVMPVLMYSFGILKWTQTELDALDRRVRTLLTANRMHHPRSSVMRLYIPRKCGGRGFLNAKTLHNREICSLREYFLKTEVGMHRDVVAVDKGLTPLSMAKENWCKPVILTTDDRKEIWQNKELHGRFYRALHEPDVDFLASVSWLRFGDLFGETEGFVCAIMDEVILTNNYRRHIMKDGTVDVCRACHRPGESIRHIISGCSRLANGEYLHRHNQVARIIHQQLALKYKLVNSEVPYYKYAPDPVLENDHVTLYWDRSIITDRTIVANKPDIVVIDRLARRAMIVDVTIPHDENLVKAEKEKQIKYLDLAHEVVDMWNVDSAVIVPIVVTANGLMAESLNHHLSRLSLGGWIKGLIQKAVLLDTARIVRRFLSLES

SEQ ID NO: 28374 - protein, 1074 aa, Atethmia centrago
MLAKEEAGWLRERQVSRNFIQRNHRLDDAALDRLRSEVLSNHIVSTPAQTATHAPIINAIPPRSNHDVEEEDDRVATVSSQCNVRLRSALEDAFREYRSTPTELRPRLPRLPMHKKNRALVCTLDSLLKDFFESSEDLVDTHSILYCAAVAACRLANVKFPNCDGATRPKPAVPAWQCRIERRIDGARVLIGKLYCFREGNTRPRVMRFVRRAFSGTGISPREYMSRVTERIDFLKQKVCAWASRIRRYKRRVDRYTQNRMFQSDERWVYRAWERPEQNETDVCRPDDATTTAFWRSIWSVPVCHAEADWMRDVERVCETIPEMDVVIITPSDIARAVRPLPNWKSPGPDGLHNFWLKWLTSSHTCLASQFQSSLESGSLPQFLTTGITHLLHKSGSPAEPKNYRPITCLSTVYKLLTSILRAKINTHIDSNSIMSASQNGCRNGSRGTKELLLIDMAISQQVRRFRKDLSTCWIDYKKAYDSVPHTWLMRVLEFYKIDTTLRTFLESCMGQWRTVLRYPGCRQIQGNDEPVWIKRGIFQGDSLSPLWFCLALNPLSTLLEDSGLGYRLRRGGQVISHLLYMDDLKIFAPNKLQLMELLKVTETFSSAIRMEFCVDKCAVMHVKRGEIMESEGIQLSDSIHLRSLSSPESYKYLGMSEALGINVTDMKQSLKERFFGRLKKVLISPLSGGNKVRAFNGWVMPVLMYSFGILKWTQTELDALDRRVRTLLTANRMHHPRSSVMRLYIPRKCGGRGFLNAKTLHNREICSLREYFLKTEVGMHRDVVAVDKGLTPLSMAKENWCKPVILTTDDRKEIWQNKELHGRFYRALHEPDVDFLASVSWLRFGDLFGETEGFVCAIMDEVILTNNYRRHIMKDGTVDVCRACHRPGESIRHIISGCSRLANGEYLHRHNQVARIIHQQLALKYKLVNSEVPYYKYAPDPVLENDHVTLYWDRSIITDRTIVANKPDIVVIDRLARRAMIVDVTIPHDENLVKAEKEKQIKYLDLAHEVVDMWNVDSAVIVPIVVTANGLMAESLNHHLSRLSLGGWIKGLIQKAVLLDTARIVRRFLSLES

SEQ ID NO: 28375 - protein, 1200 aa, Xestia c-nigrum
MITRAASRRRARPPTPDSSLSSASPPPDPGSPVPPVAAVASSSSDEYFSPPTSPTPVRRAGRGRPPRSLGLRGQQAPSRVPATGGCVQRMRWTQSMNENVMRAYYGSTEGGINLTAYRDRMLSLFQDLEPAVNVSAQRLSDQVRVIQRSHRLDDTTLDRLRSEVLSNLITITPTQTAVHMSVVNATLPRSNPVVVEEDDRVALVSSQCNDRLRSALDNALREYRSISAELRPRLPRLPMHKKNRALVCALDSQLKNIFESSEDLVDTHSILFCGAVAACRLANVKFPNCDIAIRPKPAVPAWQRRIERRIDGARVLIGKLYCFREGNTRPRVMRFVRRAFSGTEISPQEYMSRVTERIDFLKQKVYAWASRIRRYKRRVDRYSQNRMFQSDERWVYRAWERPQQNMMDVCRPDDAATSSFWRSIWSVPVCHSEADWMRDVERVCEPIPTMEPILITPLDIARAVRPLPNWKSPGPDGLHNFWLKWFSSSHTCLASQFQSSLESGSLPQFLTTGVTHLLHKSGSPADPKNYRPITCLSTVYKLLTSILRTKINTHVDSNSIMSASQNGCRNGSRGTKELLLIDMAISQQVRRARKDLSICWIDYKKAYDSVPHSWLKRVLELYKIDATLRAFLESCMGQWRTVLRYPGCRQIQGNDEPVWIKRGIFQGDSLSPLWFCLALNPVSTLLENSGLGYRLRKDGQVISHLLYMDDLKLFAPNKLQLMELLKVTETFSSAIGMEFGVDKCAVMYVKRGKIMGSEGLQLSDSIHLRSLSSSESYKYLGMSEALGINVTDMKQSLRERFFGRLKKVLNSLLSGGNKVRAFNGWVMPVLMYSFGILKWTQTELDALDRRVRTLLTENRMHHPRSSVMRLYIPRKCGGRGFLNAKTLHNREVCSLREYFLKADVGMHRDVAAVDRGLTPLSMANENWRKPVVLTTDDRMKEWQGKELHGRFYRALHGPDVDFLASVSWLRFGDLFGETEGFVCAIMDEVMLTNNYRKYIMKDGTVDVCRACHLPGESIRHIISGCSRLANGEYLHRHNQVARIIHQQLALKFNLVELEVPYYKYVPDPVLVKDHVTLYWDQSIITDRTIVANKPDIVVIDRSARRVMIIDVTIPHDENFVKAEKEKQIKYLDLAHEVRDMWNMDSVIIVPIVVSANGLIAKSLDEHLSKLSLGGWIKGLIQKAVLRDTARIVRRFLSLQP

SEQ ID NO: 28376 - protein, 868 aa, Xestia c-nigrum
MRFVRRAFSGTEISPQEYMSRVTERIDFLKQKVYAWASRIRRYKRRVDRYSQNRMFQSDERWVYRAWERPQQNMTDVCRPDDAATSSFWRSIWSVPVCHSEADWMRDVERVCEPIPTMEPILITPLDIARAVRPLPKWKSPGPDGLHNFWLKWFSSSHTCLASQFQSSLESGSLPQFLTTGITHLLHKSGSPAEPKNYRPITCLSTVYKLLTSILRTKINTHVDSNSIMSASQNGCRNGSRGTKELLLIDMAISQQVRRARKDLSTCWIDYKKAYDSVPHSWLRRVLELYKIDATLRTFLESCMGQWRTVLRYPGCRQIQGNDEPVWIKRGIFQGDSLSPLWFCLALNPVSTLLENSGLGYRLRKDGQVISHLLYMDDLKLFAPNKLQLMELLKVTETFSSAIGMEFGVDKCAVMYVKRGKIMGSEGLQLSDSIHLRSLSSSESYKYLGMSEALGINVTDMKQSLKERFFGRLKKVLNSLLSGGNKVRAFNGWVMPVLMYSFGILKWTQTELDALDRRVRTLLTENRMHHPRSSVMRLYIPRKCGGRGFLNAKTLHNREVCSLREYFLKADVGMHRDVVAVDKGLTPLSMAKENWRKPVVLTTDDRKKEWQGKELHGRFYRALHGPDVDFLASVSWLRFGDLFGETEGFVCAIMDEVMLTNNYRKYIMKDGTVDVCRACHCPGESIRHIISGCSRLANGEYLHRHNQVARIIHQQLALKFKLVESEVPYYKYVPDPVLVKDHVTLYWDQSIITDRTIVANKPDIVVIDRSARRVMIIDVTIPHDENLVKAEKEKQMKYLDLAHEVRDMWNMNSVIIVPIVVTANGLIAKSLDEHLSKLSLGGWIKGLIQKAVLLDTARIVRRFLSLQP

SEQ ID NO: 28377 - protein, 1080 aa, Xestia c-nigrum
MLSLFQDLEPTVNASAQRLSDQVRVIQRNHLLDGAALDRLRSEVLSNRIILTPAQTAVQASSIDANPPRSNPAVVEEDDRVATVSSQCNDRLRSALEDALHEYRSTSAELRPRLPRLPMHKKNRALVCALDSQLKNVFESSEDLVDAHSILFCGAVAACRLANVKFPNYDLATRPKPAVPAWQRRIERRIDGARVLIGKLHCFREGNTRPRVMRFVRRAFSGTEISPQEYMSRVTERIDFLKQKVYAWASRIRRYKRRVDRYSQNRMFQSDERWVYRAWERPQQNMTDVCRPDDAATSSFWRSIWSVPVCHSEADWMRDVERVCEPIPTMEPILITPLDIARAVRPLPNWKSPGPDGLHNFWLKWFSSSHTCLASQFQSSLESGSLPQFLTTGITHLLHKSGSPAEPKNYRPITCLSTVYKLLTSILRTKINTHVDSNSIMSASQNGCRNGSRGTKELLLIDMAISQQVRRARKDLSTCWIDYKKAYDSVPHSWLRRVLELYKIDATLRTFLESCMGQWRTVLRYPGCRQIQGNDEPVWIKRGIFQGDSLSPLWFCLALNPVSTLLENSGLGYRLRKDGQVISHLLYMDDLKLFAPNKLQLMELLKVTETFSSAIRMEFGVDKCAVMYVKRGKIMGSEGLQLSDSIHLRSLSSSESYKYLGMSEALGINVTDMKQSLKERSFGRLKKVLNSLLSGGNKVRAFNGWAMPVLMYSFGILKWTQTELDALDRRVRTLLTENRMHHPRSSVMRLYIPRKCGGRGFLNAKTLHNREVCSLREYFLKADVGMHRDVVAVDKGLTPLSMAKENWRKPVVLTTDDRKKEWQGKELHGRFYRALHGPDVDFLASVSWLRFGDLFGETEGFVCAIMDEVMLTNNYRKYIMKDGTVDVCRACHCPGESIRHIISGCSRLANGEYLHRHNQVARIIHQQLALKFKLVESEVPYYKYVPDPVLVKDHVTLYWDQSIITDRTIVANKPDIVVIDRSARRVMIIDVTIPHDENLVKAEKEKQMKYLDLAHEVRDMWNMNSVIIVPIVVTANGLIAKSLDEHLSKLSLGGWIKGLIQKAVLLDTARIVRRFLSLQP

SEQ ID NO: 28378 - protein, 1208 aa, Xestia c-nigrum
MLTRHRAKLLRDAHLPSPGSSLSSASQPPGRATPVSTVSPVAAVASSSSDEFFSPPSTPPPPSRGRRRGRGRPPAGLGPRGQQASSRVPAAGGNVSRMRWTQSMNENVMRAYYGATEGGSNLIAYRGQMLSLFQVLEPAVNVDAQRLSDQVRVIQRNHMLDDTVLDRLRSESRSDLVTPASPMIAVQLQTIPCTPLRSDYDSEEDGDEVISVSTQCNAQLRSALEGAFREYRSTPPELRPRLPRLPMHKKNKALVCALDSQLSNCFDSSKDLADTHSILYCGAVAACRVAHVKFPNNDRTTRPKLAVPAWQCRIERRIGEARVLIGKLICFREGNTRPRVMRFVRRAFSGTDVSFRDYLARITERIDFLKQKICAWASRIRRYKRRVERYTQNRSFQSDERWVYRAWERPDQGVTYTRLPDDDAMCSFWRSIWSVPVSHTEGDWIRKVEQVCDQIQEMGAIIISPQDVACAVRPLPNWKSPGPDGLHNFWIKWFQKSHARLASQFQSALESGSLPQFMTTGITHLLHKSGSTAEPKNYRPITCLPTVYKVLTSILRAKINKHIESNSIMSTSQNGCRNGSRGTKELLLIDMAISQQVRRSRKNLSTCWIDYKKAYDSVPHTWLMRVLELYKINATLRAFLESCMGQWKTVLRYPGCRQIQGSDEPVWIKRGIFQGDSLSPLWFCLALNPLSTLLENSGLGYRLRKDGQVISHLLYMDDLKLFAPNKLQLLELLKVTETFSNAIRMEFGVDKCTVMYVKRGEIMESEGLQLSDSIHLRSLSSSESYKYLGMSEALGINVTDMKQSLKERFFGRLKKVLNSLLSGGNKVRAFNGWVMPVLMYSFGILKWTQTELDALDRRVRTLLTANRMHHPRSSMMRLYIPRKCGGRGFLNAKNLHNREVCSLREYFLEADVGMHRDVVSVDKGLTPLSLANGNWRKPKVLDTNDRREEWQGKELHGRFYRALHGPNVDFLASVSWLRFGDLFGETEGFVCAIMDEVMMTNNYRKYIVKDGTVDICRACHRPGESIRHIISGCSSLANGEYLHRHNLVARIIHQQLALKYNLVESEVPYYKYTPDPVLVNGNITLYWDRPITTDRTVVANRPDIVVIDRLERRTMIVDITVPHDENLVKAEQDKKNKYLDLAREVVDMWDVSTAIIVPIVVSANGLIAKSLDQHLRRLSLGSWIKGLIQKAVLLDTARIVRRFLSQEP

SEQ ID NO: 28379 - protein, 868 aa, Sesamia nonagrioides
MRFVRQAFSGTGISPREYINNVTERIDFLKQKVCAWASRIRRYKKRVDRYTQNRMFQSDERWVYRAWERPEQNEADECRPDDATTSAFWRGIWSGSVCHTEGDWTQDVEQVCEAIPEMDNILITPLDVATAVRSLPNWKSPGPDGLHNFWLKWLSSSHTCLASQFQSSLESGSLPQFLTTGIAHLLHKSGSTAEPKNYRPITCLPTVYKVLTSILKAKINNHLDSNSIMSVSQNGCRIGSRGTKELLLIDMAISQQVRRSRKDLSTCWIDYKKAYDSVPHTWLMRVLELYKINATLRIFLRSCMGQWKTVLRYPGSRQIQGNDEPVWIKRGIFQGDSLSPLWFCLALNPLSTLLEDSGLGYRLKRGGQVISHLLYMDDLKLFAPNKLHLMKLLNVTETFSSGIKMEFGVDKCAVMHVKRGQIMESEGITLPDSIHLRSLSSFESYKYLGMSEALGINDADMKQSLKERFFGRLKKVLNSLLSGGNKVRAFNGWIMPVLMYSFGILKWTQTELDALDRRVRTLLTANRMHHPRSSVMRLYIPRKCGGRGFLNAKTLHNREVCSLREYFLKTVVGMHHDVVTVDKGLTPLSMAKENWHKPIILTTDDRKMVWQSKEHHGRFYRALHGPDVDFLASVSWLRFGDLFGETEGFVCAIMDEVILTDNYRRYIMKDGTIDVCRACHHPGESIRHIISGCSRLANGEYLHRHNQVARIIHQQLALKYKLVDSEVPYYKYVPDPVLENDHVTLYWDRSIITDRTIVANKPDIVLVDRSERRAMIVDITIPHDENLVKAEKDKQIKYLDLAYEVVDMWEVDSAIIVPIVVTANGLIAKSLDQHLRRLSLGSWIKGLIQKAVLLDTARIVRKFLSLEP

SEQ ID NO: 28380 - protein, 882 aa, Apamea monoglypha
MRFVTRVMRFVTRVMRFVRQAFSGTGISPREYISNVTERIDFLKQKVCAWASRIRRYKRRVDRYTQNRMFQSDERWVYRAWERPEQNVTDVCRPDDANTNAFWRSIWSVPVYHAEGGWMQDIERVCETIPEMDPVLITPLDVARAVGPLPNWKSPGPDGLHNFWLKWLISSHSRLASQFQSSLEFGSLPQFLTTGVTHLLHKSGSPAEPKNYRPITCLSTVYKLLTSILRAKINTHIDNNSIMSASQNGCRNGSRGTKELLLIDMAISQQVRRSRKDLSTCWIDYKKAYDSVPHAWLMRVLELYKIDATLRTFLESCMGQWRTVLRYPGCRQIQGNDEPVWIKRGIFQGDSLSPLWFCLALNPLSTLLEDSGLGYRLKRGGQVISHLLYMDDLKLFAPNNLRLLELLKVTETFSSAIRMEFGVDKCAVMHVKRREIMESEGIQLSDSIHLRSLSSSESYKYLGMSEALGINVADMKQTLRERFFGRLKKVLVSLLSGGNKVRAFNSWVMPVLMYSFGILKWTQTELDALDRRVRTLLTANRMHHPRSSVMRLYIPRKCGGRGFLNAKTLHNREVCNLREYFIKAEVGMHRDVVAVDKGLTPLSMAKENWRKPVILTTDDRKEVWQSKELHGRFYRALHEPGVDFLASVSWLRFGDLFGETEGFVCAIMDEVVLTNNYRRYIMKDGTVDVCRACHRPGESIRHIISGCSRLANGEYLHRHNQVARIIHQQLALKYKLVDSEVPYYKYVPDPVLENDHVTLYWDRSIITDRTIVANKPDIVVIDRLARRTMIVDVTIPHDGNLVKAEKEKQIKYLDLAHEVVDMWNVSSAIIVPIVVSANGLMAESLDQHLSRLSLGGWIKGLIQKAVLLDTARIVRRFLSLEP

SEQ ID NO: 28381 - protein, 1199 aa, Mamestra configurata
MLTRAALQRARPPPPDPSLSSASPPPDIGSPLSPAVAVASSSSDEYFSPPTSPTSVRRQGRGRPPRGLGPRGQPAPSRVPATGGCVQRMRWTQSMNENVMRAYYGSTEGGTNLTAYRVRMLSLFQDLEPTVNVSAQRLSDQVRVIQRNHRLDDAALDRLRSEVLNNLIISTPTQTAVHAPVNGRITPRPNNVSDEVDDRVVTVSSQCNDRLRSALEDALREYRSTPTELRPRLPRLPMHKKNRALVCALDSLLQNIFESSESLVDTHSILYCGAVAACRIANVKFPGCDEAIRPKPAAPAWQRRIERRIDETRALIGKLYCFREGNTRPRVMRFVRRAFSGTEISPRDFTSRVTERIDFLKQKVCAWASRIRRYKRRVDRYSQNRMFQSDERWVYRAWERPEQSVTDVCRPDDVATSIFWRSIWSVPICHAEGGWMRDVERVCEAIPQMEKITITTLDVAKAVRPLPNWKSPGPDGLHNFWLKWYSSSHALLASQFQSSLDSGSLPQFLTTGVTHLLHKTGSPTEPKNYRPITCLSTVYKLLTSILRAKINEHIESNSIMSASQNGCRKGSRGTKELLLIDMAISQQVRRSRKDLSTCWIDYKKAYDSVPHTWLMKVLELYKIDATLRTFLESCMRQWKTVLRYPGCRPIQGSDEPVWIKRGIFQGDSLSPLWFCLALNPLSTLLEDSGLGYRLRRGGQAISHLLYMDDLKLFAPNNLRLMELLKVTETFSSAIRMEFGVDKCAVMHVKKGEIMESEGIHLSDSIQVRSLSSTETYKYLGMLEALGINGTDMKQSLRERFFGRLKKVLNSLLSGGNKVRAFNGWVMPVLMYTFGILKWTQTELDALDRRVRTLLTANRMHHPRSSVMRLYIPRKCGGRGFLNAKTLHNREMCSLREYFLKADVGMHRDVVAVDKGLTPLSMAKENWRTPVILTTDDRKEVWKGKELHGRFYRALHGSDVDFSASVAWLRFGDLFGETEGFVCAIMDEVILTNNYRRHIMKDGTVDMCRACHRPGESIRHIISGCSRLANGEYLHRHNQVARIIHQQLALKYNLVDSEVPYYKYVPDPVLENDHVTLYWDRSIITDRTIVANKPDIVVIDRLARRTMIIDVTIPHDENLVKAEKEKQIKYLDLAHEVVDMWNVESAVIVPIVVTANGLMAKSFDDHLSKLALRSWVKGLIQKAVLLDTARIVRRFLSLEP

SEQ ID NO: 28382 - protein, 1199 aa, Mamestra configurata
MLTRAALQRARPPPPDPSLSSASPPPDIGSPLSPAVAVASSSSDEYFSPPTSPTPVRRQGRGRPPRGLGPRGQPAPSRVPATGGCVQRMRWTQSMNENVMRAYYGSTEGGTNLTAYRVRMLSLFQDLEPTVNVSAQRLSDQVRVIQRNHRLDDAALDRLRSEVLNNLIISTPTQTAVQAPVNGRITPRPNNVSDEVDDRVVTVSSQCNDRLRSALEDALREYRSTPTELRPRLPRLPMHKKNRALVCALDSLLQNIFESSESLVDTHSILYCGAVAACRIANVKFPGCDEAIRPKPAAPAWQRRIERRIDETRALIGKLYCFREGNTRPRVMRFVRRAFSGTEISPRDFTSRVTERIDFLKQKVCAWASRIRRYKRRVDRYSQNRMFQSDERWVYRAWERPEQSVTDVCRPDDVATSIFWRSIWSVPICHAEGGWMRDVERVCEAIPQMEKITITTLDVAKAVRPLPNWKSPGPDGLHNFWLKWYSSSHALLASQFQSSLDSGSLPQFLTTGVTHLLHKTGSPTEPKNYRPITCLSTVYKLLTSILRAKINEHIESNSIMSASQNGCRKGSRGTKELLLIDMAISQQVRRSRKDLSTCWIDYKKAYDSVPHTWLMKVLELYKIDATLRTFLESCMRQWKTVLRYPGCRPIQGSDEPVWIKRGIFQGDSLSPLWFCLALNPLSTLLEDSGLGYRLRRGGQAISHLLYMDDLKLFAPNNLRLMELLKVTETFSSAIRMEFGVDKCAVMHVKKGEIMESEGIHLSDSIQVRSLSSTETYKYLGMLEALGINGTDMKQSLRERFFGRLKKVLNSLLSGGNKVRAFNGWVMPVLMYTFGILKWTQTELDALDRRVRTLLTANRMHHPRSSVMRLYIPRKCGGRGFLNAKTLHNREMCSLREYFLKADVGMHRDVVAVDKGLTPLSMAKENWRTPVILTTDDRKEVWKGKELHGRFYRALHGSDVDFSASVAWLRFGDLFGETEGFVCAIMDEVILTNNYRRHIMKDGTVDMCRACHRPGESIRHIISGCSRLANGEYLHRHNQVARIIHQQLALKYKLVDSEVPYYKYVPDPVLENDHVTLYWDRSIITDRTIVANKPDIVVIDRLARRTMIIDVTIPHDENLVKAEKEKQIKYLDLAHEVVDMWNVESAVIVPIVVTANGLMAKSFDDHLSKLALRSWVKGLIQKAVLLDTARIVRRFLSLEP

SEQ ID NO: 28383 - protein, 1111 aa, Noctua janthe
MRWTQTINENVMRAYYGSTEGRTNLTAYRVRMLSLFQVLEPIVNVSAQRLSDQVRVIQRNHMLDDAALDRLRSEVLSNRIVLSPAQTAVQASAIDATPPRSNPAVVEEDDRVAMVSSQCNDRLRSALEDALREYRSTPTKLRPRLPRLPMHNKNRALVCALDSQLKNIFESSENLVDTHSILYCGAVAACRLANVKFPNYDVAIRPKPAVPTWQRRIECRIDEARVLIGKLHCFREGNTRPRVMRFVRRAFSGTGISPQEYMSRVTERIDFLKQKIYAWANRIRRYKRRVDRYSQNRIFQSDERWVYRAWERPEQNMTDVCRPDDAATSSFWRSIWSVPVCHTEADWMRDVERACEPVPEMEPILITPIDIARAVRPLPNWKSPGPDRLHNFWLKWLSSSHTCLASQFQSSLESGSLPQFLTTGVTHLLHKSGSPAEPKNYRPTTCLSTVYKLLTSILRVKINTHIDKNFIMSASQNGCRNRSRGTKELLLIDMAISQQVRRSLKDLSTCWIDYKKAYDSVPHTWLMRVLELYKIDATLRAFLESCMGQWRTVLRYPGCRQIQGNDEPVWIKRGIFQGDSLSPLWFCLALNPLSTLLEDLGLGYRLRRGGQVISHLLYMDDLKLFAPNKLRLMELLKVTETFSNAIRMEFGVDKCAVMYVKRGEIMESEGIQLSDSIHLRSLSSSESYKYLGMSESLGINVTDMKQSLRERFFGRLNKVLNSLLSGGNKVRAFNGWVMPVLMYSFGVLKWTQTELDALDRRVRTLLTANRMHHPRSSVMRLYIPRKCGGRGFLNAKTLHNREICSLREYFLKTEVGMHRDVVAVDKGLTPLSMAKENWRKPVVLTTDDRKEVWQGKELHGRFYRALHGPDVDFLASVSWLRFGDLFGETEGFVCAIMDEVMLTNNCRKYIMKDGTVDVCRACHRLGESIRHIISGCSRLANGEYLHRHNQVARIIHQQLALKNKLVKSEVPYYKYVPDPVLEKDHVTLYWDRSIITDRTIVANKPDIVVIDRLARRVMIVDVTIPHDENLVKAEKEKQIKYLDLAHEVVDMWNVNSAIIVPIVVTANGLIAKSLDDHLSRLSFGGWIKGLIQKAVLLDTARIVRRFLSLEP

SEQ ID NO: 28384 - protein, 1199 aa, Noctua janthe
MITRAAYRRARLTTPDSSLSSASPPPDPGSPVSPAAAVASSSSDEYFSPPTSPTPVRRQGRGRPPKSLGLRGHPAPSRVPAAGGCVQRMRWTQTINENVMRAYYGSTEGGTNLTAYRVRMLSLFQVLEPIVNVSAQRLSDQVRVIQRNHMLDDAALDRLRSEVLSNRIVLTPAQTAVQASTIDATPPRSNPAVVEEDDRVAMVSSQCNDRLRSALEDALCEYRSTPTKLRPRLPRLPMHNKNRALVCALDSQLKNIFESSENLVDTHSILYCGAVAACRLANVKFPNYDVAIRPKPAVPTWQRRIECRIDEARVLIGKLHCFREGNTRPRVMRFVRRAFSGTGISPQEYMSRVTERIDFLKQKVYAWANRIRRYKRRVDRYSQNRIFQSDERWVYRAWERPEQNMTDVCRPDDAATSSFWRSIWSVPVCHTEADWMRDVERACEPIPEMEPILITSIDITRAVRPLPNWKSPGPDGLHNFWLKWLSSSHACLASQFQSSLESGSLPQFLTTGVTHLLHKSGSPAEPKNYRPITCLSTVYKLLTSILRVKINTHIDKNFIMSASQNGCRNRSRGTKELLLIDMAISQQVRRSRKDLSTCWIDYKKAYDSVPHTWLMRVLELYKIDATLRAFLESCMGQWRTVLRYPGCRQIQGNDEPVWIKRGIFQGDSLSPLWFCLALNPLSTLLEDSGLGYRLRRGGQVISHLLYMDDLKLFAPNKLRLMELLKVTETFSNAIRMEFGVDKCAVMYVKRGEIMESEGIQLSDSIHLRSLSSSESYKYLGMSESLGINVTDMKQSLRERFFGRLNKVLNSLLSGGNKVRAFNGWVMPVLMYSFGVLKWTQTELDALDRRVRTLLTANRMHHPRSSVMRLYIPRKCGGRGFLNAKTLHNREICSLREYFLKTEVGMHRDVVAVDKGLTPLSMAKENWRKPVVLTTDDRKEVWQGKELHGRFYRALHGPDVDFLASVSWLRFGDLFGETEGFVCAIMDEVMLTNNYRKYIMKDGTVDVCRACHRPGESIRHIISGCSRLANGEYLHRHNQVARIIHQQLALKYKLVESEVPYYKYVPDPVLEKDHVTLYWDRSIITDRTIVANKPDIVVIDRLARRVMIVDVTIPHDENLVKAEKEKQIKYLDLAHEVVDMWNVNSAIIVPIVVTANGLIAKSLDDHLSRLSLGGWIKGLIQKAVLLDTARIVRRFLSLEP

SEQ ID NO: 28385 - protein, 868 aa, Mythimna ferrago
MRYVRRAFSGTGVSPREYLAHVTERIDFLKQKVCAWANRIRRYKRRVDRYSQNRMFQSDERWVYRDWERPEQSVTDVLRPDVAATNEFWRSIWSVPVCHTEGGWMRDIERVCEAIPEMEKVFISPIDVARAVRPLPNWKSPGPDGLQNFWLKWYSSSHALLASQFQSSLESGSLPQFLTTGVTHLLHKTGSTAEPKNYRPITCLSTVYKLLTSILRTKINNHIENNSIMSASQNGCRNGSRGTKELLLIDMAISQQVRRSSKDLSTCWIDYKKAYDSVPHTWLMRVLELYKIDATLRTFLESCMGEWNTVLRYPGCRSIRGDDEPIWIKRGIFQGDSLSPLWFCLALNPLSTLLEDSGLGYRLRRGGQVLSHLLYMDDLKLIAPNKLQLMELLKVTETFSNAIRMEFGVDKCAVMHVKRGEIMESEGIQLSDSIHLRSLSSTETYKYLGMSEALGINVTDMKQSLKERFFGRLKKVLNSLLSGGNKVRAFNGWVMPVLMYSFGILKWTQTELDALDRRVRTLLTANRMHHPRSSVMRLYIPRKCGGRGFLNAKTLHNREVCSLREYFQKTDVGMHRDVVAVDKGLTPLSMAKENWRKPVVLTTDDRREVWKNKELHGRFYRALHEPDVDFGASVAWLRFSNLFGETEGFICAIMDEVILTNNYRRYIMKDGTLDVCRACHRPGESIRHIISGCSRLANGEYLHRHNQVARIIHQQLALKYKLMESEVPYYKYVPDPVLENDHVTLYWDRSIITDRTIIANKPDIVVIDRLARRAMIVDITIPHDENLVKAEKEKKIKYLDLAHEVVDLWNVDSAVIVPIVVSVNGLIAKSFDDHLSKLALRGWIKGLIQKAVLLDTARIVRRFLSLEP

SEQ ID NO: 28386 - protein, 868 aa, Mythimna ferrago
MRFVRRAFSGTEISPREYMSRVTERIDFLKQKVCAWANRIRRYKRRVDRYSQNRMFQSDERWVYRAWERPGQNVTDGFRPDSVATNTFWRSIWSEPVCHNEGGWMRDVERVCEAIPEMDKVFITPLDVARAVRPLPNWKSPGPDGLQNFWLKWYSSSHAILASQFQSSLESGSLPQILTTGTTHLLHKTGSTADPKNYRPITCLSTVYKLLTSILRVKITLHIEKNSIMFASQNGCRNGSRGTKELLLIDMAISQQVRRSRKDLSTCWIDYKKAYDSVPHTWLMKVLELYKIDATLRTFLESCMRQWKTVLRYPGCRPIQGNDEPLWIRRGIFQGDSLSPLWFCLALNPLSTLLEDSGLGYRLRRGGQVLSHLLYMDDLKLFAHNNSQLMELLKVTETFSSAIRMEFGVDKCAVMHVRRGEIVESEGIQLSDSIHLRSLSSTETYKYLGMSEALGINVADMKQTLKERFFGRLKKVLNSLLSGGNKVRAFNGWVMPVLMYSFGILKWTQTELDALDRRVRTLLTANRMHHPRSSVMRLYIPRKCGGRGFLNAKTLHNREVCSLREYFLKTDVGMHRDVVAVDKGLTPLSMAKENWRKPVVLTTDDRKEVWKSKELHGRFFRALHEPDVDFSASVAWLRFSNLFGETEGFVCAIMDEVILTNNYRRHIMKDGTVDVCRACHRPGESIRHIISGCSRLANGEYLHRHNQVARILHQQLALKYNLVDSEVPYYRYVPDPVLENDHVTLYWDRSIITDRTIVANKPDIVVIDRLARRAMIVDVTIPHDENLVKAEKEKQIKYLDLAHEVVDMWNVDSAIIVPIVVTANGLIAKSFDDHLSKLSLHGWIKGLIQKAVLLDTARIVRRFLSLEP

SEQ ID NO: 28387 - protein, 962 aa, Hydraecia micacea
MHKKNRALVCALNSQLKNFFESSEDLVDTHSILYCAAVAACRLANVKFPICDGATRPKPAVPAWQHRIERRIDGARVLIGKLYCFREGNTRPRVMRFVKRAFSGTGISPREYISHVTERIDFLKQKVCAWASRIRRYKRRIDRYTQNRMFQSDERWVYRAWERPEQNMTDVCRPDDATTSAFWRSIWSVPVCHTEAGWIQDVERVCETVPEMETILITPLDVARAVRPLPNWKSPGPDGLHNFWLKWLNSSHTCLASQFQSSLESGSLPQFLTTGVTHLLHKSGSPAEPKNYRPITCLSTVYKLLTSILRAKINTHIENNSIMSASQNGCRNGSRGTKELLLIDMAISQQVRRSRKDLSTCWIDYKKAYDSVPHTWLMRVLELYKIDATLRTFLESCMGQWKTVLRYPGCRQIQGNDEPVWIKRGIFQGDSLSPLWFCLALNPLSTLLEDSSLGYRLRRGGQVISHLLYMDDLKLFAPTGLHLMELLKVTETFSSAIRMEFGVDKCAVMHVKRGEIMESEGIQLSDSINLRSLSSSESYKYLGMSEALGINVTDMKQSLKERFFCRLRKVLISLLSGGNKVRAFNGWVMPVLMYSFGILKWTQTELDALDRRVRTLLTANRMHHPRSSVMRLYIPRKCGGRGFLNAKTLHNREVCSLREYFLKAEVGMHRDVVAVDKGLTPLSMAKENWRKPVVLTTDDRKKVWQSKELHGRFYRALHEPGVDFLASVSWLRFGDLFGETEGFVCAIMDEVILTNNYRRHIMKDGTVDVCRACHRPGESIRHIISGCSRLANGEYLHRHNQVARIIHQQLALKYKLVDSEVPYYKYVPDPVLENDHVTLYWDRSIITDRTIVANKPDIVVIDRLARRTMIVDVTIPHDGNLVKAEKEKQMKYLDLAHEVVDMWNVSSAVIVPIVVSANGLMAEGLDEHLSRLSLGGWIKSLIQKAVLLDTARIVRRFLSLEP

SEQ ID NO: 28388 - protein, 887 aa, Hydraecia micacea
MERRKGGLCPAVGHNRLIIIIIMKRAFSGTGISPREYISHVTERIDFLKQKVCAWASRIRRYKRRIDRYTQNRMFQSDERWVYRAWERPEQNMTDVCRPDDATTSAFWRSIWSVPVCHTEAGWIQDVERVCETVPEMETILITPLDVARAVRPLPNWKSPGPDGLHNFWLKWLNSSHTCLASQFQSSLESGSLPQFLTTGVTHLLHKSGSPAEPKNYRPITCLSTVYKLLTSILRAKINTHIENNSIMSASQNGCRNGSRGTKELLLIDMAISQQVRRSRKDLSTCWIDYKKAYDSVPHTWLMRVLELYKIDATLRTFLESCMGQWKTVLRYPGCRQIQGNDEPVWIKRGIFQGDSLSPLWFCLALNPLSTLLEDSSLGYRLRRGGQVISHLLYMDDLKLFAPTGLHLMELLKVTETFSSAIRMEFGVDKCAVMHVKRGEIMESEGIQLSDSINLRSLSSSESYKYLGMSEALGINVTDMKQSLKERFFCRLRKVLISLLSGGNKVRAFNGWVMPVLMYSFGILKWTQTELDALDRRVRTLLTANRMHHPRSSVMRLYIPRKCGGRGFLNAKTLHNREVCSLREYFLKAEVGMHRDVVAVDKGLTPLSMAKENWRKPVVLTTDDRKKVWQSKELHGRFYRALHEPGVDFLASVSWLRFGDLFGETEGFVCAIMDEVILTNNYRRHIMKDGTVDVCRACHRPGESIRHIISGCSRLANGEYLHRHNQVARIIHQQLALKYKLVDSEVPYYKYVPDPVLENDHVTLYWDRSIITDRTIVANKPDIVVIDRLARRTMIVDVTIPHDGNLVKAEKEKQMKYLDLAHEVVDMWNVSSAVIVPIVVSANGLMAEGLDEHLSRLSLGGWIKSLIQKAVLLDTARIVRRFLSLEP

SEQ ID NO: 28389 - protein, 1050 aa, Noctua pronuba
MLDDAVLDRLRSEVLSNRIVLTPSQTVVQTTAIDVSPPRSNPAVVEEDDRVATVSSQCNDRLRSALEDALREYRYTPTELRPRLPRLPMHKKNRALVCALDSQLKNLFESSEDLVDTHSILYCGAVAACRLANVKFTNSDAATRPKPAVPAWQCRIERRIDGARVLIGKLHCFREGNTRPRVMRFVRRAFSGTGISPQEYMSRVTERIDFLKQKVYAWANRIRRYKRRVDRYSQNRMFQSDERWVYRAWERPEQNITDVCRPDDATTSSFWSSIWSVPVCHTEGDWMRAVERVCEPIPEMEPILITSLDVARSVRPLPNWKSPGPDGLHNFWLKWLSSSHTCLASQFQSSLESGALPQFLTTGVTHLLHKSGNPAEPKNYRPITCLSTVYKLLTSILRAKINTHIDKNSIMSASQNGCRNGSRGTKELLLIDMAISQQVRRSRKDLSTCWIDYKKAYDSVPHTWLMRVLELYKIDATLRTFLESCMGQWRTVLRYPGCRQIQGNDEPVWIKRGIFQGDSLSPLWFCLALNPLSTLLEDSGLGYRLRRGGQVISHLLYMDDLKLFAPNKLRLMELLKVTETFSSAIRMEFGVDKCAVMYVKRGEIMESEGIQLSDSIHLRSLSSSESYKYLGMSEALGINVTDMKQSLRERFFGRLKKVLNSLLSGGNKVRAFNGWVMPVLMYSFGILKWTQTELDALDRRVRTLLTANRMHHPRSSVMRLYIPRKCGGRGFLNAKTLHNRELCSLREYFLKAEVGMHRDVVAVDKGLTPLSMAKENWRKPVVLTTDDRKEVWQGKELHGRFYRALHGPDVDFLASVSWLRFGDLFGETEGFVCAIMDEVMLTNNYRKYIMKDGTVDVCRACHRPGESIRHIISGCSRLANGEYLHRHNQVARIIHQQLALKYKLVESEVPYYKYVPDPVLEKDHVTLYWDRSIITDRTIVANKPDIVVIDRSARRVMIVDVTIPHDENLVKAEKEKQIKYLDLAHEVVDMWNVNSAIIVPIVVTANGLIAKSLDDHLSRLSLGGWIKGLIQKAVLLDTARIVRRFLSLEP

SEQ ID NO: 28390 - protein, 1080 aa, Noctua pronuba
MLSLFQVLEPTVNVSAQRLSDQVRVIQRNHMLDDAVLDRLRSEVLSNRIVLTPSQTVVQTTAIDVSPPRSNPAVVEEEDRVATVSSQCNDRLRSALEDALREYRYTPTELRPRLPRLPMHKKNRALVCALDSQLKNLFESSEDLVDTHSILYCGAVAACRLANVKFTNSDTATRPKPAVPAWQCRIERRIDGARVLIGKLHCFREGNTRPRVMRFVRRAFSGTGISPQEYMSRVTERIDFLKQKVYAWANRIRRYKRRVDRYSQNRMFQSDERWVYRTWERPEQNMTDVCRPDDATTSSFWSSIWSVPVCHTEGDWMRAVERMCEPIPEMEPILITSLDVARSVRPLPNWKSPGPDGLHNFWLKWLSSSHTCLASQFQSSLESGALPQFLTTGVTHLLHKSGNPAEPKNYRPITCLSTVYKLLTSILRAKINTHIDKNSIMSASQNGCRNGSRGTKELLLIDMAISQQVRRSRKDLSTCWIDYKKAYDSVPHTWLMRVLELYKIDRTLRTFLESCMGQWRTVLRYPGCRQIQGNDEPVWIKRGIFQGDSLSPLWFCLALNPLSTLLEDSGLGYRLRRGGQVISHLLYMDDLKLFAPNKLRLMELLKVTETFSSAIRMEFGVDKCAVMYVKRGEIMESEGIQLSDSIHLRSLSSSESYKYLGMSEALGINVTDMKQSLRERFFGRLKKVLNSLLSGGNKVRAFNGWVMPVLMYSFGILKWTQTELDALDRRVRTLLTANRMHHPRSSVMRLYIPRKCGGRGFLNAKTLHNRELCSLREYFLKAEVGMHRDVVAVDKGLTPLSMAKENWRKPVVLTTDDRKEVWQGKELHGRFYRALHGPDVDFLASVSWLRFGDLFGETEGFVCAIMDEVMLTNNYRKYIMKDGTVDVCRACHRPGKSIRHIISGCSRLANGEYLHRHNQVARIIHQQLALKYKLVESEVPYYKYVPDPVLEKDHVTLYWDRSILTDRTIVTNKPDIVVIDRSARRVMIVDVTIPHDENLVKAEKEKQIKYLDLAHEVVDMWNVNSAIIVPIVVTANGLMAKSLDDHLSRLSLGGWIKGLIQKAVLLDTARIVRRFLSLEP

SEQ ID NO: 28391 - protein, 962 aa, Ochropleura plecta
MHKKNRALVCALDSQLKNLFESSEDLVDTHSILYCGAVAVCRLANVKFPNCDVATRPKPSVPAWQCRIERRIDEARALIGKLYCFREGNTRPRVMRFVRRAFSGTGISPQEYMSRTTERIDFLKQKVYAWANRIQRYKRRVDRYSQNRMFRSDERWVYRAWERPEQSVTDVCRPDDVATSSFWHSIWSVRVCHTEAGWMRDVERVCETIPEMEPILITSLDIASAVRPLPNWKSPGPDGLHNFWLKWLSSSHTRLASQFQSCLESGSLPQFLTTGVTHLLYKSGSPAEPKNYRPITCLSTVYKLLTSILRAKINSHIVKNSIISASQNGCRNGSRGTKELLLIDMAISQQVRRSRKDLSTCWIDYKKAYDSVPHTWLKRVLELYKIDTTLRTFLESCMGQWRTVLRYPGCRQIQGNDEPVWIKRGIFQGDSLSPLWFCLALNPLSTLLEDSGLGYRLRRGGQVISHLFYMDDLKLFAPNKLRLMELLKVTETFSNAIRMEFGVDKCAVMYVKRGEIMESEGIHLSDSIHLRSLSSSESYKYLGMSEALGINVADMKQLLRERFFGRLKKVLKSLLSGGNKVRAFNSWVMPVLMYSFGILKWTQTELDALDRRVRTLLTANRMHHPRSSVMRLYIPRKCGGGGFLNAKTLHNREVCSLREYFLKTDVGMHRDVVAVDKGLTPLSMAKENWRKPVVLTTDYRKEVWQGKELHGRFYKALHGPDVDFLASVSWLRFGDLFGETEGFVCAIMDEVMLTNNYRKYIMKDGTVDVCRACHRPGESIRHIISGCSRLANGEYLHRHNQVARIIHQQLALKYNLVESEVPYYKYVPDPVLEKDHVTLYWDRSIITDRTIVANKPDIVVIDRSARRVMIIDVTIPHDENLVKAEKEKQLKYLDLAHEVVDMWNVNSAIIVPIVITANGLIAKSLDEHLSKLSLGGWIKGLIQKAVLLNTARIVRRFLSLEP

SEQ ID NO: 28392 - protein, 1098 aa, Ochropleura plecta
MRAYYGSTEGGTNLTAYRVRMLSLFQDLEPTINVSAQRLSDQVRVIQRNHMLDDAALDRLRSEVLSNRIILTTPQTAMQASVIDGMQPRSDPAVVEEDDRVATVSSQCNERLRSALENALRDYRSTPAELRPRLPRLPMHKKNRALVCALDSQLKNLFESSEDLVDTHSILYCGAVAVCRLANVKFPNCDVATRPKPSVPAWQCRIERRIDEARVLIGKLYCFREGNTRPGVMRFVRRAFSGTGISPQEYMSRTTERIDFLKQKVYAWANRIRRYKRRVDRYSQNRMFRSDERWVYRAWERPEQSVTDVCRPDDVATSSFWHSIWSVPVCHTEADWMRDVERVCETIPEMEPILITSLDIASAVRPLPNWKSPGPDGLHNFWLKWLSSSHTRLASQFQSCLESGSLPQFLTTGVTHLLYKSGSPAEPKNYRPITCLSTVYKLLTSILRAKINSHIDNNSIMSASQNGCRNGSRGTKELLLIDMAISQQVRRSRKDLSTCWIDYKKAYDSVPHTWLKRVLELYKIDATLRAFLESCMGQWRTVLRYPGCRQIQGNDEPVWIKRGIFQGDSLSPLWFCLALNPLSTLLEDSGLGYRLRRGGQVISHLLYMDDLKLFAPNKLRLMELLKVTETFSNAIRMEFGVDKCAVMYVKRGEIMESEGIQLSDSIHLRSLSSSESYKYLGMSEALGINVADMKQLLRERFFGRLKKVLKSLLSGGNKVRAFNSWVMPVLMYSFGILKWTQTELDALDRRVRTLLTGNRMHHPRSSVMRLYIPRKCGGRGFLNAKTLHNREVCSLREYFLKTDVGMHRDVVAVDKGLTPLSMAKENWRKPVVLTTDDRKVVWQGKELHGRFYKALHGPDVDFLESVSWLRFGDLFGETEGFVCAIMDEVMLTNNYRKYIMKDGTVDVCRACHRPGESIRHIISGCSRLANSEYLHRHNQVARIIHLALKYNLVESEVPYYKYVPDPVLEKDHVTLYWDRSIITDRTIVANKPDIVVIDRSARRVMIIDVTIPHDENLVKAEKEKQLKYLDLAHEVVDMWNVNSAIIVPIVVTANGLIAKSFDEHLSKLSLGGWIKGLIQKAVLLDTARIVRRFLSLEP

SEQ ID NO: 28393 - protein, 1199 aa, Hecatera dysodea
MLTRAATLRARHPPPGSPLSSASPPPDIEPQVSPAAAVASSSSDEYFSPPTSPTPVRRQGRGRPPRGLGPRGQPAPSRVPATGGCVQRMRWTQSMNENVMRAYYGSTEGGTNLTAYRVRMLSLFQDLEPAVNVSAQRLSDQVRVIQRSHRLDDAALERLRSEVLNNLTISTQTQTAVQAPASGASIPRANNDSDELDERVVTVSSQCNDRLRSALEDALRVYRSTPAELRPRLPRLPMHKKNRALVCALDSLLQNTFLSSENLVDTHSILYCGAVAACRLANVKFPSCDEAIRPKPAAPAWQCRIERRVDEARALIGKLYCFREGNTRPRVMRFVRRAFAGTGISPHEYTSRITERIDFLKQKVCAWANRIRRYKRRVDRYSQNRMFQSDERWVYRNWERPEQSVTDVCRPDDVATSTFWRSIWSVPVRHTEGGWMRDVERVCEAIPQMEKIIITPTDVATAVRPLPNWKSPGPDGLHNFWLKWYSSSHALLASQFQSSLESGSLPQFLTTGVTHLLHKTGSPAEPKNYRPITCLSTVYKLLTSILRVKINKHIESNSIMSSSQNGCRKGSRGTKELLLIDMAISQQVRRSRKDLSTCWIDYKKAYDSVPHTWLMKVLELYKIDATLRTFLESCMRQWKTVLRYPGCRPIQGNDEPVWIKRGIFQGDSLSPLWFCLALNPLSTLLEDSGLGYRLRRGGQAISHLLYMDDLKLFAHNKLRLMELLKVTENFSSAIRMEFGVDKCAVMHVKKGEIVESEGIQLSDSIQVRSLSSTETYKYLGMSEALGINGADMKQSLKERFFGHLKMVLNSLLSGGNKVRAFNGWVMPVLMYSFGILKWTQTELDALDRRVRTLLTANRMHHPRSSVMRLYIPRKCGGRGFLNAKTLHNREMCSLREYFLKADVGMHRDVVAVDKGLTPLSMAKENWRKPVILTTDDRKEVWRGKELHGRFYRALYGSDVDFSASVAWLRFGDLFGETEGFVCAIMDEVILTNNYRRHIMKDGTVDVCRACHCPGDSIRHIISGCSRLANGEYLHRHNQVARIIHQQLALKYKLVESEVPYYKYVPDPVLENDHATLYWDRSIITDRTIVANKPDIVVIDRLARRTMIIDVTIPHDENLVKAEKEKHIKYLDLAHEVVDMWNVDSAVIVPIVVTANGLMAKSFDDHLSKLALHGWLKGLIQKAVLLDTARIVRRFLSLEP

SEQ ID NO: 28394 - protein, 1200 aa, Mythimna impura
MLTRAAARRARHPPPGSPLSSASPPPDLESPVSPAAAVASSSSDEYFSPPTSPTPVRRPGRGRPPRSLGSRGQPAPSRVPAAGGCVQRMRWTQSMNENVMRAYYGSTEGGTNLTAYRVRMLSLFQELEPTVNVTTQRLSDQVRVIQRNHRLDDAALDRLRSEVLSNRIISTPIQTQTAAPRATDAILPQSNHVDDEADDRVVTVSSQCNDRLRSALEDALREYRSTPIDLRPRLPRLPMHKKNRALVCALDSLLENVFESSVNLADTHSILYCGAIAACRLANVKLPSCDGATRPKSVAPAWQCRIEKRIDGARALIGKLYCFREGNTRPRVMRYVRRAFSGTGISPPEYLSRVTERIDFLKQKVCAWANRIRRYKRRVDRYSQNRMFQSDERWVYRAWERPEQNVTDVTRPDAVATNAFWRNIWSVPVCHTEDGWMREVERVCEAIPEMEKVIISPTDVARAVRPLPNWKSPGPDGLQNFWLKWYSSSHALLASQFQSSLESGSLPQFLTTGVTHLLHKTGSTAEPKNYRPITCLSTVYKLLTSILRTKINQHIDNNSIMSASQNGCRNGSRGTKELLLIDMTISQQVRRSRKDLSTCWIDYKKAYDSVPHTWLMRVLELYKIDATLRTFLESCMGQWNTVLRYPGCRSIRRDDEPIWIKRGIFQGDSLSPLWFCLALNPLSTLLEESGLGYRLRRDGQVLSHLLYMDDLKLIAPNKLRLMELLKVTETFSNAIRMEFGVDKCAVMHVKQGEIMESEGIQLSDSIHLRSLSSTETYKYLGMSEALGINVADMKQSLKERFFGRLKKVLNSLLSGGNKVRAFNGWVMPVLMYSFGILKWTQTELDALYRRVRTLLTANRMHHPRSSVMRLYIPRKCGGRGFLNTKTLHNREVCSLREYFHKTDVGMHRDVVAVDKGLTPLSMAKENWRKPVVLTTDDRKEVWKSKELHGRFYRALHESDVDFAASVAWLRFSNLFGETEGFICAIMNEVILTNNYRRYIMKDGTIDVCRACHRPGESIRHIISGCSRLANGEYLHRHNQVARIIHQQLALKYNLVYSEVPYYRYVPDPVLENDHVTLYWDRSIITDRTIVANKPDIVVIDRLARRVMIVDVTIPHDENLVKAEKEKQIKYLDLAHEVVDMWNVDSAVIVPIVVTANGLIAKSFDDHLSKLSLRGWIKGLIQKAVLLDTARIVRRFLSLEP

SEQ ID NO: 28395 - protein, 1199 aa, Phlogophora meticulosa
MLTRAAKRRARPPSPDSPLSSASPPPDLGSPVTPTVAAASSSSDEYFSPPTSPTPVRRQGRGRPPKSLGSRGQPAPSQVPATGGCVQRMRWTQSMNENVMRAYYGSTEGGTNLTAYRARMLSLFQVLEPTVNVSAQRLSDQVRVIQRNHRLDDTALDRLRSEVLNNHIVLTSTQTAVQAPIINATPSPSNHVSEEADDRVVTVSSQYNEKLRSALEDALREYRSTPTELRPRLPRLPMHKKNRALVCNLDSLLKDLFESSGDLVDTHSILYCAAVAACRLANVKFPNNDVAIRPKPAVPAWQSRIERRIDGARVLIGKLYCFREGNTRPRVMRFVRRAFAGTGISPREYMSRIVERIDFLKQKVCAWANRIRRYKRRVDRYSQNRMFQSDERWVYRAWERPEQDVADVHRPDDTTTNTFWRNIWSVPVCHTEAHWIRDVERVCETITDMEKIIITPLDVATAVRPLPNWKAPGPDGLHNFWLKWLGSSHTRLASQFQSCLESGSLPQFLTTGITHLLYKSGSTTEPKNYRPITCLSTVYKLLTSILRAKIAEHIVGNSIMSASQNGCRNGSRGTKELLLIDMAISQQVRRSHKDLSTCWIDYKKAYDSVPHAWLMRVLELYKIDATLRTFLESCMGQWRTVLRYPGCRQIQGNDEPIWIKRGIFQGDSLSPLWFCLALNPLSTLLEDSGLGYRLRRGGQVISHLLYMDDLKLFASNNLQLMELLKITESFSSTIRMEFGVDKCAVMHVKRGEIVESEGIQLSDSIQLRSLSSSDNYKYLGMSEALGINVTDMKQSLKERFFGRLKKVLNSLLSGGNKVRAFNGWVMPVLMYSFGILKWTQTELDALDRRVRTLLTANRMHHPRSSVMRLYIPRKCGGRGFLNAKTLYNREVCNLRDYFFKTEVGMHRDVVAVDKGLTPLSMAKENWRKPVVLTTDDRKQVWQSKELHGRFYRALHGPDVDFIASVSWLRFGDLFGETEGFVCAIMDEVILTNNYRKHIMKDGTVDMCRACHRPGESIRHIISGCSRLANGEYLHRHNQVARIIHQQLALRYKLVESEVPYYKYVPDPVLEDDHVTLYWDRSIITDRTIVANKPDIVVIDRLARRAMIVDVTIPHDENLVKAEKEKQIKYLDLAHEVVDMWNVDSAVIVPIVVTANGLLAKSLDDHLSRLSLHGWIKGLIQKAVLLDTARIVRRFLSLQP

SEQ ID NO: 28396 - protein, 1199 aa, Phlogophora meticulosa
MITRAATRRARPPSPDSPLSSASPPPDLGSPVTPAVAAASSSSDEYFSPPTSPTPVRRQGRGRPPKSLGSRSQPAPSQVPATGGCVQRMRWTQSMNENVMRAYYGSTEGGTNLTAYRVRMLSLFQGFEPTVNVSAQRLSDQVRVIQRNHRLDDAALDRLRSEMLSNHIVLTSTQTAVQAPAFNAILPRSNHVSNEADDRVDTVCSQYNDRFRSALEDALREYRSTPTELRPRLPRLPMHRKNRALVCALDSLLKNFFESSEDLVDTHSILYCAAVAACRLANVKFPKNDLAIRPKPAIPAWQSRIERRIDGARVLIGKLYCFREGNTRPRVMRFVRRAFSGTGISPREYMSRIVERIDFLKQKVCAWANRIRRYKRRVDRYSQNRMFQSDERWVYRAWERPEQDVAGEHRPDDVATNAFWRSIWSVPAHHVEAHWMSDYESVCETIPEMEKIIITPEDVATAVRPVPNWKSPGPDGLHNFWLKWLSSSHTRLASQFQSCLESGSLPQFLTTGITHLLYKSGSTTEPKNYRPITCLSTVYKLLTSILRAKITEHIVGNSIMSASQNGCRNGSRGTKELLLIDMAISQQVRRSRKDLSTCWIDYKKAYDSVPHAWLTRVLELYKIDATLRTFLASCMGQWKTVLRYPGCRQIQGNDEPIWIKRGIFQGDSLSPLWFCLALNPLSTLLEDSGLGYRLKRGGQVISHLLYMDDLKLFAPNNLRLMELLKITESFSSAIRMEFGVDKCAVMHVKRGEIVESEGIQLSDSIHLKSLSSSENYKYLGMSEALGINATDMKQSLKERFFGRLKKVLNCLLSGGNKVRAFNGWVMPVLMYSFGILKWTQTELDALDRRVRTLLTANRMHHPRSSVMRLYIPRKCGGRGFLNAKTLHNREVCNLRDYFFKTEVGMHRDVVAVDKGLTPLSMAKESWRKPVVLTTDDRKQVWQSKELHGRFYRALHGPDVDFLASVSWLRFGDLFGETEGFVCAIMDEVILTNNYRKHIMKDGTVDMCRACHRPGESIRHIISGCSRLANSEYLHRHNQVARIIHQQLALRYKLVESEVPYYKYVPDPVLEDDHVTLYWDRSIITDRTIVANKPDIVVIDRLARRAMIVDVTIPHDENLVKAEKEKQIKYLDLAHEVVDMWNVDSAVIVPIVVTANGLLAKSLDDHLSRLSLHGWIKGLIQKAVLLDTARIVRRFLSLQP

SEQ ID NO: 28397 - protein, 962 aa, Xestia xanthographa
MHKKNRALVCALDSQLKHIFESSENLVDTQSILFCGAVAACRLANVKFPNCDVATRPKPAVPAWQRRIERRIDGARVLIGKLYCFREGNTRPRVMRFVRRAFSGTEISPQEYMSRATERIDFLKQKVYAWANRIRRYKQRVDRYSQNRMFQSDERWVYRAWERPEQNMTDVCRPDDATTSSFWRSIWSVPVCHTEADWMRDVERVCEPIPEMEPIFITPLDVARAVRPLPNWKSPGPDGLHNFWLKWFSSSHTCLASQFQSSLESGSLPQFLTTGVTHLLHKSGSPAEPKNYRPITCLSKIYKLLTSILRMKINTHIDKNSIMSASQNGCRNGSRSTKELLLIDMAISQQVRRSRKDLSTCWIDYKKAYDSVPHTWLMRVLELYKVDTTLRTFLESCMGQWKTVLRYPGCRQIEGSDEPVWIKRGIFQGDSLSPLWFCLALNPLSTLLENSGLGCRLRKDGQVISHLLYMDDLKLFAPNKLRLMELLKVTETFSSAIRMEFGVDKCAVMYVKRGEIMESEGLQLSDSIHLKSVSSSETYKYLGMSEALGINVTDMKQSLRERFFGRLRKVLNSLLSGGNKVRAFNGWVMPVLMYSFGILKWTQTELDALDRRVRTLLTESRMHHPRSSVMRLYIPRKCGGRGFLNAKTLHNREVCSLREYFLKAEVGMHRDVVAVDKGLTPLSMAKENWHRPEVLTTDDRKEVWQGKELHGRFYRALHGPDVDFLASVSWLRFGDLFGETEGFVCAIMDEVMLTNNYRKYIMKDGTVDVCRACHLPGESIRHIISGCSRLANGEYLHRHNQVARIIHQQLALKYKLVESEVPYYKYVPDPVLENDHVTLYWDRSIITDRTIVANKPDIVMMDRSARRVMIIDVTIPHDENLVKAEKEKQIKYLDLAHEVRGMWNMNSVIIVPIVVTANGLIAKSFDDHLSKLSLGGWIKGLIQKAVLLDTARIVRRFLSLQP

SEQ ID NO: 28398 - protein, 1199 aa, Xestia xanthographa
MITRAAARRAHLPTPDSSLSSASPPPDPGSPVSPVAAVASSSSDEYFSPPTSPPPVRRAGRGRPPKSLGLRGQQAPSRVPATGGCVQRMKWTQSMNENVMRAYYGSTEGGTNLTAYRVRMLSLFQGLEPTVNVSAQRLSDQVRVIQHSHRLDDAALDRLRSEVLSNLIVLTPTQTAVQVSAIDATPPRLNPVVVEEDDGVATVSSQCNDRLRSALENALHEYRSTPTELRPRLPRLPMHKKNRALVCALDSQLKNIFESSENLVDTHSILFCGAVAACRLANVKFPNCDVANRPKPAVPAWQRRIERRIDGARVLIGKLYCFREGNTRPRVMRFVRRAFSGTEISPQEYMSRVTERIDFLKQKVYAWANRIRRYKRRVDRYSQNRMFQSDERWVYRAWERPEQNMTDVCRPDDAATSSFWRSIWSVPVCHTEADWMRDVERVCEPIPEMEPIFITPLDVARAVRPLPNWKSPGPDGLHNFWLKWFSSSHTCLASQFQSSLESGSLPQFLTTGVTHLLHKSGSPAEPKNYRPITCLSTIYKLLTSILRVKINTHIDKNSIMSASQNGCRNGSRGTKELLLIDMAISQQVRRSRKDLSTCWIDYKKAYDSVPHTWLMRVLELYKIDTTLRTFLESCMGQWRTVLRYPGCRQIQGSDDPVWIKRGIFQGDSLSSLWFCLALNPLSTLLENSGLGCRLRKDGQVISHLLYMDDLKLFASNKLRLMELLKVTETFSNAIRMEFGVDKCAVMYVKRGEIMESEGLQLSDSIQLRSLSSSETYKYLGMSEALGINITDMKQSLKERFFSRLRKVLNSLLSGGNKVRAFNGWVMPVLMYSFGILKWTQTELDALDRRVRTLLTESRMHHPRSSVMRLYIPRKCGGRGFLNAKTLHNREVCSLREYFSKAEVGMHRDVVAVDKGLTPLSMAKENWHKPEVLTTDDRKEVWQGKELHGRFYRALHGPDVDFLASVSWLRFGDLFGETEGFVCAIMDEVMLTNNYRKYIMKDGTVDMCRACHLPGESIRHIISGCSCLANGEYLHRHNQVARIIHQQLALKYKLVESEVPYYKYVPDPVLESDHVTLYWDRSIITDRTIVANKPDIVMIDRSARRIMIIDVTIPHDENLVKAEKEKQIKYLDLAHEVRDMWNMNSVIIVPIVVTANGLIAKSFDDHLSKLSLGGWIKGLIQKAVLLDTARIVRRFLSLQP

SEQ ID NO: 28399 - protein, 1205 aa, Xestia xanthographa
MMLTRAAAARRARLPTPDSSLSSASPPPDPGSPVSPVAAVASSSSDEYFSPPTSPPPVRRAGRGRPPKGLGLRGQQAPSRVPATGGCVQRMKWTQAMNENVMRAYYGSTEGGTNLTAYRARMLSLFQDLEPTVNVSAQRLSDQVRVIQRNHRLDDAALDRLRSEELSNLIILTPTQTAVQVSAINITLPRSNPAVVEEDDRVATVSSQCNDRLRSALEDALREYRSTPTELRPRLPRLPMHKKNRALVCALDSQLKNIFKSSEDLVDTHSILFCGAVAACRLANVKFPNCDVATRPKPAVPAWQRRIERRIDEARVLIGKLYCFREGNTRPRVMRFVRRAFSGTEISPQEYMSRVTERIDFLKQKVYAWANRIRRYKRRVDRYSQNRMFQSDERWVYRAWERSEQNMTNVCRPDDVATSSFWRSIWSVPVCHTEADWMRDVERVCEPIPEMEPIFITPLDVARAVRPLPNWKSPGPDGLHNFWLKWFSSSHTCLASQFQSSLESGSLPQFLTTGVTHLLHKSGSPAEPKNYRPITCLSTIYKLLTSILRVKINTHIDKNSIMSASQNGCRNGSRGTKELLLIDMAISQQVRRSRKDLSTCWIDYKKAYDSVPHTWLMRVLELYKIDTTLRTFLESCMGQWRTVLRYPGCRQIQGSDEPVWIKRGIFQGDSLSPLWFCLALNPLSTLLENSGLGCRLRKDGQVISHLLYMDDLKLFAPNKLRLMELLKVTETFSSAIRMEFGVDKCAVMYVKRGEIMESEGLQLSDPIHLRSLSSSETYKYLGMSEALGINITDMKQSLKERFFGRLRKVLNSLLSGGNKVRAFNGWAMPVLMYSFGILKWTQTELDALDRRVRTLLTESRMHHPRSSVMRLYIPRKCGGRGFLNAKTLHNREVCSLREYFLKAEVGMHRDVVAVDKGLTPLSMAKENWHKPEVLTTDDRKEVWQGKELHGRFYRALHGPDVDFLASVSWLRFGDLFGETEGFVCAIMDEVMLTNNYRKYIMKDGTVDVCRACHLPGESIRHIISGCSRLANGEYLHRHNQVARIIHQQLALKYKLVESEVPLHTCSNKYVPDPVLEKDHVTLYWDRSIITDRTIVANKPDIVMIDRSARRVMIIDVTIPHDENLVKAEKEKQIKYLDLAHEVRDMWNMNSVIIVPIVVTANGLIAKSFDDHLSKLSLGGWIKGLIQKAVLLDTARIVRRFLSLQP

SEQ ID NO: 28400 - protein, 1202 aa, Cosmia trapezina
MLTRSAARARPPPPDSSLSSASPPPVSSPTVSAVTTPAAVVASSSSDEYFSPPTSPIPVRRQGRGRPPKSLGLGGQLAPSRVPAAGGCVQRMRWTQSMNENVMRAYYGSTEGGTNLTAYRVRMLSLFQELEPTVNVSAQRLSDQVRVIQRNHRLDDAALDRLRSEILSDRIVSTQAQTAVQDSIIDALPPRSNHVVEEEDDRVATVSSQSNDRLRSALEDAFREYRSTPTELRPRLPRLPMHKKNRALVCALDSHLKDFFESSEDLVDTHSILYCAAVAACRLANVKFPNCDGANRSKPAVPAWQCRIERRIDGARVLIGKLYCFREGNTRPRVMRFVRRAFSGTGISPPEYMSRVTERIDFLKQKVCAWASRIRRYKRRVDRYTQNRMFQSDERWVYRAWERPEQNVTDVCRPDDAATSAFWRSIWSVPVCHAEAGWMQDVERVCETIPEMETVLITPLDVARAVRPFPNWKSPGPDGLHNFWLKWLISSHTCLASQFQSSLESGSLPQFLTTGVTHLLHKSGSPVEPKNYRPITCLSTVYKLLTSILRAKINTHIASNSIISASQNGCRTGSRGTKELLLIDMAISQQVRRSRKNLSTCWIDYKKAYDSVPHTWLLKVLELYKIDATLRTFLESCMGQWRTVLRYPGCQRIRGSDEPVWIKRGIFQGDSLSPLWFCLALNPLSTLLEDSGLGYRLRRGGQVISHLLYMDDLKLFAPNELRLMELLKVTETFSGAIRMEFGVDKCAVMHVKRGEIMESEGIQLTDSIYLRSLSSSETYKYLGMSEALGINVADVKQSLKERFFGRLKKVLISLLSGGNKVRAFNGWVMPVLMYSFGILKWTQTELDALDRRVRTLLTANRMHHPRSSVMRLYIPRKCGGRGFLNAKTLHNREVCSLREYFLKADVGMHRDVVAVDKGLTPLSMAKENWRKPVLLTTDDRRKVWQSKELHGRFYRALHEPGVDFLASVSWLRFSDLFGETEGFVCAIMDEVILTNNYRRYIMRDGTVDVCRACHRPGESIRHIISGCSRLANGEYLHRHNQVARIIHQQLALKYKLVDSEVPYYKYLPDPVLENDHVTLYWDRSIITDRTIVANKPDIVVIDRLARRAMIVDVTIPHDGNLVKAEKEKQIKYLDLAHEVVDMWNVDSAVIVPIVVTANGLIADSLDQPLSRLSLGGWIKGQIQKAVLLDTARIVRRFLSLQP

SEQ ID NO: 28401 - protein, 1202 aa, Cosmia trapezina
MLTRSAARARPPPPDSSLSSASPPPVSSPTVSAVTTPAAVVASSSSDEYFSPPTSPIPVRRQGRGRPPKSLGLGGQPTPSRVPAAGGCVQRMRWTQSMNENVMRAYYGSTEGGTNLTAYRVRMLSLFQELEPTVNVSAQRLSDQVRVIQRNHRLDDAALDRLRSEILSDRIVSTQAQTAVQDSIIDALPPRSNHVVEEEDDRVATVSSQSNDRLRSALEDAFREYRSTPTELRPRLPRLPMHKKNRALVCALDSHLKDFFESSEDLVDTHSILYCAAVAACRLANVKFPNCDGANRSKPAVPAWQCRIERRIDGARVLIGKLYCFREGNTRPRVMRFVRRAFSGTGISPPEYMSRVTERIDFLKQKVCAWASRIRRYKRRVDRYTQNRMFQSDERWVYRAWERPEQNVTDVCRPDDAATSAFWRSIWSVPVCHAEAGWMQDVERVCETIPEMETVLITPLDVARAVRPFPNWKSPGPDGLHNFWLKWLISSHTCLASQFQSSLESGSLPQFLTTGVTHLLHKSGSPVEPKNYRPITCLSTVYKLLTSILRAKINTHIASNSIISASQNGCRTGSRGTKELLLIDMAISQQVRRSRKDLSTCWIDYKKAYDSVPHTWLLKVLELYKIDATLRTFLESCMGQWRTVLRYPGCQQIRGSDEPVWIKRGIFQGDSLSPLWFCLALNPLSTLLEDSGLGYRLRRGGQVISHLLYMDDLKLFAPNELRLMELLKVTETFSGAIRMEFGVDKCAVMHVKRGEIMESEGIQLTDSIYLRSLSSSETYKYLGMSEALGINVADVKQSLKERFFGRLKKVLISLLSGGNKVRAFNGWVMPVLMYSFGILKWTQTELDALDRRVRTLLTANRMHHPRSSVMRLYIPRKCGGRGFLNAKTLHNREVCSLREYFLKADVGMHRDVVAVDKGLTPLSMAKENWRKPVLLTTDDRRKVWQSKELHGRFYRALHEPGVDFLASVSWLRFSDLFGETEGFVCAIMDEVILTNNYRRYIMKDGTVDVCRACHRPGESIRHIISGCSRLANGEYLHRHNQVARIIHQQLALKYKLVDSEVPYYKYVPDPVLENDHVTLYWDRSIITDRTIVANKPDIVVIDRLARRAMIVDVTIPHDGNLVKAEKEKQIKYLDLAHEVVDMWNVDSAVIVPIVVTANGLIADSLDQHLSRLSLGGWIKGQIQKAVLLDTARIVRRFLSLQP

SEQ ID NO: 28402 - protein, 1199 aa, Mamestra brassicae
MLTRAALQRARPPPPDPSLSSASPPPDIGSPLSPAVAVASSSSDEYFSPPTSPTPVRRQGRGRPPRGLGPRGQPAPSRVPATGGCVQRMRWTQSMNENVMRAYYGSTEGGTNLTAYRVRMLSLFQDLEPTVNVSAQRLSDQVRVIQRNHRLDDAALDRLRSEVLNNLIISTPTQTAVKAPVNGRITPRPNNVSDEVDDRVVTVSSQCNDQLRSALEDALREYRSTPTELRPRLPRLPMHKKNRALVCALDSLLQNIFESSESLVDTHSILYCGAVAACRIANVKFPGCDETIRPKPAAPAWQRRIERRIDETRALIGKLYCFREGNTRPRVMRFVRRAFSGTEISPRDFTSRVTERIDFLKQKVCAWASRIRRYKRRVDRYSQNRMFQSDERWVYRAWERPEQSVTDVCRPDDVATSIFWRSIWSVPICHAEGGWMRDVERVCEAIPQMEKITITTLDVAKAVRPLPNWKSPGPDGLHNFWLKWYSSSHALLASQFQSSLDSGSLPQFLTTGVTHLLHKTGSPTEPKNYRPITCLSTVYKLLTSILRAKINEHIESNSIMSASQNGCRKGSRGTKELLLIDMAISQQVRRSRKDLSTCWIDYKKAYDSVPHTWLMKVLELYKIDATLRTFLESCMRQWKTVLRYPGCRPIQGSDEPVWIKRGIFQGDSLSPLWFCLALNPLSTLLEDSGLGYRLRRGGQAISHLLYMDDLKLFAPNNLRLMELLKVTETFSSAIRMEFGVDKCAVMHVKKGEIMESEGIHLSDSIQVRSLSSTETYKYLGMLEALGINGTDMKQSLRERFFGRLKKVLNSLLSGGNKVRAFNGWVMPVLMYTFGILKWTQTELDALDRRVRTLLTANRMHHPRSSVMRLYIPRKCGGRGFLNAKTLHNREMCSLREYFLKADVGMHRDVVAVDKGLTPLSMAKENWRTPVILTTDDRKEVWKGKELHGRFYRALHGSDVDFSASVAWLRFGDLFGETEGFVCAIMDEVILTNNYRRHIMKDGTVDMCRACHRPGESIRHIISGCSRLANGEYLHRHNQVARIIYQQLALKYNLVDSEVPYYKYVPDPVLENDHVTLYWDRSIITDRTIVANKPDIVVIDRLARRTMIIDVTIPHDENLVKAEKEKQIKYLDLAHEVVDMWNVESAVIVPIVVTANGLMAKSFDDHLSKLALRSWVKGLIQKAVLLDTARIVRRFLSLEP

SEQ ID NO: 28403 - protein, 868 aa, Noctua fimbriata
MRFVRRAFSGTGISPQEYMSRATERIDFLKQKVYAWANRIRRYKRRVDRYSQNRMFQSDERWVYRAWERPELNMTDVCRPDDAATSSFWRSIWSVPVCHTEADWMCDVERVCEPIPEMEPILITPLDIARAVRPLPNWKSPGPDGLHNFWLKWLSSSHTCLASQFQSSLESGSLPQFLTTGVTHLLHKSGSPAEPKNYRPITCLSTVYKLLTSILRAKINTHIDKNSIMSASQNGCRNGSRGTKELLLIDMAISQQVRRSRKDLSTCWIDYKKAYDSVPHTWLMRVLELYKIDATLRAFLESCMGQWRTVLRYPGCRQIQGNDEPVWIKRGIFQGDSLSPLWFCLAMNPLSTLLEDSGLGYRLRRGGQVISHLLYMDDLKLFAPNELRLMELLKVTETFSSAIRMEFGVDKCAVMYVKQGEIMESEGIQLSDSIHLRTLSSTESYKYLGMSEALGINVTDMKQSLKERFFGRLNKVLHSLLSGGNKVRAFNGWVMPVLMYSFGVLKWTQTELDALDRRVRTLLTANRMHHPRSSVMRLYIPRKCGGRGFLNAKSLHNREMCSLREYFLKVEVGMHRDVVAVDKGLTPLSMAKENWRKPEVLTTDDRKEVWQGKELHGRFYRALHGPDVDFLASVSWLRFGDLFGETEGFVCAIMDEVMLTNNYRKYIMKDGTVDVCRACHRPGESIRHIISGCSRLANGEYLHRHNQVARIIHQQLALKYKLVESEVPYYKYVPDPVLEKDHVTLYWDQSIITDRTIVANKPDIVVIDRSARRVMIVDVTIPHDENLVKAEKEKQIKYLDLAHEVVDMWNVNSAIIVPIVVTANGLIAKSLDDHLSRLSLGGWIKGLIQKAVLLDTARIVRRFLSLEP

SEQ ID NO: 28404 - protein, 1202 aa, Noctua fimbriata
MITRAAHRRARLPPPDPSLSSASPPPESSPIVSAVTPAVAVASSSSDEYFSPPTSPTPVRRQGRGRPPRSLGLRGHPAPSRVPAAGGCVQRMRWTHSINENVMRAYYGSTEGGTNLTAYRVGMLSLFQVLEPTVNVSAQRLSDQVRVIQRNHMLDDAVLDRLRSEVLSNRIVLTPAQTAVQASVIDATPPRFNPAVEEEDDRVAVVSSQCNDRLRSALEDALREYRSTPTELRPRLPRLPMHNKNRALVCALDSQLENIFESSENLVDTHSILYCGAVAACRLANVKFSNCDVATRPKPAVPAWQRRIERRIDGARVLIGKLHCFREGNTRPRVMRFVRRAFSGTGISPQEYMSRVTERIDFLKQKVYAWANRIRRYKRRVDRYSQNRMFQSDERWVYRAWERPELNMTDVCRPDDATTSSFWRSIWSVPVCHTEADWMRDVERVCEPIPEMEPILITPLDIARAVRPLPNWKSPGPDGLHNFWLKWLSSSHTCLASQFQSSLESGSLPQFLTTGVTHLLHKSGSPAEPKNYRPITCLSTVYKLLTSILRAKINTHIDKNSIMSASQNGCRNGSRGTKELLLIDMAISQQVRRSRKDLSTCWIDYKKAYDSVPHTWLMRVLELYKIDATLRAFLESCMGQWRTVLRYPGCRQIQGNDEPVWIKRGIFQGDSLSPLWFCLALNPLSTLLEDSGLGYRLRRGGQVISHLLYMDDLKLFAPNKLQLMELLKVTETFSSAIRMEFGVDKCAVMYVKRGEIMESEGIQLSDFIHLRSLSSSESYKYLGMSEALGINVTDMKQSLKERFFGRLNKVLHSLLSGGNKVRAFNGWVMPVLMYSFGVLKWTQTELDALDRRVRTLLTANRMHHPRSSVMRLYIPRKCGGRGFLNAKSLHNREMCSLREYFLKVEVGMHRDVVAVDKGLTPLSMAKENWRKPEVLTTDDRKEVWQGKELHGRFYRALHGPDVDFLASVSWLRFGDLFGETEGFVCAIMDEVMLTNNYRKYIMKDGTVDVCRACHRPGESIRHIISGCSRLANGEYLHRHNQVARIIHQQLALKYKLVESEVPYYKYVPDPVLEKNHVTLYWDQSIITDRTIVANKPDIVVIDRSARRVMIVDVTIPHDENLVKAEKEKQIKYLDLAHEVVDMWHVNSAIIVPIVVTANGLIAKSLDDHLSKLSLGGWIKGLIQKAVLLDTARIVRRFLSLEP

SEQ ID NO: 28405 - protein, 1202 aa, Noctua fimbriata
MITRAASRRARLPPPDQSLSSASPPPESSPIVSAVTPAVAVASSSSDEYFSPPTSPTPVRRQGRGRPPRSLGLRGHPAPSRVPAAGGCVQRMRWTHSINENVMRAYYGSTEGGTNLTAYRVGMLSLFQVLEPTINVSAQRLSDQVRVIQRNHMLDDAVLDRLRSEVLSNRIVLTPAQTAVQASVIDATPPRFNPAVVEEDDRVTVVSSQCNDRLRSALEDALREYRSTPTELRPRLPRLPMHNKNRALVCALDSQLKNLFESSENLVDTHSILYCGAVAACRLANVKFPNCDVATRPKPAVPAWQRRIECRIDGARVLIGKLHCFREGNTRPRVMRFVRRAFSGTGISPQEYMSRVTERIDFLKQKVYAWANRIRRYKRRVDRYSQNRMFQSDERWVYRAWERPDQNMTDMCRPDDAATSSFWRSIWSVPVCHTEADWMRDVEQVCEPIPEMEPILITPLDVARAVRPLPNWKSPGPDGLHNFWLKWLSSSHTCLASQFQSSLESGSLPQFLTTGVTHLLHKSGSPAEPKNYRPITCLSTVYKLLTSILRAKINTHIDKNSIMSASQNECRNGSRGTKELLLIDMAISQQVRRSRKDLSTCWIDYKKAYDSVPHTWLMRVLELYKIDATLRAFLESCMGQWRTVLRYPGCRQIQGNDEPVWIKRGIFQGDSLSPLWFCLALNPLSTLLEDSGLGYRLRRGGQVISHLLYMDDLKLFAPNKLQLMELLKVTETFSSAIRMEFGVDKCAVMYVKQGEIMESEGIQLSDSIHLRTLSSTESYKYLGMSEALGINVTDMKQSLKERFFGRLNKVLHSLLSGGNKVRAFNGWVMPVLMYSFGVLKWTQTELDALDRRVRTLLTANRMHHPRSSVMRLYIPRKCGGRGFLNAKSLHNREMCSLREYFLKVEVGMHRDVVAVDKGLTPLSMAKENWRKPEVLTTDDRKEVWQGKELHGRFYRALHGPDVDFLASVSWLRFGDLFGETEGFVCAIMDEVMLTNNYRKYIMKDGTVDVCRACHRPGESIRHIISGCSRLANGEYLHRHNQVARIIHQQLALKYKLVESEVPYYKYVPDPVLEKDHVTLYWDQSIITDRTIVANKPDIVVIDRSARRVMIVDVTIPHDENLVKAEKEKQIKYLDLAHEVVDMWNVNSAIIVPIVVTANGLIAKSLDDHLSKLSLGGWIKGLIQKAVLLDTARIVRRFLSLEP

SEQ ID NO: 28406 - protein, 1199 aa, Noctua fimbriata
MITRAAYRNERLTTPDLSLSSATPPPDPGSPVSPAVAVASSSSDEYFSPPTSPTPVRRQGRGRPPRSLGLRGHPAPSRVPAAGGCVQRMRWTHSINENVMRAYYGSTEGGTNLTAYRVGMLSLFQVLEPTINVSAQRLSDQVRVIQRNHMLDDAVLDRLRSEVLSNRIVFTPAQTAVQASVIDATPPRFNPAVVEEDDRVAVVSSQCNDRLRSALEDALREYRSTPTELRPRLPRLPMHNKNRALVCALDSQLKNLFESSENLVDTHSILYCGAVAACRLANVKFRNCDVATRPKPAVPAWQRRIECRIDGARVLIGKLHCFREGNTRPRVMRFVRRAFSGTGISPQEYMSRVTERIDFLKQKVYAWANRIRRYKRRVDRYSQNRMFQSDERWVYRAWERPDQNMTDVCRPDDAATSSFWRSIWSVPICHTEADWMRDVEQVCEPIPEMEPILITPLDVARAVRPLPNWKSPGPDGLHNFWLKWLSSSHTCLASQFQSSLESGSLPQFLTTGVTHLLHKSGSPAEPKNYRPITCLSTVYKLLKSILRAKINTHIDKNSIMSASQNGCRNGSRGTKELLLIDMAISQQVRRSRKDLSTCWIDYKKAYDSVPHTWLMRVLELYKIDATLRAFLESCMGQWRTVLRYPGCRQIQGNDEPVWIKRGIFQGDSLSPLWFCLALNPLSTLLEDSGLGYRLRRGGQVISHLLYMDDLKLFAPNKLQLMELLKVTETFSSAIRMEFGVDKCAVMYVKRGEIMESAGIQLSDFIHLRSLSSSESYKYLGMSEALGINVTDMKQSLKERFFGRLNKVLHSLLSGGNKVRAFNGWVMPVLMYSFGVLKWTQTELDALDRRVRTLLTANWMHHPRSSVMRLYIPRKCGGRGFLNAKSLHNREMCSLREYFLKVEVGMHRDVVAVDKGLTPLSMAKENWHKPEVLTTDDRKEVWQGKELHGRFYRALHGPDVDFLASVSWLRFGDLFGETEGFVCAIMDEVMLTNNYRKYIMKNGTVDVCRACHRPGESIRHIISGCSRLANGEYLHRHNQVARIIHQQLALKYKLVESEVPYYKYVPDPVLEKDHVTLYWDQSIITDRTIVANKPDIVVIDRSARRVMIVDVTIPHDENLVKAEKEKQIKYLDLAHEVVDMLHVNSAVIVPIVVTANGLIAKSLDDHLSKLSLGGWIKGLIQKAVLLDTARIVRRFLSLEP

SEQ ID NO: 28407 - protein, 1202 aa, Noctua fimbriata
MITRAAYRRARLPPPDPSLSSASPPPESSPIVSAVTPAVAVASSSSDEYFSPPTSPTPVRRQGRGRPPRSLGLRGHPAPSRVPAAGGCVQRMKWTHSINENVMRAYYGSTEGGTNLTAYRVGMLSLFQVLEPTVNVSAQRLSDQVRVIQRNHMLDDAVLDRLRSEVLSNRIVLTPAQTAVQASVIDATPPRFNPAVVEEDDRVAVVSSQCNDRLRSALEDALREYRSTPTELRPRLPRLPMHNKNRALVCALDSQLENIFESSENLVDTHSILYCGAVAACRLANVKFPNCDVATRPKPAVPAWQRRIERRIDGARVLIGKLHCFREGNTRPRVMRFVRRAFSGTGISPQEYMSRVTERIDFLKQKVYAWANRIRRYKRRVDRYSQNRMFQSDERWVYRAWERPELNMTDVCRPDDAATSSFWRSIWSVPVCHTEADWMRDVERVCEPIPEMEPILITPLDIARAVRPLPNWKSPGPDGLHNFWLKWLSSSHTCLASQFQSSLESGSLPQFLTTGVTHLLHKSGSPAEPKNYRPITCLSTVYKLLTSILRAKINTHIDKNSIMSASQNGCRNGSRGTKELLLIDMAISQQVRRSRKDLSTCWIDYKKAYDSVPHTWLMRVLELYKIDATLRAFLESCMGQWRTVLRYPGCRQIQRNDEPVWIKRGIFQGDSLSPLWFCLALNPLSTLLEDSGLGYRLRRGGQVISHLLYMDDLKLFAPNKLQLMELLKVTETFSSAIRMEFGVDKCAVMYVKRGEIMESEGIQLSDSIHLRSLSSSESYKYLGMSEALGINVTDMKQSLKERFFGRLNKVLHSLLSGGNKVRAFNGWVMPVLMYSFGVLKWTQTELDALDRRVRTLLTANRMHHPRSSVMRLYIPRKCGGRGFLNAKSLHNREMCSLREYFLKVEVGMHRDVVAVDKGLTPLSMAKENWRKPEVLTTDDRKEVWQGKELHGRFYRALHGPDVDFLASVSWLRFGDLFGETEGFVCAIMDEVMLTNNYRKYIMKDGTVDVCRACHRPGESIRHIISGCSRLANGEYLHRHNQVARIIHQQLALKYKLVESEVPYYKYVPDPVLEKDHVTLYWDQSIITDRTIVANKPDIVVIDRSARRVMIVDVTIPHDENLVKAEKEKQIKYLDLAHEVVDMWHMNSAVIVPIVVTANGLIAKSLDDHLSKLSLGGWIKGLIQKAVLLDTARIVRRFLSLEP

SEQ ID NO: 28408 - protein, 1202 aa, Noctua fimbriata
MITRAAYRRARLPPPDPSLSSASPPPESSPIVSAVTPAVAVASSSSDEYFSPPTSPTPVRRQGRGRPPRSLGLRGHPAPSRVPAAGGCVQRMRWTHSINENVMRAYYGSTEGGTNLTAYRVGMLSLFQVLEPTVNVSAQRLSDQVRVIQRNHMLDDAVLDRLRSEVLSNRIVLTPAQTAVQASVIDATPPRFNPAVVEEDDRVAVVSSQCNDRLRSALEDALREYRSTPTELRPRLPRLPMHNKNRALVCALDSQLENIFESSENLVDTHSILYCGAVAACRLANVKFSNCDVATRPKPAVPAWQRRIERRIDGARVLIGKLHCFREGNSRPRVMRFVRRAFSGTGISPQEYMSRVTERIDFLKQKVYAWANRIRRYKRRVDRYSQNRMFQSDERWVYRAWERPELNMTDVCRPDDAATSSFWRSIWSVPVCHTEADWMRDVERVCEPIPEMEPILITPLDIARAVRPLPNWKSPGPDGLHNFWLKWLSSSHTCLASQFQSSLESGSLPQFLTTGVTHLLHKSGSPAEPKNYRPITCLSTVYKLLTSILRAKINTHIDKNSIMSASQNGCRNGSRGTKELLLIDMAISQQVRRSRKDLSTCWIDYKKAYDSVPHTWLMRVLELYKIDATLRAFLESCMGQWRTVLRYPGCRQIQGNDEPVWIKRGIFQGDSLSPLWFCLALNPLSTLLEDSGLGYRLRRGGQVISHLLYMDDLKLFAPNKLQLMELLKVTETFSSAIRMEFGVDKCAVMYVKRGKIMESEGIQLSDFIHLRSLSSSESYKYLGMSEALGINVTDMKQSLKERFFGRLNKVLHSLLSGGNKVRAFNGWVMPVLMYSFGVLKWTQTELDALDRRVRTLLTANRMHHPRSSVMRLYIPRKCGGRGFLNAKSLHNREMCSLREYFLKVEVGMHRDVVAVDKGLTPLSMAKENWRKPEVLTTDDRKEVWQGKELHGRFYRALHGPDVDFLASVSWLRFGDLFGETEGFVCAIMDEVMLTNNYRKYIMKDGTVDVCRACHRPGESIRHIISGCSRLANGEYLHRHNQVARIIHQQLALKYKLVESEVPYYKYVPDPVLEKNHVTLYWDQSIITDRTIVANKPDIVVIDRSARRVMIVDVTIPHDENLVKAEKEKQIKYLDLAHEVVDMWHVNSAIIVPIVVTANGLIAKSLDDHLSKLSLGGWIKGLIQKAVLLDTARIVRRFLSLEP

SEQ ID NO: 28409 - protein, 962 aa, Noctua fimbriata
MHNKNRALVCALDSQLKNLFESSENLVDTHSILYCGAVAACRLANVKFPNCDVATRPKPAVPAWQRRIECRIDGARVLIGKLHCFREGNTRPRVMRFVRRAFSGTGISPQEYMSRVTERIDFLKQKVYAWANRIRRYKRRVDRYSQNRMFQSDERWVYRAWERPDQNMTDMCRPDDAATSSFWRSIWSVPVCHTEADWMRDVEQVCEPIPEMEPILITPLDVARAVRPLPNWKSPGPDGLHNFWLKWLSSSHTCLASQFQSSLESGSLPQFLTTGVTHLLHKSGSPAEPKNYRPITCLSTVYKLLTSILRAKINTHIDKNSIMSASQNGCRNGSRATKELLLIDMAISQQVRRSRKDLSTCWIDYKKAYDSVPHTWLMRVLELYKIDATLRAFLESCMGQWSTVLRYPGCRQIQGNDEPVWIKRGIFQGDSLSPLWFCLALNPLSTLLEDSGLGYRLRRGGQVISHLLYMDDLKLFAPNKLQLMELLKVTETFSSAIRMEFGVDKCAVMYVKQGEIMKSEGIQLSDSIHLRTLSSTESYKYLGMSEALGINVTDMKQSLKERFFGRLNKVLHSLLSGGNKVRAFNGWVMPVLMYSFGVLKWTQTELDALDRRVRTLLTANRMHHPRSSVMRLYIPRKCGGRGFLNAKSLHNREMCSLREYFLKVEVGMHRDVVAVDKGLTPLSMAKENWRKPEVLTTDDRKEVWQGKELHGRFYRALHGPDVDFLASVSWLRFGDLFGETEGFVCAIMDEVMLTNNYRKYIMKDGTVDVCRACHRPGESIRHIISGCSRLANGEYLHRHNQVARIIHQQLALKYKLVESEVPYYKYVPDPVLEKDHVTLYWDQSIITDRTIVANKPDIVVIDRSARRVMIVDVTIPHDENLVKAEKEKQIKYLDLAHEVVDMWNVNSAIIVPIVVTANGLIAKSLDDHLSKLSLGGWIKGLIQKAVLLDTARIVRRFLSLEP

SEQ ID NO: 28410 - protein, 1111 aa, Noctua fimbriata
MRWTHSINENVMRAYYGSTEGGTNLTAYRVGMLSLFQVLEPTVNVSAQRLSDQVRVIQRNHMLDDAVLDRLRSEVLSNRIVLTPAQTAVQASVIDATPPRFNPAVVEEDDRVAVVSSQCNDRLRSALEDALREYRSTPTELRPRLPRLPMHNKNRALVCALDSQLENIFESSENLVDTHSILYCGAVAACRLANVKFPNCDVATRPNPAVPAWQRRIERRIDGARVLIGKLHCFREGNTRPRVMRFVRRAFSGTGISPQEYMSRVTERIDFLKQKVYAWANRIRRYKRRVDRYSQNRMFQSDERWVYRAWERPELNMTDVCRPDDAATSSFWRSIWSVPVCHTEADWMRDVERVCEPIPEMEPILITPLDIARAVRPLPNWKSPGPDGLHNFWLKWLSSSHTCLASQFQSSLESGSLPQFLTTGVTHLLHKSGSPAEPKNYRPITCLSTVYKLLTSILRAKINTHIDKNSIMSASQNGCRNGSRGTKELLLIDMAISQQVRRSRKDLSTCWIDYKKAYDSVPHTWLMRVLELYKIDATLRAFLESCMGQWRTVLRYPGCRQIQGNDEPVWIKRGIFQGDSLSPLWFCLALNPLSTLLEDSGLGYRLRRGGQVISHLLYMDDLKLFAPNKLQLMELLKVTETFSSAIRMEFGVDKCAVMYVKRGEIMESEGIQLSDSIHLRSLSSSESYKYLGMSEALGINVTDMKQSLKERFFGRLNKVLHCLLSGGNKVRAFNGWVMPVLMYSFGVLKWTQTELDALDRRVRTLLTANRMHHPRSSVMRLYIPRKCGGRGFLNAKSLHNREMCSLREYFLKVEVGMHRDVVAVDKGLTPLSMAKENWRKPEVLTTDDRKEVWQGKELHGRFYRALHGPDVDFLASVSWLRFGDLFGETEGFVCAIMDEVMLTNNYRKYIMKDGTVDVCRACHRPGESIRHIISGCSRLANGEYLHRHNQVARIIHQQLALKYKLVESEVPYYKYVPDPVLEKDHVTLYWDQSIITDRTIVANKPDIVVIDRSARRVMIVDVTIPHDENLVKAEKEKQIKYLDLAHEVVDMWNVNSAIIVPIVVTANGLIAKSLDDHLSKLSLGGWIKGLIQKAVLLDTARIVRRFLSLEP

SEQ ID NO: 28411 - protein, 1202 aa, Noctua fimbriata
MITRAASRRARLPPPDQSLSSASPPPESSPILSAVTPAVAVASSSSDEYFSPPTSPTPVRRQGRGRPPRSLGLRGHPAPSRVPAAGGCVQRMRWTHSINENVMRAYYGSTEGGTNLTAYRVGMLSLFQVLEPTINVSAQRLSDQVRVIQRNHMLDDAVLDRLRSEVLSNRIVLTPAQTAVQASVIDATPPRFNPAVVEEDDRVAVVSSQCNDRLRSALEDALREYRSTPTELRPRLPRLPMHNKNRALVCALDSQLKNLFESSENLVDTHSILYCGAVAACRLANVKFPNCDVATRPKPAVPAWQRRIECRIDGARVLIGKLHCFREGNTRPRVMRFVRRAFSGTGISPQEYMSRVTERIDFLKQKVYAWANRIRRYKRRVDRYSQNRMFQSDERWVYRAWERPDQNMTDMCRPDDAATSSFWRSIWSVPVCHTEADWMRDVEQVCEPIPEMEPILITPLDVARAVRPLPNWKSPGPDGLHNFWLKWLSSSHTCLASQFQSSLESGSLPQFLTTGVTHLLHKSGSPAEPKNYRPITCLSTVYKLLTSILRAKINTHIDKNSIMSASQNGCRNGSRATKELLLIDMAISQQVRRSRKDLSTCWIDYKKAYDSVPHTWLMRVLELYKIDATLRAFLESCMGQWRTVLRYPGCRQIQGNDEPVWIKRGIFQGDSLSPLWFCLALNPLSTLLEDSGLGYRLRRGGQVISHLLYMDDLKLFAPNKLQLMELLKVTETFSSAIRMEFGVDKCAVMYVKQGEIMESEGIQLSDSIHLRTLSSTESYKYLGMSEALGINVTDMKQSLKERFFGRLNKVLHSLLSGGNKVRAFNGWVMPVLMYSFGVLKWTQTELDALDRRVRTLLTANRMHHPRSSVMRLYIPRKCGGRGFLNAKSLHNREMCSLREYFLKVEVGMHRDVVAVDKGLTPLSMAKENWRKPEVLTTDDRKEVWQGKELHGRFYRALHGPDVDFLASVSWLRFGDLFGETEGFVCAIMDEVMLTNNYRKYIMKDGTVDVCRACHRPGESIRHIISGCSRLANGEYLHRHNQVARIIHQQLALKYKLVESEVPYYKYVPDPVLEKDHVTLYWDQSIITDRTIVANKPDIVVIDRSARRVMIVDVTIPHDENLVKAEKEKQIKYLDLADEVVDMWNVNSAIIVPIVVTANGLIAKSLDDHLSKLSLGGWIKGLIQKAVLLDTARIVRRFLSLEP

SEQ ID NO: 28412 - protein, 1206 aa, Noctua fimbriata
MITRSRAKQLQEAHTPSPGSSLSSASQPPRRATSVSTVSPVAAVASSSSDEFFSPPSTPPPSPRRRGRGRPPAGLGPRGQPAPNRVPAAGGNVSRMRWTQSINEQVMRAYYGATEGGTNLTAYRVGMLSLFQVLEPTINVSAQRLSDQVRVIQRNHMLDDAVLDRLRSEVLSNRIVFTPAQTAVQASVIDATPPRFNPAVVEEDDRVAVVSSQCNDRLRSALEDALREYRSTPTELRPRLPRLPMHNKNRALVCALDSQLKNLFESSENLVDTHSILYCGAVAACRLANVKFPNCDVATRPKPAVPAWQRRIECRIDGARVLIGKLHCFREGNTRPRVMRFVRRAFSGTGISPQEYMSRVTERIDFLKQKVYAWANRIRRYKRRVDRYSQNRMFQSDERWVYRAWERPDQNMTDMCRPDDAATSSFWRSIWSVPVCHTEADWMRDVEQVCEPIPEMEPILITPLDVARAVRPLPNWKSPGPDGLHNFWLKWLSSSHTCLASQFQSSLESGSLPQFLTTGVTHLLHKSGSPAEPKNYRPITCLSTVYKLLTSILRAKINTHIDKNSIMSASQNGCRNGSRATKELLLIDMAISQQVRRSRKDLSTCWIDYKKAYDSVPHTWLMRVLELYKIDATLRTFLESCMGQWRTVLRYPGCRQIQGNDEPVWIKRGIFQGDSLSPLWFCLALNPLSTLLEDSGLGYRLRRGGQVISHLLYMDDLKLFAPNKLQLMELLKVTETFSSAIRMEFGVDKCAVMYVKQGEIMESEGIQLSDSIHLRTLSSTESYKYLGMSEALGINVTDMKQSLKERFFGRLNKVLHSLLSGGNKVRAFNGWVMPVLMYSFGVLKWTQTELDALDRRVRTLLTANRMHHPRSSVMRLYIPRKCGGRGFLNAKSLHNREMCSLREYFLKVEVGMHRDVVAVDKGLTPLSMAKENWRKPEVLTTDDRKEVWQGKELHGRFYRALHGPDVDFLASVSWLRFGDLFGETEGFVCAIMDEVMLTNNYRKYIMKDGTVDVCRACHRPGESIRHIISGCSRLANGEYLHRHNQVARIIHQQLALKYKLVESEVPYYKYVPDPVLEKDHVTLYWDQSIITDRTIVANKPDIVVIDRSARRVMIVDVTIPHDENLVKAEKEKQIKYLDLAHEVVDMWNVNSAIIVPIVVTANGLIAKSLDDHLSKLSLGGWIKGLIQKAVLLDTARIVRRFLSLEP

SEQ ID NO: 28413 - protein, 1111 aa, Atethmia centrago
MRWTQSMNENVMRAYYGSTEGGTNLTAYRVRMLSLFQKLEPTVNVSAQRLSDQVRVIQRNHRLDDAALDRLRSEVLSNHIVSTPAQTATHAPIINAIPPRSNHDVEEEDDRVATVSSQCNVRLRSALEDAFREYRSTPTELRPRLPRLPMHKKNRALVCTLDSLLKDFFESSEDLVDTHSILYCAAVAACRLANVKFPNCDGATRPKPAVPAWQCRIERRIDGARVLIGKLYCFREGNTRPRVMRFVRRAFSGTGISPREYMSRVTERIDFLKQKVCAWASRIRRYKRRVDRYTQNRMFQSDERWVYRAWERPEQNETDVCRPDDATTTAFWRSIWSVPVCHAEADWMRDVERVCETIPEMDVVIITPSDIARAVRPLPNWKSPGPDGLHNFWLKWLTSSHTCLASQFQSSLESGSLPQFLTTGITHLLHKSGSPAEPKNYRPITCLSTVYKLLTSILRAKINTHIDSNSIMSASQNGCRNGSRGTKELLLIDMAISQQVRRFRKDLSTCWIDYKKAYDSVPHTWLMRVLEFYKIDTTLRTFLESCMGQWRTVLRYPGCRQIQGNDEPVWIKRGIFQGDSLSPLWFCLALNPLSTLLEDSGLGYRLRRGGQVISHLLYMDDLKIFAPNKLQLMELLKVTETFSSAIRMEFGVDKCAVMHVKRGEIMESEGIQLSDSIHLRSLSSPESYKYLGMSEALGINVTDMKQSLKESFFGRLKKVLISPLSGGNKVRAFNGWVMPVLMYSFGILKWTQTELDALDRRVRTLLTANRMHHPRSSVMRLYIPRKCGGRGFLNAKTLHNREICSLREYFLKTEVGMHRDVVAVDKGLTPLSMAKENWCKPVILTTDDRKEIWQNKELHGRFYRALHEPDVDFLASVSWLRFGDLFGETEGFVCAIMDEVILTNNYRRHIMKDGTVDVCRACHRPGESIRHIISGCSRLANGEYLHRHNQVARIIHQQLALKYKLVNSEVPYYKYAPDPVLENDHVTLYWDRSIITDRTIVANKPDIVVIDRLARRAMIVDVTIPHDENLVKAEKEKQIKYLDLAHEVVDMWNVDSAVIVPIVVTANGLMAESLNHHLSRLSLGGWIKGLIQKAVLLDTARIVRRFLSLES

SEQ ID NO: 28414 - protein, 1203 aa, Atethmia centrago
MLTRAASKRARPPPPDSSLSSASPPPVSSPTVSAVITPAAVVASSSSDEYFSPPTSPTPVRRQGRDRPPKSLGLRGHPAPSRVPAAGGCVQRMRWTQSMNENVMRAYYGSTEGGTNLTAYRVRMLSLFQELEPTVNVSAQRLSDQVRVIQRNRRLDDATLDRLRSEVLSNYIISTPAQTAVHTPIIDVIPPRSNHGVEEEDDRAATVSSQCNVRLRSALEDAFREYRSTPTELRPRLPRLPMHKKNRALMCALDSQLKVFFESSEDLVDTHSILYCAAVAACRLANVKFPNSDGATRPKPAVPAWQCRIERRIDKARVLIGKLYCFREGNTRPRVMRFVRRAFSGTGISPREYMSHITERIDFLKQKVCAWASRIRRYKRRVDRYTQNRMFQSDERWVYRAWERPKQNVTDVCRPDDATTTAFWRSIWSVPVCHVEADWMRDVERVCETIPEMEVVIITPSDIARAVRPLPNWKSPGPDGLHNFWLKWLTSSHTCLASQFQSSLESGSLPQFMTTGITHLLHKSGSPAEPKNYRPITCLSTVYKLLTSILRAKINTHIDSNSIMSASQNGCRNGSRGTKELLLIDMAISQQVRRSRKDLSTCWIDYKKAYDSVPHTWLMRVLELYKIDTTLRTFLESCMGQWGTVLRYPGCRQIQGNDEPVWIKRGIFQGDSLSPLWFCLALNPLSMQLEDSGLGYRLRRGGQIISHLLYMDDLKIFAPNKLQLMKLLKVTETFSSAIRMEFGVDKCAVMHVKRGEIMESEGIQLSDSIHLRSLSSPESYKYLGMSEALGINVTDMKQSLKERFFGRLKKVLISLLSGSNKVRAFNSWVMPVLTYSFGILKWTQTELDALDRRVRTLLTANRMHHPRSSVMRLYIPRKCGGRGFLNAKTLHNREICSLREYFLKTEVGMHRDVVAVDKGLTPLSMAKENWCKPVVLTTDDRKEIWQSKELHGRFYRALHEPDVDFLASVSWLRFGDLFGETEGFVCAIMDEVILTNNYRRHIMKDGTVDVCRACHRPGESIRHIISGCSRLANGEYLHRHNQVARIIHQQLALKYKLVNSEVPYYKYVPDPVLENDHVTLYWDRSINTDRTIVANKPDIVVIDRLARRAMIVDVTIPHDDNLVKAEKEKQIKYLDLAHEVVDMWNVNSAVIVPIVVTANGLMARSLNHHLSRLALDGWIKGLIQKAVLLDTARIVRRFLSLEP

SEQ ID NO: 28415 - protein, 962 aa, Atethmia centrago
MHKKNRALVCTLDSLLKDFFESSEDLVDTHSILYCAAVAACRLANVKFPNCDGATRPKPAVPAWQCRIERRIDGARVLIGKLYCFREGNTRPRVMRFVRRAFSGTGISPREYMSRVTERIDFLKQKVCAWASRIRRYKRRVDRYTQNRMFQSDERWVYRAWERPEQNETDVCRPDDATTTAFWRSIWSVPVCHAEADWMRDVERVCETIPEMDVVIITPSDIARAVRPLPNWKSPGPDGLHNFWLKWLTSSHTCLASQFQSSLESGSLPQFLTTGITHLLHKSGSPAEPKNYRPITCLSTVYKLLTSILRAKINTHIDSNSIMSASQNGCRNGSRGTKELLLIDMAISQQVRRFRKDLSTCWIDYKKAYDSVPHTWLMRVLEFYKIDTTLRTFLESCMGQWRTVLRYPGCRQIQGNDEPVWIKRGIFQGDSLSPLWFCLALNPLSTLLEDSGLGYRLRRGGQVISHLLYMDDLKIFAPNKLQLMELLKVTETFSSAIRMEFGVDKCAVMHVKRGEIMESEGIQLSDSIHLRSLSSPESYKYLGMSEALGINVTDMKQSLKERFFGRLKKVLISPLSGGNKVRAFNGWVMPVLMYSFGILKWTQTELDALDRRVRTLLTANRMHHPRSSVMRLYIPRKCGGRGFLNAKTLHNREICSLREYFLKTEVGMHRDVVAVDKGLTPLSMAKENWCKPVILTTDDRKEIWQNKELHGRFYRALHEPDVDFLASVSWLRFGDLFGETEGFVCAIMDEVILTNNYRRHIMKDGTVDVCRACHRPGESIRHIISGCSRLANGEYLHRHNQVARIIHQQLALKYKLVNSEVPYYKYAPDPVLENDHVTLYWDRSIITDRTIVANKPDIVVIDRLARRAMIVDVTIPHDENLVKAEKEKQIKYLDLAHEVVDMWNVDSAVIVPIVVTANGLMAESLNHHLSRLSLGGWIKGLIQKAVLLDTARIVRRFLSLES

SEQ ID NO: 28416 - protein, 1111 aa, Atethmia centrago
MRWTQSMNENVMRAYYGSTEGGTNLTAYRVRMLSLFQELEPTVNVSAQRLSDQVRVIQRNHRLDDAALDRLRSEVLSNHIVSTPAQTATHAPIIDAIPPRSNHDVEEEDDRVATVSSQCNVRLRSALEDAFREYRSTPTELRPRLPRLPMHKKNRALVCALDSLLKDFFESSEDLVDTHSILYCAAVAACRLANVKFPNCDEATRPKPAVPAWQYRIERRIDGARVLISKLYCFREGNTRPRVMRFVRRAFSGTGISPREYMSRVTERIDFLKQKVCAWASRIRRYKRRVDRYTQNRMFQSDERWVYRAWERPEQNETDMCRPDDATTTAFWRSIWSEPVCHAEADWMRDVERVCETIPEMEVVVITPSDIARAVRPLPNWKSPGPDGLHNFWLKWLTSSHTCLASQFQSSLESGSLPQFLTTGITHLLHKSGSPAEPKNYRPITCLSTVYKLLTSILRAKINTHIDSNSIMSASQNGCRNGSRGTKELLLIDMAISQQVRRSRKDLSTCWIDYKKAYDSVPHTWLMKVLELYKIDTTLRTFLESCMGQWRTVLRYPGCRRIQGNDEPVWIKRGIFQGDSLSPLWFCLALNPLSTLLEDSGLGYRLRRGGQVISHLLYMDDLKIFAPNKLRLMELLKVTETFSGAIRMEFGVDKCAVMHVKRGEIMESEGIQLSDSIHLRSLSSPESYKYLGMSEALGINVTDMKQLLKERFFGRLKKVLISLLSGGNKVRAFNGWVMPVLMYSFGILKWTQTKLDALDRRVRTLLTANRMHHPRLSVMRLYIPRKCGGRGFLNAKTLHNRKICSLREYFLKAEVGMHRDVVAVDKGLTPLSMAKENWCKPVVLTTDDRKEIWQNKELHGRFYRALHEPDVDFLASVAWLRFGDLFGETEGFVCAIMDEVILTNNYRRHIMKDGTVDVCRACHRPGESIRHIISGCSRLANGEYLHRHNQVARIIHQQLALKYKLVNSEVPYYKYVPDPVLENDHVTLYWDRSIITDRTIVANKPDIVVIDRLARRAMIVDVTIPHDDNLVKAEKEKQIKYLDLAHEVVDMWNVNSAVIVPIVVTANGLMAESLNHHLSRLSLGGWIKGLIQKAVLLDTARIVRRFLSLEP

SEQ ID NO: 28417 - protein, 1203 aa, Atethmia centrago
MLTRAASKRARPPPPDSSLSSASPPPVSSPTVSAVITPAAVVASSSSDEYFSPPTSPTPVRRQGRDRPPKSLGLRGHPAPSRVPAAGGCVQRMRWTQSMNENVMRAYYGSTEGGTNLTAYRVRMLSLFQELEPTVNVSAQRLSDQVRVIQRNRRLDDATLDRLRSEVLSNYIISTPAQTAVHTPIIDVIPPRSNHGVEEEDDRAATVSSQCNVRLKSALEDAFREYRSTPTELRPRLPRLPMHKKNRALMCALDSQLKVFFESSEDLVDTHSILYCAAVAACRLANVKFPNSDGATRPKPAVPAWQCRIERRIDKARVLIGKLYCFREGNTRPRVMRFVRRAFSGTGISPREYMSHITERIDFLKQKVCAWASRIRRYKRRVDRYTQNRMFQSDERWVYRAWERPKQNVTDVCRPDDATTTTFWRSIWSVPVCHVEADWMRDVERVCETIPEMEVVIITPSDIARAVRPLPNWKSPGPDGLHNFWLKWLTSSHTCLASQFQSSLESGSLPQFMTTGITHLLHKSGSPAEPKNYRPITCLSTVYKLLTSILRAKINTHIDSNSIMSASQNGCRNGSRGTKELLLIDMAISQQVRRSRKDLSTCWIDYKKAYDSVPHTWLMRVLELYKIDTTLRTFLESCMGQWRTVLRYPGCRQIQGNDEPVWIKRGIFQGDSLSPLWFCLALNPLSMQLEDSGLGYRLRRGGQIISHLLYMDDLKIFAPNKLQLMKLLKVTETFSSAIRMEFGVDKCALMHVKRGEIMESEGIQLSDSIHLRSLSSPESYKYLGMSEALGINVTDMKQSLKERFFGRLKKVLISLLSGGNKVRAFNSWVMPVLTYSFGILKWTQTELDALDRRVRTLLTANRMHHPRSSVMRLYIPRKCGGRGFLNAKTLHNREICSLREYFLKTEVGMHRDVVAVDKGLTPLSMAKENWCKPVVLTTDDRKEIWQSKELHGRFYRALHEPDADFLASVSWLRFGDLFGETEGFVCAIMDEVILTNNYRRHIMKDGTVDVCRACHRPGESIRHIISGCSRLANGEYLHRHNQVARIIHQQLALKYKLVKSEVPYYKYVPDPVLENDHVTLYWDRSIITDRTIVANKPDIVVIDRLARRAMIVDVTIPHDDNLVKAEKEKQIKYLDLAHEVVDMWNVNSAVIVPIVVTANGMMARSLNHHLSRLALDGWIKGLIQKAVLLDKARIVRRFLSLEP

SEQ ID NO: 28418 - protein, 1201 aa, Mesoligia furuncula
MLTRSAARRAHLPPPDSSLSPAPPPPEPSPIESAVTPAVAVASSSSDEYFSPPTSPTPVRRQGRGRPPNSLGLRGHPAPSRVPATGGCVQRMRWTQSMNENVMRAYYGSTEGGINLTAYRDRMLSLFQELEPTINVSAQRLSDQVRVIQRNHRLDDIALDRLRSEVLSNHIVSTSAQTAAQVSTVDAIPPRFNRVEEEDDRVETVSSQCNVRLRSALEDALREYRSTPTELRPRLPRLPMHKKNRALVCALDSQLKNFFESSEDLVDTHSILYCAAVAACRLANVKFSSCDGATRPKPAVPAWQRRIERRIDGARVLIGKLYCFREGNTRPRVMRFVRRAFSGTGISPREYMSRVTERIDFLKQKVCAWASRIRRYKRRVDRYTQNRMFQSDERWVYRAWERPEQNVTDVCRPDDAATSAFWCSIWSVPVCHTEAGWMQDVERVCESVPEMEKVLITPSDVARAVRPLSNWKSPGPDGLHNFWLKWLISSHTCLASQFQSSLESGSLPQFLTTGVTHLLHKSGSPAEPKNYRPITCLSTVYKLLTSILRAKINKHIESNSIMSASQNGCRNGSRGTKELLLIDMAISQQVRRSRKDLSTCWIDYKKAYDSVPHTWLMRVLELYKIDATLRTFLESCMGQWKTVLRYPGCRQIQGNDEPVWIKRGIFQGDSLSPLWFCLALNPLSTLLEDSGLGYRLRRGGQVISHLLYMDDLKLFAPNKLRLMELLKVTKTFSGAIKMEFGVDKCAVMHVKRGEIMESEGIQLSDSISLRSLSSSESYKYLGMSEALGINDADMKQSLKERFFCRLKKVLISLLSGGNKVRAFNGWVMPVLMYSFGILKWTQTELDALDRRVRTLLTANRMHHPRSSVMRLYIPRKCGGRGFLNAKTLHNREVCSLREYFLKAEVGMHRDVVAVDKGLTPLSMAKENWRKPVVLSTDDRKRVWQSKELHGRFYRALHEPGVDFIASVSWLRFGDLFGETEGFVCAIMDEVILTNNYRRHIMKDGTVDVCRACHRPGESIRHIISGCSRLANGEYLHRHNQVARIIHQQLALKYKLVDSEVPYYKYVPDPVLENDHVTLYWDRSIITDRTIVANKPDIVVIDRLARRTMIVDVTIPHDGNLVKAEKEKQIKYLDLAHEVVDMWNVSSAIIVPIVVSANGLMAESLDQHLSRLSLGGWIKGLIQKAVLLDTARIVRRFLSLEP

SEQ ID NO: 28419 - protein, 1110 aa, Mesoligia furuncula
MRWTQSMNENVMRAYYGSTEGGINLTAYRDRMLSLFQELEPTVNVSAQRLSDQVRVIQRNHRLDDIALDRLRSEVLSNHIVSTSAQTAAQVSTVDAIPPRFNRVEEEDDRVDTVSSQCNVRLRSALEDALREYRSTPTELRPRLPRLPMHKKNRALVCALDSQLKNFFESSEDLVDTHLILYCAAVAACRLANVKFSSCDGATRPKPAVQAWQRRIERRIDGARVLIGKLYCFREGNTRPRVMRFVRRAFSGTGISPREYMSRVTERIDFLKQKVCAWASRIRRYKRRVDRYTQNRMFQSDERWVYRAWERPEQNVTDVCRPDDAATSAFWCSIWSVPVCHTEAGWMQDVERVCESVPEMEKVLITPSDVARAVRPLSNWKSPGPDGLHNFWLKWLISSHTCLASQFQSSLESGSLPQFLTTGVTHLLHKSGSPAEPKNYRPITCLSTVYKLLTSILRAKINKHIESNSIMSASQNGCRNGSRGTKELLLIDMAISQQVRRSRKDLSTCWIDYKKAYDSVPHTWLMRVLELYKIDATLRTFLESCMGQWKTVLRYPGCRQIQGNDEPVWIKRGIFQGDSLSPLWFCLALNPLSTLLEDSGLGYRLRRGGQVISHLLYMDDLKLFAPNKLRLMELLKVTKTFSSAIKMEFGADKCAVMHVKRGEIMESEGIQLSDSISLRSLSSSESYKYLGMSEALGINDADMKQSLKERFFCRLKKVLISLLSGGNKVRAFNGWVMPVLMYSFGILKWTQTELDALDRRVRTLLTANRMHHPRSSVMRLYIPRKCGGRGFLNAKTLHNREVCSLREYFLKTEVGMHRDVVAVDKGLTPLSMAKENWRKPVVLSTDDRKRVWQSKELHGRFYRALHEPGVDFIASVSWLRFGDLFGETEGFVCAIMDEVILTNNYRRHIMKDGTVDVCRACHRPGESIRHIISGCSRLANGEYLHRHNQVARIIHQQLALKYKLVDSEVPYYKYVPDPVLENDHVTLYWDRSIITDRTIVANKPDIVVIDRLARRTMIVDVTIPHDGNLVKAEKEKQIKYLDLAHEVVDMWNVSSAIIVPIVVSANGLMAESLDQHLSRLSLGGWIKGLIQKAVLLDTARIVRRFLSLEP

SEQ ID NO: 28420 - protein, 1210 aa, Xestia c-nigrum
MLTRHRAKLLRDAHPPSPGSSLSSASQPPGRATSVSTMSPVAAVASSSSDEFFSPPSTPPPPPPSRGRRRGRGRPPAGLGPRGQQASSRVPAAGGNVSRMRWTQSMNENVMRAYYGATEGGSNLIAYRGQMLSLFQVLEPAVNVDAQRLSDQVRVIQRNHMLDDTVLDRLRSESRSNLVTPASPMLAVQLQTIPSTPLRSDYDGEEDGDEVISVSTQCNAQLRSALEDAFREYRSTPPELRPRLPRLPMHKKNKALVCALDSQLSNCFDSSKDLADTHSILYCGAVAACRVAHVKFPNNDRTTRPKLAVPAWQCRIERRIGEARVLIGKLICFREGNTRPRVMRFVRRAFSGTDISFRDYLARITERIDFLKQKICAWASRIRRYKRRVERYTQNRSFQSDERWVYRAWERPDQGVTNTRLPDDDAMCSFWRSIWSVPVSHTEGDWIRKVEQVCDQIQEMGAIIISPQDVACAVRPLPNWKSPGPDGLHNFWIKWFQRSHACLASQFQSALESGSLPQFMTTGITHLLHKSGSTAEPKNYRPITCLPTVYKVLTSILRAKINKHIESNSIMSTSQNGCRNGSRGTKELLLIDMAISQQVRRSRKNLSTCWIDYKKAYDSVPHTWLMRVLELYKINATLRAFLESCMGQWKTVLRYPGCRQIQGNDEPVWIKRGIFQGDSLSPLWFCLALNPLSTLLENSGLGYRLRKDGQVISHLLYMDDLKLFAPNKLQLLELLKVTETFSNAIRMEFGVDKCAVMYVKRGEIMESEGLQLSDSIHLRSLSSSESYKYLGMSEALGINVTDMKQSLRERFFGRLKKVLNSLLSGGNKVRAFNGWVMPVLMYSFGILKWTQTELDALDRRVRTLLTANRMHHPRSSMMRLYIPRKCGGRGFLNVKNLHNREVCSLREYFLEADVGMHRDVVSVDKGLTPLSLANGNWRKPKVLDTNDRREEWQGKELHGRFYRALHGPDVDFLASVSWLRFGDLFGETEGFICAIMDEVMMTKNYRKYIVKDGTVDICRACHRPGESIRHIISGCSSLANGEYLHRHNLVARIIHQQLALKYNLVESEVPYYKYAPDPVLVNGNITLYWDRPITTDRTVVANRPDIVVIDRLERRTMIVDITVPHDENLVKAEQDKKNKYLDLAREVVDMWDVSTAIIVPIVVSANGLIAKSLDQHLRRLSLGSWIKGLIQKAVLLDTARIVRRFLSQEP

SEQ ID NO: 28421 - protein, 1199 aa, Xestia c-nigrum
MITRAASRRALIPSPDSSLSSASPPPDPGSPVSPVAAVASSSSDEYFSPPTSPTPVRRAGRGRPPKGLGLRGQQAPSRVPATGGCVQRMKWTQLMNENVMRAYYGSTEGGTNLTAYRVRMLSLFQDLEPTVNASAQRLSDQVRVIQRNHLLDGAALDRLRSEVLSNRIILTPAQTAVQASSIDANPPRSNPAVVEEDDRVATVSSQCNDRLRSALEDALHEYRSTSAELRPRLPRLPMHKKNRALVCALDSQLKNVFESSEDLVDTHSILFCGAVAACRLANVKFPNCDLATRPKPAVPAWQRRIERRIDGARVLIGKLHCFREGNTRPRVMRFVRRAFSGTEISPQEYMSRVTERIDFLKQKVYAWASRIRRYKRRVDRYSQNRMFQSDERWVYRAWERPQQNMTDVCRPDDAATSSFWRSIWSVPVCHSEADWMRDVERVCEPIPTMEPILITPLDIARAVRPLPNWKSPGPDGLHNFWLKWFSSSHTCLASQFQSSLESGSLPQFLTTGITHLLHKSGSPVEPKNYRPITCLSTVYKLLTSILRTKINTHVDSNSIMSASQNGCRNGSRGTKELLLIDMAISQQVRRARKDLSTCWIDYKKAYDSVPHSWLKRVLELYKIDATLRTFLESCMGQWRTVLRYPGCRQIQGNDEPVWIKRGIFQGDSLSPLWFCLALNPVSTLLENSGLGYRLRKDGQVISHLLYMDDLKLFAPNKLQLMELLKVTETFSSAIGMEFGVDKCAVMYVKRGKIMGSEGLQLSDSIHLRSLSSSESYKYLGMSEALGINVTDMKQSLKERFFGRLKKVLNSLLSGGNKVRAFNGWVMPVLMYSFGILKWTQTELDALDRRVRTLLTENRMHHPRSSVMRLYIPRKCGGRGFLNAKTLHNREVCSLREYFLKADVGMHRDVVAVDKGLTPLSMAKENWRKPVVLTTDDRKKEWQGKELHGRFYRALHGPDVDFLASVSWLRFGDLFGETEGFVCAIMDEVMLTNNYRKYIMKDGTVDVCRACHCPGESIRHIISGCSRLANGEYLHRHNQVARIIHQQLALKFKLVESEVPYYKYVPDPVLVKDHVTLYWDQSIITDRTIVANKPDIVVIDRSARRVMIIDVTIPHDENLVKAEKEKQMKYLDLAHEVRDMWNMNSVIIVPIVVTANGLIAKSLDEHLSKLSLGGWIKGLIQKAVLLDTARIVRRFLSLQP

SEQ ID NO: 28422 - protein, 1200 aa, Xestia c-nigrum
MITRAASRRRARPPTPDSSLSSASPPPDPGSPVPPVAAVASSSSDEYFSPPTSPTPVRRAGRGRPPRSLGLRGQQALSRVPAAGGCVQRMRWTQSMNENVMRAYYGSTEGGINLTAYRDRMLSLFQDLEPAVNVSAQRLSDQVRVIQRSHRLDDATLDRLRSEVLSNLIIITPTQTAVQVSVVNATLPRSNPVVVEEDDRVALVSSQCNDRLRSALEDALREYRSTPTELRPRLPRLPMHKKNRALVFALDSQLKNIFESSEDLVDTHSILFCGAVAACRVANVKFPNCDIATRPKPAVPAWQRRIERRIDGARVLIGKLYSFREGNTRPRVMRFVRRAFLGTEISPQEYMSRVTERIDFLKQKVYAWANRIRRYKRRVDRYSQNRMFQSDERWVYRTWEQPQQNMTDVCRPDDAATSSFWRNIWSVPVCHTEADWMRDVERVCEPIPEMEPVFITPLDIANAVRPLPNWKSPGPDGLHNFWLKWLSSSHTCLASQFQSSLESGSLPQFLTAGVTHLLHKSGSAAEPKNYRPITCLSTVYKLLTSILRTKINIHIDKNSIMSASQNGCRNGSRGTKELLLIDMAISQQVRRSRKDLSTCWIDYKKAYDSVPHSWLMRVLELYKIDATLRAFLESCMGQWRTVLRYPGCRQIQGNDESVWIKRGIFQGDSLSPLWFCLALNPLSTLLENSGLGYRLRKDGQVISHLLYMDDLKLFAPNKLQLMELLKATETFSSAIRMEFGVDKCAVMYVKRGEIMRSEGLQLSDSIHLRSLSSFESYKYLGMSEALGINVTDMKQSLRERFFGRLKKVFNSLLSGGNKVRAFNGWVMPVLMYSFGILKWTQTELDALDRRVRTLLTENRMHHPRSSVMRLYIPRKCGGRGFLNAKTLHNREVCSLREYFLKADVGMHRDVVAVDKGLTPLSMAKENWRKPVVLTTDDRKKEWQGKELHGRFYRALHGPDVDFLASVSWLRFGDLFGETEGFVCAIMDEVMLTNNYRKYIMKDGTVDVCRACHLPGESIRHIISGCSRLANGEYLHRHNQVARIIHQQLALKFNLVELEVPYYKYVPDPVLVKDHVTLYWDQSIITDRTIVANKPDIVVIDRSARRVMIIDVTIPHDENLVKAEKEKQIKYLDLAHEVRDMWNMNSVIIVPIVVTANGLIAKSLDDHLAKLSLGGWIKNLIQKAVLLDTARIVRRFLSLQP

SEQ ID NO: 28423 - protein, 1199 aa, Xestia c-nigrum
MITRAASRRALIPSPDSSLSSASPPPDPGSPVSPVAAVASSSSDEYFSPPTSPTPVRRAGRGRPPKGLGLRGQQAPSRVPATGGCVQRMKWTQLMNENVMRAYYGSTEGGTNLTAYRVRMLSLFQDLEPTVNASAQRLSDQVRVIQRNQLLDGAALDRLRSEVLSNRIILTPAQTAVQASSIDVNPPRSNPAVVEEDDRVATVSSQCNDRLRSALEDALHEYRSTSAELRPRLPRLPMHKKNRALVCALDSQIKNVFESSEDLVDTHSILFCGAVAACRLANVKFPNCDLATRPKPAVPAWQRRIERRIDGARVLIGKLHCFREGNTRPRVMRFVRRAFSGTEISPQEYMSRVTERIDFLKQKVYAWASRIRRYKRRVDRYSQNRMFQSDERWVYRAWERPQQNMTDVCRPDDAATSSFWRSIWSVPVCHSEADWMRDVERVCEPIQTMEPILITPLDIARAVRPLPNWKSPGPDGLHNFWLKWFSSSHTCLASQFQSSLESGSLPQFLTTGITHLLHKSGSPAEPKNYRPITCLSTVYKLLTSILRTKINTHVDSNSIMSASQNGCRNGSRGTKELLLIDMAISQQVRRARKDLSTCWIDYKKAYDSVPHSWLRRVLELYKIDATLRTFLESCMGQWRTVLRYPGCRQIQGNDEPVWIKRGIFQGDSLSPLWFCLALNPVSTLLENSGLGYRLRKYGQVISHLLYMDDLKLFAPNKLQLMELLKVTETFSSAIGMEFGVDKCAVMYVKRGKIMGSEGLQLSDSIHLRSLSSSESYKYLGMSEALGINVTDMKQSLKERFFGRLKKVLNSLLSGGNKVRAFNGWVMPVLMYSFGILKWTQTELDALERRVRTLLTENRMHHPRSSVMRLYIPRKFGGRGFLNATTLHNREVCSLREYFLKADVGMHRDVVAVDKGLTPLSMAKENWRKPVVLTTDDRKKEWQGKELYGRFYRALHGPDVDFLASVSWLRFGDLFGETEGFVCAIMDEVMLTNNYRKYIMKDGTVDVCRACHCPGESIRHIISGCSRLANGEYLHRHNQVARIIHQQLALKFKLVESEVPYYKYVPDPVLVKDHVTLYWDQSIITDRTIVANKPDIVVIDRSARRVMIIDVTIPHDENLVKAEKEKQMKYLDLAHEVRDMWNMNSVIIVPIVVTANGLIAKSLDEHLSKLSLGGWIKGLIQKAVLLDTARIVRRFLSLQP

SEQ ID NO: 28424 - protein, 962 aa, Xestia c-nigrum
MHKKNRALVCALDSQLKNVFESSEDLVDTHSILFCGAVAACRLANVKFPNCDLATRPKPAVPAWQRRIERRIDGARVLIGKLHCFREGNTRPRVMRFVRRAFSGTEISPQEYMSRVTERIDFLKQKVYAWASRIRRYKRRVDRYSQNRMFQSDERWVYRAWERPQQNMTDVCRPDDAATSSFWRSIWSVPVCHSEADWMRDVERVCEPIQTMEPILITPLDIARAVRPLPNWKSPGPDGLHNFWLKWFSSSHTCLASQFQSSLESGSLPQFLTTGITHLLHKSGSPAEPKNYRPITCLSTVYKLLTSILRTKINTHVDSNSIMSASQNGCRNGSRGTKELLLIDMAISQQVRRARKDLSTCWIDYKKAYDSVPHSWLKRVLELYKIDATLRTFLESCMGQWRTVLRYPGCRQIQGNDEPVWIKRGIFQGDSLSPLWFCLALNPVSTLLENSGLGYRLRKDGQVISHLLYMDDLKLFAPNKLQLMELPKVTETFSSAIGMEFGVDKCAVMYVKRGKIMGSEGLQLSDSIHLRSLSSSESYKYLGMSEALGINVTDMKQSLKERFFGRLKKVLNSLLSGGNKVRAFNGWVMPVLMYSFGILKWTQTELDALDRRVRTLLTENRMHHPRSSVMRLYIPRKFGGRGFLNAKTLHNREVCSLREYFLKADVGMHRDVVAVDKGLTPLSMAKENWRKPVVLTTDDRKKEWQGKELHGRFYRALHGPDVDFLASVSWLRFGDLFGETEGFVCAIMDEVMLTNNYRKYIMKDGTVDVCRACHCPGESIRHIISGCSRLANGEYLHRHNQVARIIHQQLALKFKLVESEVPYYKYVPDPVLVKDHVTLYWDQSIITDRTIVANKPDIVVIDRSARRVMIIDVTIPHDENLVKAEKEKQMKYLDLAHEVRDMWNMNSVIIVPIVVTANGLIAKSLDEHLSKLSLGGWIKGLIQKAVLLDTARIVRRFLSLQP

SEQ ID NO: 28425 - protein, 1200 aa, Xestia c-nigrum
MITRAASRRRARPPTPDSSLSSASPPPDPGSPVPPVAAVASSSSDEYFSPPTSPTPVRRAGRGRPPRSLGLRGQQAPSRVPATGGCVQRMRWTQSMNENVMRAYYGSTEGGINLTAYRDRMLSLFQDLEPAVNVSAQRLSDQVRVIQRSHRLDDTTLDRLRSEVLSNLITITPTQTAVHMSVVNATLPRSNPVVVEEDDRVALVSSQCNDRLRSALDNALREYRSISAELRPRLPRLPMHKKNRALVCALDSQLKNIFESSEDLVDTHSILFCGAVAACRLANVKFPNCDIAIRPKPAVPAWQRRIERRIDGARVLIGKLYCFREGNTRPRVMRFVRRAFSGTEISPQEYMSRVTERIDFLKQKVYAWASRIRRYKRRVDRYSQNRMFQSDERWVYRAWERPQQNMMDVCRPDDAATSSFWRSIWSVPVCHSEADWMRDVERVCEPIPTMEPILITPLDIARAVRPLPNWKSPGPDGLHNFWLKWFSSSHTCLASQFQSSLESGSLPQFLTTGVTHLLHKSGSPAEPKNYRPITCLSTVYKLLTSILRTKINTHVDSNSIMSASQNGCRNGSRGTKELLLIDMAISQQVRRARKDLSICWIDYKKAYDSVPHSWLKRVLELYKIDATLRAFLESCMGQWRTVLRYPGCRQIQGNDEPVWIKRGIFQGDSLSPLWFCLALNPVSTLLENSGLGYRLRKDGQVISHLLYMDDLKLFAPNKLQLMELLKVTETFSSAIGMEFGVDKCAVMYVKRGKIMGSEGLQLSDSIHLRSLSSSENYKYLGMSEALGINVTDMKQSLRERFFGRLKKVLNSLLSGGNKVRAFNGWVMPVLMYSFGILKWTQTELDALDRRVRTLLTENRMHHPRSSVMRLYIPRKCGGRGFLNAKTLHNREVCSLREYFLKADVGMHRDVAAVDKGLTPLSMANENWRKPVVLTTDDRMKEWQGKELHGRFYRALHGPDVDFLASVSWLRFGDLFGETEGFVCAIMDEVMLTNNYRKYIMKDGTVDVCRACHLPGESIRHIISGCSRLANGEYLHRHNQVARIIHQQLALKFNLVELEVPYYKYVPDPVLVKDHVTLYWDQSIITDRTIVANKPDIVVIDRSARRVMIIDVTIPHDENLVKAEKEKQIKYLDLAHEVRDMWNMDSVIIVPIVVSANGLIAKSLDEHLSKLSLGGWIKGLIQKAVLLDTARIVRRFLSLQP

SEQ ID NO: 28426 - protein, 1202 aa, Sesamia nonagrioides
MLTRAAKRRARPPPPDSSLSTASPPPVSSATVNAVRTPAVVVASSSSDEYFSPPTSPTPVRRQGRGRPPKSLGLRGHPAPSRVPAAGGCVQRMRWTQTMNENVMRAYYGATEGGTNLTAYRERMLSLFQALEPTVNVSAQRLSDQVRVIQRNHRLDDIALDRLRSEVLSNQIAPTLTQTAAQASIIDAVPPRSNRVEEEDDRVETVSSQYNDRLRSALEDAFRDYRSTPTNLRPRLPRLPMHKKNRALVCALDSQLKNFFESSEDLIDTHSILYCAAVAACRLAKVKFPNCEEATRPKLAVPAWQRRIERRIDGTRVLIGKLYCFREGNTRPRVMRFVRQAFSGTGISPREYINNVTERIDFLKQKVCAWASRIRRYKKRVDRYTQNRMFQSDERWVYRAWERPEQNEADVCRPDDATTSAFWRGIWSVSVCHTEGDWTQDVEQVCEAIPEMDNILITPLDVATAVRSLPNWKSPGPDGLHNFWLKWLSSSHTCLASQFQSSLESGSLPQFLTTGITHLLHKSGSTAEPKNYRPITCLPTVYKVLTSILKAKINNHLDSNSIMSVSQNGCRSGSRGTKELLLIDMAISQQVRRSRKDLSTCWIDYKKAYDSVPHTWLMRVLELYKINATLRTFLRSCMGQWKTVLRYPGSRQIQGNDEPVWIKRGIFHGDSLSPLWFCLALNPLSTLLEDSGLGYRLKRGGQVISHLLYMDDLKLFAPNKLHLMKLLNVTETFSSGIKMEFGVDKCAVMHVKRGQIMESEGITLPDSIHLRSLSSIESYKYLGMSEALGINDADMKQSLKERFFGRLKKVLNSLLSGGNKVRAFNGWVMPVLMYSFGILKWTQTELDALDRRVRTLLTANRMHHPRSSVMRLYIPRKCGGRGFLNAKTLHNREVFSLREYFLKTVVGMHHDVVTVDKGLTPLSMAKENWHKPITLTTDDRKMVWQSKELHGRFYRALHGPDVDFLASVSWLRFGDLFGETEGFVCAIMDEVILTNNYRRYIMKDGTIDVCRACHHPGESIRHIISGCSRLANSEYLHRHNQVARIIHQQLALKYKLVDSEVPYYKYVPDPVLENDHVTLYWDRSIITDRTIVANKPDIVVIDRLARLAMIVDVTIPHDGNLVKAEKEKQMKYLDLAHEVVDMWNVNSAVIVPIVVSANGLIAKSLDQHLLRLSLGSWIKGLIQKAVLLDTARIVRRFLSLEP

SEQ ID NO: 28427 - protein, 1202 aa, Sesamia nonagrioides
MLTRSATRKARPPPPDSLLSSASPPPVSSPIVNAVTTSAAAVASSSSDEYFSPPTSPTPVRRQGRGRPPKSLGLRGHPAPSRVPAVGGCVQRMRWSQTMNENVMRAYYGATEGGTNLTAYRERMLSLFQALEPTVNVSAQRLSDQVRVIQRNHRLDDTALDRLRSEVLSNQIAPTLTQTAALASIIDAVPPRSNRVEEEDDGVETVSSQYNDRLRSTLEDAFRVYRFTPTDLRPRLPRLPMHKKNRALVSALDSQLKNVFESSEDLIDTHSILFCGAVAACRLANIKFPNCDEANRPRPAVPAWQHRIERRIDGARVLIGKLYCFREGNTRPRVMRFVRQAFSGTGISPREYISHVTERIDFLKQKVCAWASRIRRYKRRVDRYTQNRMLQSDERWVYRAWERTEQNEADVCRPDDAATSAFWRSIWSVPVCHAEGDWIQDVEQVCEMIPEMDTILITPIDVATAVRSLPNWKSPGPDGLHNFWLKWLSSSHTCLASQFQSSLESGSLPQFLTTGITHLLHKSGSTAEPNNYRPITCLPTVYKVLTSILKAKINKHLDSNSIMSVSQNGCRSGSRGTKELLLIDMAISQQVRRSRKDLSTCWIDYKKAYDSVPHTWLMRVLELYKVNATLRTFLRSCMGQWKTVLRYPGSRRIQGNDEPVWIKRGIFQGDSLSPLWFCLALNPLSTLLEDSGLGYRLRRGGQVISHLLYMDDLKLFAPNKLHLMKLLNVTETFSSGIKMEFGVDKCAVMHVKRGQIMESEGITLPDSIHLRSLSSVESYKYLGMSEALGINDADMKQSLKERFFGRLKKVLKSLLSGGNKVRAFNGWVMPVLMYSFGILKWTQTELDALDRRVRTLLTANRMHHPRSSVMRLYIPRKCGGRGFLNAKTLHNREVCSLREHFLKTVVGMHHDVVTVDKGLTPLSMAKENWHKPIILTTNDRKMIWQSKELHGRFYRALHEPDVDFLASVSWLRFSDLFGETEGFVCAIMDEVILTNNYRRYIMRDGTIDVCRACHHPGESIRHIISGCSRLANGEYLHRHNQVARIIHQQLALKYKLVDSEVPYYKYVPDPVLENDHATLYWDRSIITDRTIVANKPDIVVIDRLALLAMIVDVTIPHDGNLVKAEKEKQIKYLDLAHEVVDMWNVNSAVIVPIVVSANGLIAKSLDQHLLRLSLGSWIKGLIQKAVLLDTARIVRRFLSLEP

SEQ ID NO: 28428 - protein, 868 aa, Apamea monoglypha
MRFVRQAFSGTGISPREYISNVTERIDFLKQKVCAWASRIRRYKRRVDRYTQNRMFQSDERWVYRAWERPEQNVTDVCRPDDANTNAFWRSIWSVPVYHAEGGWMQDIERVCETIPEMDPVLITPLDVARAVRPLPNWKSPGPDGLHNFWLKWLISSHSRLASQFQSSLESGSLPQFLTTGVTHLLHKSGSPAEPKNYRPITCLSTVYKLLTSILRAKINTHIDNNSIMSASQNGCRNGSRGTKELLLIDMAISQQVRRSRKDLSTCWIDYKKAYDSVPHAWLMRVLELYKIDATLRTFLESCMGQWRTVLRYPGCRQIQGNDEPVWIKRGIFQGDSLSPLWFCLALNPLSTLLEDSGLGYRLKRDGQVISHLLYMDDLKLFAPNKLRLLELLKVTETFSSAIRMEFGVDKCAVMHVKRGEIMESEGIQLSDSIHLRSLSSSESYKYLGMSEALGINVADMKQTLRERFFGRLKKVLVSLLSGGNKVRAFNSWVMPVLMYSFGILKWTQTELDALDRRVRTLLTANRMHHPRSSVMRLYIPRKCGGRGFLNAKTLHNREVCNLREYFIKAEVGMHRDVVAVDKGLTPLSMAKENWRKPVILTTDDRKEVWQSKELHGRFYRALHEPGVDFLASVSWLRFGDLFGETEGFVCAIMDEVVLTNNYRRYIMRDGTVDVCRACHRPGESIRHIISGCSRLANGEYLHRHNQVARIIHQQLALKYKLVDSEVPYYKYVPDPVLENDHVTLYWDRSIITDRTIVANKPDIVVIDRLARRTMIVDVTIPHDGNLVKAEKEKQIKYLDLAHEVVNMWNVSSAIIVPIVVSANGLMAESLDQHLSRLSLGGWIKGLIQKAVLLDTARIVRRFLSLEP

SEQ ID NO: 28429 - protein, 1199 aa, Mamestra configurata
MLTRAASRRARPPSPDPSLSSASPPPDSGSPMSPAVAVASSSSDEYFSPPTSPTPVRWQGRGRPPRGLGPRGQPAPSRVPATGGCVQRMRWTQSMNENVIRAYYGSTEGGTNLTAYRDRMLSLFQDLEPTVNVSVQRLSDQVRVIQRNHRLDDAALDRLRSEVLNNLIISTPTQTAVQAPVNGRITPRPNNVSDEVDDRVVTVSSQCNDRLRSALEDALREYRSTPTELRPRLPRLPMHKKNRALVCALDSLLQNIFESSESLVDTHSILYCGAVAACRIANVKFPGCDEAIRPKPAAPAWQRRIERRIDETRALIGKLYCFREGNTRPRVMRFVRRAFSGTEISPRDFTSRVTERIDFLKQKVCAWASRIRRYKRRVDRYSQNRMFQSDERWVYRAWERPEQSVTDVCRPDDVATSIFWRSIWSVPICHAEGGWMRDVERVCEAIPQMEKITITTLDVAKAVRPLPNWKSPGPDGLHNFWLKWYSSSHALLASQFQSSLDSGSLPQFLTTGVTHLLHKTGSPTEPKNYRPITCLSTVYKLLTSILRAKINEHIESNSIMSASQNGCRKGSRGTKELLLIDMAISQQVRRSRKDLSTCWIDYKKAYDSVPHTWLMKVLELYKIDATLRTFLESCMRQWKTVLRYPGCRPIQGSDEPVWIKRGIFQGDSLSPLWFCLALNPLSTLLEDSGLGYRLRRGGQAISHLLYMDDLKLFAPNNLRLMELLKVTETFSSAIRMEFGVDKCAVMHVKKGEIMESEGIQLSDSIQVRSLSSTETYKYLGMSEALGINGTDMKQSLRERFFGRLKKVLNSLLSGGNKVRAFNGWVMPVLMYTFGILKWTQTELDALDRRVRTLLTANRMHHPRSSVMRLYIPRKCGGRGFLNAKTLHNREMCSLREYFLKADVGMHRDVVAVDKGLTPLSMAKENWRTPVILTTDDRKEVWKGKELHGRFYRALHGSDVDFSASVAWLRFGDLFGETEGFVCAIMDEVILTNNYRRHIMKDGTVDMCRACHRPGESIRHIISGCSRLANGEYLHRHNQVARIIHQQLALKYKLVDSEVPYYKYVPDPVLENDHVTLYWDRSIITDRTIVANKPDIVVIDRLARRTMIIDVTIPHDENLVKAEKEKQIKYLDLAHEVVDMWNVDSAVIVPIVVTANGLMAKSFDDHLSKLALRSWVKGLIQKAVLLDTARIVRRFLSLEP

SEQ ID NO: 28430 - protein, 998 aa, Noctua janthe
MVSSQCNDRLRSALEDALREYRSTPTKLRPRLPRLPMHNKNRALVCALDSQLKNIFESSENLVDTHSILYCGAVAACRLANVKFPNYDVAIRPKPAVPTWQRRIECRIDEARVLIGKLHCFREGNTRPRVMRFVRRAFSGTGISPQEYMSRVTERIDFLKQKVYAWANRIRRYKRRVDRYSQNRIFQSDERWVYRAWERPEQNMTDVCRPDDAATSSFWRSIWSVPVCHTEADWMRDVERACEPIPEMEPILITSIDITRAVRPLPNWKSPGPDGLHNFWLKWLSSSHACLASQFQSSLESGSLPQFLTTGVTHLLHKSGSPAEPKNYRPITCLSTVYKLLTSILRVKINTHIDKNFIMSASQNGCRNRSRGTKELLLIDMAISQQVRRSRKDLSTCWIDYKKAYDSVPHTWLMRVLELYKIDATLRAFLESCMGQWRTVLRYPGCRQIQGNDEPVWIKRGIFQGDSLSPLWFCLALNPLSTLLEDSGLGYRLRRGGQVISHLLYMDDLKLFAPNKLRLMELLKVTETFSNAIRMEFGVDKCAVMYVKRGEIMESEGIQLSDSIHLRSLSSSESYKYLGMSESLGINVTDMKQSLRERFFGRLNKVLNSLLSGGNKVRAFNGWVMPVLMYSFGVLKWTQTELDALDRRVRTLLTANRMHHPRSSVMRLYIPRKCGGRGFLNAKTLHNREICSLREYFLKTEVGMHRDVVAVDKGLTPLSMAKENWRKPVVLTTDDRKEVWQGKELHGRFYRALHGPDVDFLASVSWLRFGDLFGETEGFVCAIMDEVMLTNNYRKYIMKDGTVDVCRACHRPGESIRHIISGCSRLANGEYLHRHNQVARIIHQQLALKYKLVESEVPYYKYVPDPVLEKDHVTLYWDRSIITDRTIVANKPDIVVIDRLARRVMIVDVTIPHDENLVKAEKEKQIKYLDLAHEVVDMWNVNSAIIVPIVVTANGLIAKSLDDHLSRLSLGGWIKGLIQKAVLLDTARIVRRFLSLEP

SEQ ID NO: 28431 - protein, 868 aa, Noctua janthe
MRFVRRAFSETGISPQEYMSRVTERIDFLKQKVYAWANRIRRYKRRVDRYSQNRIFQNDERWVYRAWERPEQNMTDVCRPVDAATSSFWRSIWSVPVCHTEADWMRDVERACEPIPEMEPILITPIDIARAVRPLPNWKSPGPDGLHNFWLKWLSSSHTYLASQFQSSLESGSLPQFLTTGVTHLLHKSGSPAEPKNYRPITCLSTVYKLLTSILRVKINTHINKNFIMSASQNGCRNGSRGTKELLLIDMAISQQVRRSRKDLSTCWIDYKKAYDSVPHTWLMRVLELYKIDATLRAFLESCMGQWRTVLRYPGRRQIQGNDEPVWIKRGIFQGDSLSPLWFCLALNPLSTLLEDSGLGYRLRRGGQVISHLLYMDDLKLFAPNKLRLMELLKVTETFSNAIRMEFGVDKCAVMYVKRGEIMESKGIQLSDSIHLRSLSSSESYKYLGMSESLRINVTDMKQSLRERFFGRLNKVLNSLLSGGKKVRAFNGWVMPVLMYSFGVLKWTQTELDALNRRVRTLLTANRMHHPRSSVMRLYIPRKCGGRGFLNAKTLHNREICSLREYFFKTEVGMHRDVVAVDKGLTPLSMAKENWRKPVVLTTDDRKEVWQGKELHGRFHRALHGPDVDFLASMSWLRFGDLFGETEGFVCAIMDEVMLTNNYRKYIMKDGTVDVCRACHRPGESIRHIISGCSRLANGEYLHRHNQVARIIHQQLALKYKLVESEVPYYKYVPDPVLEKDHVTLYWDGSMITDRTIVANKPDIVVIDRLARRVMIVDVTIPHDENLVKAEKEKQIKYLDLAHEVVDMWNVNSAIIVPIVMTANGLIAKSLDDHLSRLSLGGWIKGLIQKAVLLDTARIVRRFLSLEP

SEQ ID NO: 28432 - protein, 1200 aa, Mythimna ferrago
MLTRAAAQRARLPPPDSLLSSASPPPDPGSSVSPAAAVASSSSDEYFSPPTSPTPVRRPGRGRPPNGLGFRGQPAPSRVPAAGGCVQRMKWTQSMNENVMRAYYGSTEGGTNLTAYRVRMLSLFQDLEPTVNVSAQRLSDQVRVIQRNHRLDDAALDQLRSQVLSNPIVSTPQQIQTVGPSTSVTTTPRYDHVVDEADDRVDRVSSQCNDRLRSALEDALREYRSTPTELRPRLPRLPMHKKNRALVCALDSLLKNVFESSDSLLDTHSILYCGAVAACRLANVKFPCYGVATRPTPAAPAWQCRIKRRIDEARALIGKLYCFREGNTRPRVMRFVRRAFSGTEISPREYMSRVTERIDFLKQKVCAWANRIRRYKRRVDRYSQNRMFQSDERWVYRAWERPGQNVTDGFRPDSVATNTFWRSIWSEPVCHNEGGWMRDVERVCEAIPEMDKVFITPLDVARAVRPLPNWKSPGPDGLQNFWLKWYSSSHAILASQFQSSLESGSLPQILTTGTTHLLHKTGSTADPKNYRPITCLSTVYKLLTSILRVKIALHIEKNSIMFASQNGCRNGSRGTKELLLIDMAISQQVRRSRKDLSTCWIDYKKAYDSVPHTWLMKVLELYKIDATLRTFLESCMRQWKTVLRYPGCRPIQGNDEPIWIKRGIFQGDSLSPLWFCLALNPLSTLLEDSGLGYRLRRGGQVLSHLLYMDDLKLFAHNNSQLMELLKVTETFSSAIRMELGVDKCAVMHVRRGEIVESEGIQLSDSIHLRSLSSTKTYKYLGMSEALGINVADMKQTLKERFFGRLKKVLNSLLSGGNKVRAFNGWVMPVLMYSFGILKWTQTELDALDRRVRTLLTANRMHHPRSSVMRLYIPRKCGGRGFLNAKTLHNREVCSLREYFLKTDVGMHRDVVAVDKGLTPLSMAKENWRKPVVLTTDDRKEVWKGKELHGRFYRALHEPDVDFSASVAWLRFSNLFGETEGFVCAIMDEVILTNNYRRHIMKDGTVDVCRACHRPGESIRHIISGCSRLANGEYLHRHNQVARILHQQLALKYNLVDSEVPYYRYVPDPVLENDHVTLYWDRSIITDRTIVANKPDIVVIDRSARRAMIVDVTIPHDENLVKAEKEKQIKYLDLAHEVVDMWNVDSAIIVPIVVTANGLIAKSFDDHLSKLSLHGWIKGLIQKAVLLDTARIVRRFLSLEP

SEQ ID NO: 28433 - protein, 1089 aa, Mythimna ferrago
MLKCIIKEIIINLMDLEPTVNVSAQRLSDQVRVIQRNHRLDDAALDRLRSQVLSNPIVSTPQQIQTVGPSTSVTTTPRYDHVVDEADDRVDRVSSQCNDRLRSALEDALREYRSTPTELRPRLPRLPMHKKNRALVCALDSLLKNVFESSDSLLDTHSILYCGAVAACRLANVKFPCYGVATRPTPAAPAWQCRIERRIDEARALIGKLYCFREGNTRPRVMRIVRRAFSGTEISPREYMSRVTERIDFLKQKVCAWANRIRRYKRRVDRYSQNRMFQSDERWVYRAWERPGQNVTDGFRPDSVATNTFWRSIWSEPVCHNEGGWMRDVERVCEAIPEMDKVFITPLDVARAVRPLPNWKSPGPDGLQNFWLKWYSSSHAILASQFQSSLESGSLPQILTTGTTHLLHKTGSTADPKNYRPITCLSTVYKLLTSILRVKIALHIEKNSIMFASQNGCRNGSRGTKELLLIDMAISQQVRRSRKDLSTCWMDYKKAYDSVPHTWLMKVLELYKIDATLRTFLESCMRQWKTVLRYPGCRPIQGNDEPIWIKRGIFQGDSLSPLWFCLALNPLSTLLEDSGLGYRLRRGGQVLSHLLYMDDLKLFAHNNSQLMELLKVTETFSSAIRMEFGVDKCAVMHVRRGEIVESEGIQLSDSIHLRSLSSTETYKYLGMSEALGINVADMKQTLKERFFGRLKKVLNSLLSGGNKVHAFNGWVMPVLMYSFGILKWTQTELDALDRRVRTLLTANRMHHPRSSVMRLYIPRKCGGRGFLNAKTLHNREVCSLREYFLKTDVGMHRDVVAVDKGLTPLSMAKENWRKPVVLTTDDRKEVWKGKELHGRFYRALHEPDVDFSASVAWLRFSNLFGETEGFVCAIMDEVILTNNYRRHIMKDGTVDVCRACHRPGESIRHIISGCSRLANGEYLHRHNQVARILHQQLALKYNLVDSEVPYYRYVPDPVLENDHVTLYWDRSIITDRTIVANKPDIVVIDRSARRAMIVDVTIPHDENLVKAEKEKQIKYLDLAHEVVDMWNVDSAIIVPIVVTANGLIAKSFDDHLSKLSLHGWIKGLIQKAVLLDTARIVRRFLSLEP

SEQ ID NO: 28434 - protein, 1200 aa, Mythimna ferrago
MLTRAAARRARHPPPGSSLSSASPPPDPGSPVSPVAAVASSSSDEYFSPPTSPTPVRRPGRGRPPKSMGPRGQPAPSRVPAVGGCVQRMRWTPSMNENVMRAYYGSTEGGTNLTAYRERMLTLFQDLEPTVNVSAQRLSDQVRVIQRNHRLDDAALDRLRSEILSNQIVSTSTQTQTAAAPTTNAISPRSDHNNDDADDRVVTVSSQCNERLRSALEDALCEYMSTPTELRPRLPRLPMHKKNRALVCALDSLLKNIFESSENLVDTHSILYCGAVAACRLANIKFPNIDGTIRPKSAVPAWQCRIERRIDEARVLIGKLHCFREGNTRPRVMRFVRRAFLGTGVSPQGYMSRVTERIDFLKQKVCAWASRIRRYKRRVDRYSQNRMFQSDERWVYRAWERPEHSVIGECRPDDFATITFWRNIWSVPVSHAEGGWMRDVERVCEAIPEMEKVTITPEDVAKAVRPLPNWKSPGPDGLQNFWLKWYSSSHAPLASQFQSILESGPLPEYLTTGVTHLLHKTGNPVDPKNYRPITCLSTVYKLLTSILRAKINIHIENNQIISPSQNGCRNGSRGTKELLLIDMAISQQTRRSRKDLSTCWIDYKKAYDSVPHTWLMRVLELYKIDTTLRTFLESCMRQWKTVLRYPGCRPIQGNDEPIWIKRGIFQGDSLSPLWFCLALNPLSTLLEDSGLGYRLRRGGQVISHLLYMDDLKLFAPSNLQLMELLKVTETFSSAIRMEFGVDKCAGMHVKRGEIMESEGIQLPDSIHLRSLSSTETYKYLGMSEALGINNADMKQSLKERFFGRLKKVLNSLLSGGNKVRAFNGWVMPVLMYSFGILKWTQTELDALDRRVRTLLTANRMHHPRSSVMRLYIPRKCGGRGFLNAKTLHNREVCSLREYFLKTDVGMHRDVVAVDKGLTPLSMAKEDWHKPVIMTTDNRKEIWKGKELHGRFFRALHEPDVDFLASVAWLRFSDLFGETEGFVCAIMDEVILTNNYRRYIMKDGTVDVCRACHRPGESIRHIISGCSRLANGEYLHRHNQVARIIHQQLALKYNLVDLEVPYYKYVPDPVLENDHVTLYWDRSIITDRTIVANKPDIVVIDRLARRAMIVDITIPHDENLVKAEKEKQMKYLDLAHEVVDMWNVDSAVIVPIVVTANGLIAKSFDDHLSKLSLRGWIKGQIQKAVLLDTARIVRKFLSLEP

SEQ ID NO: 28435 - protein, 962 aa, Hydraecia micacea
MHKKNRALVCALNSQLKNFFENSEDLVDTHSILYCAAVAACRLANVKFPICDGATRPKPAVPAWQHRIERRIDGARVLIGKLYCFREGNTRPRVMRFVKQAFSGTGISPREYISHVTERIDFLKQKVCAWASRIRRYKRRIDRYTQNRMFQSDERWVYRAWERPEQNKTDVCRPDDAATSAFWRSIWSVPVCHTEAGWIQDVERVCETVPEMETVLITPLDVARAVRPLPNWKSPGPDGLHNFWLKWLNSSHTCLASQFQSSLESGSLPQFLTTGVTHLLHKSGSPAEPKNYRPITCLSTVYKLLTSILRAKINTHIENNSIMSASQNGCRNGSRGTKELLLIDMAISQQVRRSRKDLSTCWIDYKKAYDSVPHTWLMRVLELYKIDATLRTFLESCMGQWKTVLRYPGCRQIQGNDEPVWIKRGIFQGDSLSPLWFCLALNPLSTLLEDSGLGYRLRRGGQVISHLLYMDDLKLFAPTGLHLMELLKVTETFSSAIRMEFGVDKCAVMHVKRGEIMESEGIQLSDSINLRSLSSSESYKYLGMSEALGINVTDMKQSLKERFFCRLRKVLISLLSGGNKVRAFNGWVMPVLMYSFGILKWTQTELDALDRRVRTLLTANRMHHPRSSVMRLYIPRKCGGRGFLNAKTLHNREVCSLREYFLKAEVGMHRDVVAVDKGLTPLSMAKENWRKPVVLTTDDRKKVWQSKELHGRFYRALHEPGVDFLASVSWLRFGDLFGETEGFVCAIMDEVILTNNYRRHIMKDGTVDVCRACHRPGESIRHIISGCSRLANGEYLHRHNQVARIIHQQLALKYKLVDSEVPYYKYVPDPVLENDHVTLYWDRSIITDRTIVANKPDIVVIDRLARRTMIVDVTIPHDGNLVKAEKEKQMKYLDLAHEVVDMWNVSSAVIVPIVVSANGLMAEGLDEHLSRLSLGGWIKSLIQKAVLLDTARIVRRFLSLEP

SEQ ID NO: 28436 - protein, 1202 aa, Noctua pronuba
MLTRAAARRARLSPPDSSLSSASPLPESSPIVSAVTPAVAVASSSSDEYFSPPTSPTPVRRQGRGRPPTSLGLRGQPAPSRVPATGGCVQRMRWTHSINENVMRAYYGSTEGGTNLTAYRVRMLSLFQVLEPTVNVSAQRLSDQVQVIQRNHMLDDAVLDRLRSEVLSNRIILTPSQTVVQTTAIDVSPPRSNPAVVEEDDRVATVSSQCNDRLRSALEDALREYRYTPTELRPRLPRLPMHKKNRALVCALDSQLKNLFESSEDLVDTHSILYCGAVAACRLANVKFTNSDAATRPKPAVPAWQCRIERRIDGARVLIGKLHCFREGNTRPRVMRFVRRAFSGTGISPQEYMSRVTERIDFLKQKVYAWANRIRRYKRRVDRYSQNRMFQSDERWVYRAWERPEQNMTDVCRPDDATTSSFWSSIWSVLVCHTEGDWMRAVERVCEPIPEMEPILITSLDVARSVRPLPNWKSPGPDGLHNFWLKWLSSSHTCLASQFQSSLESGALPQFLTTGVTHLLHKSGNPAEPKNYRPITCLSTVYKLLTSILRAKINTHIDKNSIMSASQNGCRNGSRGTKELLLIDMAISQQVRRSRKDLSTCWIDYKKAYDSVPHTWLMRVLELYKIDATLRTFLESCMGQWRTVLRYPGCRQIQGNDEPVWIKRGIFQGDSLSPLWFCLALNPLSTLLEDSGLGYRLRRGSQVISHLLYMDDLKLFAPNKLRLMELLKVTETFSSAIRMEFGVDKCAVMYVKGGEIMESEGIQLSDSIHLRSLSSSESYKYLGMSEALGINVTDMKQSLRERFFGRLRKVLNSLLSGGNKVRAFNGWVMPVLMYSFGILKWTQTELDALDRRVRTLLTANRMHHPRSSVMRLYIPRKCGGRGFLNAKTLHNRELCSLREYFLKAEVGMHRDVIAVDKRLTPLSMAKENWRKPVVLTTDDRKEVWQSKELHGRFYRALHGPDVDFLASVSWLRFGDLFGETEGFVCAIMDEVMLTNNYRKYIMKDGTVDVCRACHRPGESIRHIISGCSRLANGEYLHRHNQVARIIHQQLALKYKLVESEVPYYKYVPDPVLEKDHVTLYWDRSIITDRTIVANKPDIVVIDRSARRVMIVDVTIPHDENLVKAEKEKQIKYLDLAHEVVDMWNVNSAIIVPIVVTANGLIAKSFDDHLSRLSLGGWIKGLIQKAVLLDTARIVRRFLSLEP

SEQ ID NO: 28437 - protein, 1199 aa, Noctua pronuba
MITRAAYRRARQPTPDSSLSSASPPPEIGSPVLPAVAVASSSSDEYFSPPTSPTPVRRQGRGRPPRSLGLRGHPAPSRVPATGGCVQRMRWTHPINENVMRAYYGSTEGGTNLTAYRVRMLSLFQVLEPTVNVSAQRLSDQVRVIQRNHMLDDAALDRLRSEVLSNRIVLTPSQTVVQASAIDITPPRSNPAVVEEDDRVATVSSQCNDRLRSALEDALREYRYTPTELRPRLPRLPMHKKNRALVCTLDSQLKNLFESSEDLVDTHSILYCGAVAACRLANVKFTNSDTATRPKPAVPAWQCRIERRIDGARVLIGKLHCFREGNTRPRVMRFVRRAFSGTGISPQEYMSRVTERIDFLKQKVYAWANRIRRYKRRVDRYSQNRMFQSDERWVYRAWEQPEQNVTDVCRPDDATTSSFWSSIWSVPVCHTEADWMRDVERMCEPIPEMEPILITPPDIARAVRPLPNWKSPGPDGLHNFWLKWLSSSHTCLASQFQSSLESGSLPQFLTTGVTHLLHKSGSPAESKNYRPITCLSTVYKLLTSILRAKINTHIDKNSIMSASQNGCRNGSRGTKELLLIDMTISQQVRRSRKDLSTCWIDYKKAYDSVPHTWLMRVLELYKVDATLRAFLESCMGQWRTVLRYLGCRQIQGNNEPVWIKRGIFQGDSLSPLWFCLALNPLSTLLEDSGLGYRLRRGGQVISHLLYMDDLKLFAPNKLRLMELLKVTETFSSAIRMEFGVDKCAVMYVKRGEIMESEGIQLSDSIHLRSLSSSESYKYLGMSEALGINVTDMKQSLRERFFGRLKKVLNSLLSGGNKVRAFNGWVMPVLMYSFGILKWTQTELDALDRRVRTLLTANRMHHPRSSVMRLYIPRKCGGRGFLNAKTLHNREVCSLREYFLKAEVGMHRDVVAVDKGFTPLSMAKENWRKPVVLTTDDRKEVWQGKELHGRFYRALHGPDVDFLASVSWLRFGDLFGETEGFVCAIMDEVMLTNNYRKYIMKDGTVDVCRACHRPGESIRHIISGCSRLANGEYLHRHNQVARIIHQQLALKYKLVESEVPYYKYVPDPVLEKDHVTLYWDRSIITDRTIVANKPDIVVIDRSARRVMIVDVTIPHDENLVKAEKEKQIKYLDLAHEVVAMWNVNSAVIVPIVVTANGLMAKSLDDHLSRLSLGGWIKGLIQKVVLLDTARIVRRFLSLEP

SEQ ID NO: 28438 - protein, 1199 aa, Noctua pronuba
MITRAASRRARLPTPDSSLSSASPPPDPGSPVLPAAAVASSSSDEYFSPPTSPTPVRRQGRGRPPRSLGLRGHPAPSRVPATGGCVQRMRWTHPINENVMRAYYGSTEGGTNLTAYRVRMLSLFQVLEPTVNVSAQRLSDQVRVIQRNHMLDDAALDRLRSEVLSNPIVLTPSQTVVQASTIDITPPRSNPAVAEEDDRVATVSSQCNDRLRSALEDALREYRYTRTEFRPRLPRLPMHKKNRALVCALDSQLKNLFESSENLVDTHSILYCGAVAACRLANVKFTNSDTATRPKPAVPAWQCRIERRIDGARVLIGKLHCFREGNTRPRVMRFVRRAFSGTGISPQEYMSRVTERIDFLKQKVYAWANRIRRYKRRVDRYSQNRMFQSDERWVYRAWERPEQNMTDVCRPDDATTSSFWSSIWSVPVCHTEADWMRDVERMCEPIPEMEPILITPQDIARAVRPLPNWKSPGPDGLHNFWLKWLSSSHTCLASQFQSSLESGSLPQFLTTGVTHLLHKSGSPAEPKNYRPITCLSTVYKLLTSILRAKINTHIDKNSIMSASQNGCRNGSRGTKELLLIDMAISQQVRRSRKDLSTCWIDYKKAYDSVPHTWLMRVLELYKVDATLRAFLESCMGQWRTVLRYPGCRQIQGNNEPVWIKRGIFQGDSLSPLWFCLALNPLSTLLEDSGLGYRLRRGGQVISHLLYMDDLKLFAPNKLRLMELLKVTETFSSAIRMEFGVDKCAVMYVKRGEIMESEGIQLSDSIHLRSLSSSESYKYLGMSEALGINVTDMKQSLRERFFGRLKKVLNSLLSGGNKVRAFNGWVMPVLMYSFGILKWTQTELDALDRRVRTLLTANRMHHPRSSVMRLYIPRKCGGRGFLNAKTLHNREVCSLREYFLKAEVGMHRDVVAVDKGFTPLSMAKENWRKPVVLTTDDRKEVWQGKELHGRFYRALHGPDVDFLASVSWLRFGDLFGETEGFVCAIMDEVMLTNNYRKYIMKDGTVDVCRACHRPGESIRHIISGCSRLANGEYLHRHNQVARIIHQQLALKYKLVESEVPYYKYVPDPVLEKDHVTLYWDRSIITDRTIVANKPDIVVIDRSARRVMIVDVTIPHDENLVKAEKEKQIKYLDLAHEVVDMWNVNSAVIVPIVVTANGLMAKSFDDHLSKLSLGGWIKGLIQKAVLLDTARIVRRFLSLEP

SEQ ID NO: 28439 - protein, 1111 aa, Ochropleura plecta
MRWTSSINANVMRAYYGSTEGGTNLTAYRVRMLSLFQDLEPTINVSAQRLSDQVRVIQRNHMLDDAALDRLRSEVLSNRIILTTPQTAMQASVIDGMQPRSDPAVVEEDDRVATVSSQCNERLRSALEDALRDYRSTPAELRPRLPRLPMHKKNRALVCALDSQLKNLFESSEDLVDTHSILYCGAVAVCRLTNVKFPSCDVATRPKPSVPAWQCRIERRINEARVLIGKLYCFREGNTRLRVMRFVRRAFSGTGISPQEYMSRTTERIDFLKQKVYAWANRIRRYKRRVDRYSQNRMFRSDERWVYRAWERPEQSVTDVCRPDDVATSSFWHSIWSVPVCHTEADWMRDVERVCETIPEIEPILITSLDIASAVRPLPNWKSPGPDGLHNFWLKWLSSSHTRLASQFQSCLESGSLPQFLTTGVTHLLYKSGSPAEPKNYRPITCLSTVYKVLTSILRAKINSHIDNNSIMSASQNGCRNGSRGTKELLLIDMAISQQVRRSRKDLSTCWIDYKKAYDSVPHTWLKRVLELYKIDATLRAFLESCMGQWRTVLRYPGCRQIQGNDEPVWIKRGIFQGDSLSPLWFCLALNPLSTLLENSGLGYRLRRGGQVISHLLYMDDLKLFAPNKLRLMELLKVTETFSNAIRMEFGVDKCAVMYVKRGEIMESEGIQLSDSIHLRSLSSSESYKYLGMSEALGINVADMKQLLRERFFGRLKKVLKSLLSGGNKVRAFNSWVMPVIMYSFGILKWTQTELDALDRRVRTLLTGNRMHHPRSSVMRLYIPRKCGGRGFLNAKTLHNREVCSLREYFLKTDVGMHRDVVAVDKGLTPLSMAKENWRKPVVLTTDDRKVVWQGKELHGRFYKALHGPDVDFLASVSWLRFGDLFGETEGFVCAIMDEVMLTNNYRKYIMKDGTVDVCRACHRPGESIRHIISGCSRLANSEYLHRHNQVARIIHQQLALKYNLVESEVPYYKYVPDPVLEKDHVTLHWDRSIITDRTIVANKPDIVVIDRSARRVMIIDVTIPHDENLVKAEKEKQLKYLDLAHEVVDMWNVNSAIIVPIVVTANGLIAKSLDEHLSKLSLGGWIKGLIQKAVLLDTARIVRRFLSLEP

SEQ ID NO: 28440 - protein, 1197 aa, Hecatera dysodea
MLTRAATLRARHPPPGSPLSSASPPPDIESQVSPAAAVASSSSDEYFSPPTSPPPVRRQGRGRPPRGLGPRGQPAPSRVPANGGCVQRMRWTQSMNENVMRAYYGSTEGGTNLTAYRLRMLSLFQDLEPTVNVSAQRLSDQVRVIQRSHRLDDAALDRLRSEVLNNLIIPTPTQTMEQVPTISSLTPRSINVCEEVDDRVVTVSSQCNDRLRSALEDALCEYRSTPTELRPRLPRLPMHKKNRALVCALDSLLKNIFESSENLIDTHSILYCGAVAACRIANVKFINSDGAIRPKSAAPAWQCRIERRIDEARVLIGKLYCFREGNTRPRVMRFVRRAFLGTQISPQEYMSRVTERIDFLKQKVCAWANRIRRYKRRIDRYAQNRMFQSDERWVYRAWERPEQSVTDVCRPDDVATNTFWRSIWSVPVCHAEGGWMRDVERMCEAIPQMEKINITSLDVAKAVRPLPNWKSPGPDGLHNFWLKWYSSSHALLASQFQSSLESGSLPQFLTTGVTHLLHKTGSPAEPKNYRPITCLSTVYKLLTSILRVKINEHIETNSIMSSSQNGCRKGSRGTKELLLIDMAISQQVRRSRKDLSTCWIDYKKAYDSVPHTWLLKVLELYKIDATLRTFLESCMRQWKTVLSYPGCRPIQGSDEPVWIKRGIFQGDSLSPLWFCLALNPLSTLLEDSDLGYRLRRGGQAISHLLYMDDLKLFAPNKLRLMELLKVTETFSSDIRMEFGVDKCAVMHVKKGKIMESEGIQFSDSIQVRSLSSTETYKYLGMSEALGINVADMKQSLKERFFGRLKKVLNSLLSGGNKVRAFNGWVMPVLMYSFGILKWTQTELDALDRRVRTLLTANRMHHPRSSVMRLYIPRKCGGRGFLNAKTLHNREMCSLREYFLETDVGMHRDVVAVDKGLTPLSMANENWRKPVIHTTDDRKEVWKSKELHGRFYRALYGSDVDFSASVAWLRFGDLFGETEGFVCAIMDEVILTNNYRRHIMKDGTVDVCRACHRPGESIRHIISGCSRLANGEYLHRHNQVARIIHQQLALKYKLVDSEVPYYKYVPDPVLENGHVTLYWDRSIITDRTIVANKPDIVVIDRLARRTMIIDVTIPHDENLVKAEKEKQIKYLDLEVVDMWNVDSAVIVPIVITANGLMAKSFDDHLSKLALHGWLKGLIQKAVLLDTARIVRRFLSLEP

SEQ ID NO: 28441 - protein, 1200 aa, Hecatera dysodea
MITRAASRRARPPSPDPSLSSASPPPDVEPPVSPAAAVASSSSDEYFSPPTSPTPVRRQGRGRPPRGLGPRSQPAPSRVPAAGGCVQRMKWTQSINENVMRAYYGSTEGGTNLTAYRARMLSMFQDLEPTVDVSAQRLSDQVRVIQRNHRLDDAALDRLRSEVLDNPIISTSTQTVVPVPSSGAITSRTINVCDEVDDRIVTVSSQCNDRLRSALEDALREYRSTPTELRPRLPRLPMHKRNRALVCALDSLLQNIFESSENLVDTHSILYCGAVAACRVANVKFTNSDGATRPKTAAPAWQCRIERRIDEARVLIGKLYCFREGNTRPRVMRFVRRAFSGTEISPQEYISRVTERIDFLKQKVCAWANRIRRYKRRVDRYSQNRMFQSDERWVYRSWERPEQSVTDVCRPDDIVTSTFWRSIVWSVPVRHTEGDWMRGIERVCEAIPQMEKITITPTDVATAVRPLPNWKSPGPDGLHNFWLKWYSSSHAVLASQFQSSLESGSLPQFLTTGVTHLLHKTGSPAEPKNYRPITCLSTVYKLLTSILRVKINEHIESNSIMSSSQNGCRKGSRGTKELLLIDIAISQQVRRTRKDLSTCWIDYKKAYDSVPHTWLMKVLELYKIDATLRTFLESCMRQWKTVLCYPGCRPIQGNDEPIWIKRGIFQGDSLSPLWFCLALNPLSTLLEDSGLGYRLRRGGQAISHLLYMDDLKLFAHNKLRLMELLKITETFSSAIRMEFGVDKCAVMHVKKGEIMESEGVQLSDSIQVRSLSSTETYKYLGMSEALGINVADMKQSLKERFFGRLKKVLNSLLSGGNKVRAFNGWVMPVLMYSFGILKWTQTELDALDRRVRTLLTANRMHHPRSSVMRLYIPRKCGGRGFLNAKTLHNREMCSLREYFLKVDVGMHRDVVAVDKGLTPLSMANENWRKPVIHTTDDRKEVWKGKELHGRFYRALYGSDVDFSASVAWLRFGDLFGETEGFVCAIMDEVILTNNYRRHIMKDGTVDVCRACHRPGESIRHIISGCSRLANGEYLHRHNQVARIIHQQLALKYKLVDSEVPYYKYVPDPVLENGRVTLYWDRSIITDRTIVGNKPDIVVIDRLARRTMIIDVTIPHDENLVKAEKEKQIKYLDLAHEVVDMWDVDSAVIVPIVITANGLMAKSFDDHLSKLALHGWLKGLIQKAVLLDTARIVRRFLSLEP

SEQ ID NO: 28442 - protein, 1112 aa, Mythimna impura
MRWTQSMNENVMRAYYGSTEGGTNLTAYRVRMLSLFQELETTVNVTIQRLSDQVRVIQRNHRLDDAALDRLRSEVLSNRIIATPIQTQTAAPRATDAILPQSNHVDDEADDRVVTVSSQCNDRLRSALEDALREYRSTPIDLRPRLPRLPMHKKNRALVCALDSLLENVFESSVNLADTHSILYCGAIAACRLANVKLPSCDGATRPKSVAPAWQCKIKKRIDGARALIGKLYCFREGNTRPRVMRYVRRAFSGTGISPPEYLSRVTERIDFLKQKVCAWANRIRRYKRRVDRYSQNRMFQSDERWVYRAWERPEQNVTDVTRPDAVATNAFWRNIWSVPVCHTEDGWMREVERMCEAIPEMEKVIINPTDVARAVRPLPNWKSPGPDGLQNFWLKWYSSSHALLASQFQSSLESGSLPQFLTTGVTNLLHKTGSTAEPKNYRPITCLSTVYKLLTSILRTKINQHIDNNSIMSASQNGCRNGSRGTKELLLIDMTISQQVRRSRKDLSTCWIDYKKAYDSVPHTWLMRVLELYKIDATLRTFLESCMGQWKTVLRYPGCRSIGRDDEPIWIKRGIFQGDSLSPLWFCLALNPLSTLLEESGLGYRLRRDGQVLSHLLYMDDLKLIAPNKLRLMELLKVTETFGSAIRMEFGVDKCAVMHVKRGEIMESEGIQLSDSIHLRSLSSTETYKYLGMLEALGINVADMKQSLKERFFGRLKKVLNSLLSSGNKVRAFNGWVMPVLMYSFGILKWTQTELDALDRRVRTLLTANRMHHPRSSVMRLYIPRKCGGRGFLNTKTLHNREVCSLREYFHKIDVGMHRDVVAVDKGLTLLSMAKENWRKPVVLTTDDRKEVWKSKELHGRFYRALHESDVDFAASVAWLRFSNLFGETEGFICAIMDEVILTNNYRRYIMKDGTVDVCRACHRPGESIRHIISGCSRLANGEYLHRHNQVARIIHQQLALKYNLVYSEVPYYRYVPDPVLENDHVTLYWDRSIITDRTIVANKPDIVVIDRLARRAMIVDVTIPHDENLVKAEKEKQIKYLDLAHEVVNMWNVDSAVIVPIVVTANGLIAKSFDDHLSKLSLLGWIKGLIQKAVLLDTARIVRRLLSLEP

SEQ ID NO: 28443 - protein, 1198 aa, Mythimna impura
MLTRAAARRARHPSPDLPLSSASPPPDPGSSVTPAVAVASSSSDEYFSPPTSPTPVRRPGRGRPPKGLGSRGQPAPSRVPAAGGCVQRMRWTQSMNENVMRAYYRATEGGTNLTAYRVRMLSLFQDLEPTVDVSAQRLSDQVRVIQHNHRLDDAVLDRLRSEVLNNHIVSTPTQTGVLPATDVIPPRSNVVENELDDRVDTVSSQCNERLRSALEDALREYRSTPAEFRPRLPRLPMCKRNRALVCALDSLLKNVFESSEDLVDTHSILYCGAVAACRLANIKFSSCDVATRPKPAVPAWTCRIEGRIDEARALIGKLYCFREGNTRPRVMRFVRRAFSGTGITPREYMSRVTERIDFLKQKVCAWANRIRRYKRRVDRYSQNRMFQSDERWVYRAWERPEQSVIDAVRPDDAATNAFWRSIWSVPVCHTEDGWMRDVERVCVDVPEMEKVEITPLDVARAVRPLPNWKSPGTDGLHNFWLKWYSSSHALLASQFQSSLESGSLPQFLTTGITHLLHKTGSPTEPKNYRPITCLSTVYKLLTSILRAKIYIHIEKNLIMSASQNGCRNGSRGTKELLLIDMAISQQVRRSRKDLSTCWIDYKKAYDSVPHTWLMRVLELYKIDATLRTFLESCMRQWKTVLRYPGCRPIQGNDEPIWIKRGIFQGDSLSPLWFCLALNPLSTLLEDSGLGYRLRRGGQVLSHLLYMDDLKLFAHNNLQLMELLKVTETFSSAIRMEFGVDKCAVMHVKRGEIVESEGIQLSDSIHLRTLSSTETYKYLGMSEALGINVADMKQTLKERFFNHLKKVLNSLLSGGNKVRAFNGWVMPVLMYSFGILKWTQTELDALDRRVRTLLTANRMHHPRSSVMRLYIPRKCGGRGFLNAKTLHNREVCSLREYFLKTDVGMHRDVVAVDKGLTPLSMAKENWRKPVVLTTDDRKEVWKGKELHGRFYRALHEPDVDFLASVAWLRFSNLFGETEGFVCAIMDEVILTNNYRRHIMKDGTVDVCRACHRPGESIRHIISGCSRLANGEYLHRHNQVARIIHQQLALKYNLVDSEVPYYRYVPDPVLENDHVTLYWDRSIITDRTIVANKPDIVVIDRLARRAVIVDVTIPHDENLVKAEKEKQIKYLDLAHEVVDMWNVDSAIIVPIVVTANGLIAKSFDDHLSKLSLRGWIKGLIQKAVLLDTARIVRRFLSLEP

SEQ ID NO: 28444 - protein, 989 aa, Mythimna impura
MTSALEDALREYRSTLIALRPRLPRLPMHKKNRALVCALDSLLENVFESSVNLADTHSILYCGAIAACRLANVKLPSCDGATRPKPAAPAWQCRIERRIDEARALIGKLYCFREGNTRPRVMRYVRRAFSGTEISPREYLSRVTERIDFLKQKVCAWANRIRRYKRRVDRYSQNRMFQSDERWVYRAWERPEQNVTDVTRPDAVATNTFWRNIWSVPVCHTEDGWMREVERVCEAIPEMEKIVISPIDVARAVRPLPNWKSPGPDGLQNFWLKWYSSSHALLASQFQSSLESGSLPQFLTTGVTHLLHKTGSTAEPKNYRPITCLSTVYKLLTSILRTKINKHIDSNSIMSASQNGCRNGSRGTKELLLIDKAISQQVRRSRKDLSTCWIDYKKAYDSVPHTWLMRVLELYKIDATLRTFLESCMGQWNTVLRYPGCRSIRRDDEPIWIKRGIFQGDSLSPLWFCLALNPLSTLLEESSLGYRLRRGGQVLSHLLYMDDLKLIAPNKLRLMELLKVTETFSSAIRMEFGVDKCAVMHVKRGEIMESEGIQLSDSIHFRSLSSTETYKYLGMSEALGINVADMKQSLKERFFGRLKKVLNSLLSGGNKVRAFNGWVMPVLMYSFGILKWTQTELDAVDRRVRTLLTANRMHHPRSSVMRLYIPRKCGGRGFLNAKTLHNREVCSLREYFHKTDVGMHRDVVAVDKGLTPLSMAKENWRKPVVLTTDDRKEVWKSKELHGRFYRALHESDIDFAASVAWLRFSNLFGETEGFICAIMDEVILTNNYRRYIMKDGTVDVCRACHRPGESIRHIISGCSRLANGEYLHRHNQVARIIHQQLALKYNLVDYEVPYYRYVPDPVLENDHVTLYWDRSIITDRTIVANKPDIVVIDRLARRVMIVDVTIPHDENLVKAEKEKQIKYLDLAHEVVDMWNVDSAVIVPIVVTANGLIAKSFDDHLSKLSLRGWIKGLIQKAVLLDTARIVRRFLSLEP

SEQ ID NO: 28445 - protein, 1199 aa, Phlogophora meticulosa
MLTRAAKRRARPPSPDSPLSSASPPPDLGSPVTPTVAAASSSSDEYFSPPTSPTPVRRQGRGRPPKSLGSRGQPAPSQVPATGGCVQRMRWTQSMNENVMRAYYGSTEGGTNLTAYRARMLSLFQVLEPTVNVSAQRLSDQVRVIQRNHRLDDTALDRLRSEVLNNHIVLTSTQTAVQASIINATPSPSNHVSEEADDRVVTVSSQCNEKLRSALEDALREYRSTPTELRPRLPRLPMHKKNRALVCNLDSLLKDLFESSGDLVDTHSILYCAAVAACRLANVKFPNNDVAIRPKPAVPAWQSRIERRIDGTRVLIGKLYCFREGNTRPRVMRFVRRAFAGTGISPREYMSRIVERIDFLKQKVYAWANRIRRYKRRVDRYSQNRMFQSDERWVYRAWERPEQDVADVRRPDDTTTNTFWRNIWSVPVCHTEAHWIRDVERVCETITEMEKIIITPLDVATAVHPLPNWKAPGPDGLHNFWLKWLGSSHTRLASQFQSCLESGSLPQFLTTGITHLLYKSGSTTEPKNYRPITCLSTVYKLLTSILRAKIAEHIVGNSIMSASQNGCRNGSRGTKELLLIDMAISQQVRRSHKDLSTCWIDYKKAYDSVPHAWLMRVLELYKIDATLRTFLESCMGQWRTVLRYPGCRQIQGNDEPIWIKRGIFQGDSLSPLWFCLALNPLSTLLEDSGLGYRLRRGGQVISHLLYMDDLKLFASNNLQLMELLKITESFSSTIRMEFGVDKCAVMHVKRGEIVESEGIQLPDSIQLRSLSSSDNYKYLGMSEALGINVTDMKQSLKERFFGRLKKVLNSLLSGGNKVRAFNGWVMPVLMYSFGILKWTQTELDALDRRVRTLLTANRMHHPRSSVMRLYIPRKCGGRGFLNAKTLYNCEVCNLRDYFLKTEVGMHRDVVAVDKGLTPLSMAKENWRKPVVLTTDDRKQVWQSKELHGRFYRALHGPDVDFIASVSWLRFGDLFGETEGFVCAIMDEVILTNNYRKHIMKDGTVDMCRACHRPGESIRHIISGCSRLANGEYLHRHNQVARIIHQQLALRYKLVESEVPYYKYVPDPVLEDDHVTLYWDRSIITDRTIVANKPDIVVIDRLARRAMIVDVTIPHDENLVKAEKEKQIKYLDLAHEVVDMWNVDSAVIVPIVVTANGLLAKSLDDHLSRLSLHGWIKGLIQKAVLLDTARIVRRFLSLQP

SEQ ID NO: 28446 - protein, 1198 aa, Phlogophora meticulosa
MLTRAAKRRARPPSPDSPLSSASPPPDLGSPVTPTVAAASSSSDEYFSPPTSPTPVRRQGRGRPPKSLGSRGQPAPSQVPATGGCVQRMRWTQSMNENVMRAYYGSTEGGTNLTAYRARMLSLFQVLEPTVNVSAQRLSDQVRVIQRNHRLDDTALDRLRSEVLNNHIVLTSTQTAVQASIINATPSPSNHVSEEADDRVVTVSSQCNEKLRSALEDALREYRSTPTELRPRLPRLPMHKKNRALVCNLDSLLKDLFESSGDLVDTHSILYCAAVAACRLANVKFPNNDVAIRPKPVPAWQSRIERRIDGARVLIGKLYCFREGNTRPRVMRFVRRAFAGTGISPREYMSRIVERIDFLKQKVCAWANRIRRYKRRVDRYSQNRMFQSDERWVYRAWERPEQDVADVHRPDDTTTNTFWRNIWSVPVCHTEAHWIRDVERVCETITEMEKIIITPLDVATAVRPLPNWKAPGPDGLHNFWLKWLGSSHTRLASQFQSCLESGSLPQFLTTGITHLLYKSGSTTEPKNYRPITCLSTVYKLLTSILRAKIAEHIVGNSIMSASQNGCRNGSHGTKELLLIDMAISQQVRRSHKDLSTCWIDYKKAYDSVPHAWLMRVLELYKIDATLRTFLESCMGQWRTVLRYPGCRQIQGNDEPIWIKRGIFQGDSLSPLWFCLALNPLSTLLEDSGLGYRLRRGGQVISHLLYMDDLKLFASNNLQLMELLKITESFSSTIRMEFGVDKCAVMHVKRGEIVESEGIQLPDSIQLRSLSSSDNYKYLGMSEALGINVTDMKQSLKERFFGRLKKVLNSLLSGGNKVRAFNGWVMPVLMYSFGILKWTQTELDALDRRVRTLLTANRMHHPRSSVMRLYIPRKCGGRGFLNAKTLYNREVCNLRDYFLKTEVGMHRDVVAVDKGLTPLSMAKENWRKPVVLTTDDRKQVWQSKELHGRFYRALHGPDVDFIASVSWLRFGDLFGETEGFVCAIMDEVILTNNYRKHIMKDGTVDMCRACHRPGESIRHIISGCSRLANGEYLHRHNQVARIIHQQLALRYKLVESEVPYYKYVPDPVLEDDHVTLYWDRSIITDRTIVANKPDIVVIDRLARRAMIVDVTIPHDENLVKAEKEKQTKYLDLAHEVVDMWNVDSAVIVPIVVTANGLLAKSLDDHLSRLSLHGWIKGLIQKAVLLDTARIVRRFLSLQP

SEQ ID NO: 28447 - protein, 1193 aa, Phlogophora meticulosa
MLTRAAKRRARPPSQDSPLSSASPPPDLGSPVTPTVAAASSSSDEYFSPPTSPTPVRRQGRGRPPKSLGSRDQPAPSQVPATGGCVQRMRWTQSMNENVMRAYYGSTEGGTNLTAYRARMLSLFQVLEPTVNVSAQRLSDQVRVIQRNHRLDDTALDRLRSEVLNNHIVLTSTQTAVQASIIANHVSEEADDRVVTVSSQCNEKLRSALEDALREYRSTPTELRPRLPRLPMHKKNRALVCNLDSLLKDLFESSGDLVDTHSILYCAAVAACRLANVKFPNNDVAIRPKPAVPAWQSRIERRIDGARVLIGKLYCFREGNTRPRVMRFVRRAFAGTGISPREYMSRIVERIDFLKQKVYAWANRIRRYKRRVDRYSQNRMFQSDERWVYRAWERPEQDVADVHRPDDTTTNTFWRNIWSVPVCHTEAHWIRDVERVCETITEMEKIIITPLDVATAVRPLPNWKAPGPDGLHNFWLKWLGSSHTRLASQFQSCLESGSLPQFLTTGITHLLYKSGSTTEPKNYRPITCLSTVYKLLTSILRAKIAEHIVGNSIMSASQNGCRNGSRGTKELLLIDMAISQQVRRSHKDLSTCWIDYKKAYDSVPHAWLMRVLELYKIDATLRTFLESCMGQWRTVLRYPGCRQIQGNDEPIWIKRGIFQGDSLSPLWFCLALNPLSTLLEDSGLGYRLRRGGQVISHLLYMDDLKLFASNNLQLMELLKITESFSSTIRMEFGVDKCAVMHVKRGEIVEYEGIQLPDSIQLRSLSSSDNYKYLGMSEALGINVTDMKQSLKERFFGRLKKVLNSLLSGGNKVRAFNGWVMPVLMYSFGILKWTQTELDALDRRVRTLLTANRMHHPRSSVMRLYIPRKCGGRGFLNAKTLYNREVCNLRDYFFKTEVGMHRDVVAVDKGLTPLSMAKENWRKPVVLTTDDRKQVWQSKELHGRFYRALHGPDVDFIASVSWLRFGDLFGETEGFVCAIMDEVILTNNYRKHIMKDGTVDMCRACHRPGESIRHIISGCSRLANGEYLHRHNQVARIIHQQLALRYKLVESEVPYYKYVPDPVLEDDHVTLYWDRSIITDRTIVANKPDIVVIDRLARRAMIVDVTIPHDENLVKAEKEKQIKYLDLAHEVVDMWNVDSAVIVPIVVTANGLLAKSLDDHLSRLSLHGWIKGLIQKAVLLDTARIVRRFLSLQP

SEQ ID NO: 28448 - protein, 1199 aa, Xestia xanthographa
MITRAAARRAHLPTPDSSLSSASPPPDPGSPVSPVAAVASSSSDEYFSPPTSPPPVRRAGRGRPPKSLGLRGQQAPSRVPATGGCVQRMKWTQSMNENVMRAYYGSTEGGTNLTAYRVRMLSLFQGLEPTVNVSAQRLSDQVRVIQRSHRLDDAALDRLRSEVLSNLIVLTPTQTAVQVSAIDATPPRLNPVVVEEDDGVATVSSQCNDRLRSALENALHEYRSTPTELRPRLPRLPMHKKNRALVCALDSQLKNIFESSENLVDTHSILFCGAVAACRLANVKFPNCDVANRPKPAVPAWQRRIERRIDGARVLIGKLYCFREGNTRPRVMRFVRRAFSGTEISPQEYMSRVTERIDFLKQKVYAWANRIRRYKRRVDRYSQNRMFQSDERWVYRAWERPEQNMTDVCRPDDAATSSFWRSIWSVPVCHTEADWMRDVERVCEPIPEMEPIFITPLDVARAVRPLPNWKSPGPDGLHNFWIKWFSSSHTCLASQFQSSLESGSLPQFLTTGVTHLLHKSGSPAEPKNYRPITCLSTIYKLLTSILRVKINTHIDKNSIMSASQNGCRNGSRGTKELLLIDMAISQQVRRSRKDLSTCWIDYKKAYDSVPHTWLMRVLELYKIDTTLRTFLESCMGQWRTVLRYPGCRQIQGSDDPVWIKRGIFQGDSLSPLWFCLALNPLSTLLENSGLGCRLRMDGQVISHLLYMDDLKLFASNKLRLMELLKVTETFSNAIRMEFGVDKCAVMYVKRGEIMESEGLQLSDSIQLRSLSSSETYKYLGMSEALGINITDMKQSLKERFFSRLRKVLNSLLSGGNKVRAFNGWVMPVLMYSFGILKWTQTELDALDRRVRTLLTESRMHHPRSSVMRLYIPRKCGGRGFLNAKTLHNREVCSLREYFLKAEVGMHRDVVAVDKGLTPLSMAKENWHKPEVLTTDDRKEVWQGKELHGRFYRALHGPDVDFLASVSWLRFGDLFGETEGFVCAIMDEVMLTNNYRKYIMKDGTVDMCRACHLPGESIRHIISGCSRLANGEYLHRHNQVARIIHQQLALKYKLVESEVPYYKYVPDPVLESDHVTLYWDRSIITDRTIVANKPDIVMIDRSARRVMIIDVTIPHDENLVKAEKEKQIKYLDLAHEVRDMWNMNSVIIVPIVVTANGLIAKSFDDHLSKLSLGGWIKGLIQKAVLLDTARIVRRFLSLQP

SEQ ID NO: 28449 - protein, 1199 aa, Xestia xanthographa
MITRAAARRAHLPTPDSSLSSASPPPDPGSPVSPVAAVASSSSDEYFSPPTSPPPVRRAGRGRPPKSLGLRGQQTPSRVPATGGCVQRMKWTQSMNENVMRAYYGSTEGGTNLTAYRVRMLSLFQGLEPTVNVSAQRLSDQVRVIQRSHRLDDATLDRLRSEVLSNLIVLTPTQTAVQVSAIDATPPRLNPVVVEEDDGVATVSSQCNDRLRSALENALHEYRSTPTELRPRLPRLPMHKTNRALVCALDSQLKNIFESSENLVDTHSILFCGAVAACRLANVKFPNCDIANRPKPAVPAWQRRIERRIGGARVLIGKLYCFREGNTRPRVMRFVRRAFSGTEISPQEYMSRVTERIDFLKQKVYAWANRIRRYKRRVDRYSQNRMFQSDERWVYRAWERPEQNMTDVCRPDDAATSSFWRSIWSVPVCHTEADWMRDVERVCEPIPEMEPIFITPLDVARAVRPLPNWKSPGPDGLHNFWLKWFSSSHTCLASQFQSSLESGSLPQFLTTGVTHLLHKSGSPAEPKNYRPITCLSTIYKLLTSILRVKINTHIDKNSIMSASQNGCRNGSRGTKELLLIDMAISQQVRRSRKDLSTCWIDYKKAYDSVPHTWLMRVLELYKIDTTLRTFLESCMGQWRTVLRYPGCRQIQGSDDPVWIKRGIFQGDSLSPLWFCLALNPLSTLLENSGLGCQLRKDGQVISHLLYMDDLKLFASNKLRLMELLKVTETFSNAIRMEFGVDKCAVMYVKRGEIMESEGLQLSDSIQLRSLSSSETYKYLGMSEALGINITDMKQSLKERFFSRLRKVLNSLLSGGNKVRAFNGWVMPVLMYSFGILKWTQTELDALDRRVRTLLTESRMHHPRSSVMRLYIPRKCGGRGFLNAKTLHNREVCSLREYFLKAEVGMHRDVVAVDKGLTPLSMAKENWHKPEVLTTDDRKEVWQGKELHGRFYRALHGPDVDFLASVSWLRFGDLFGETEGFVCAIMDEVMLTNNYRKYIMKDGTVDMCRACHLPGESIRHIISGCSRLANGEYLHRHNQVARIIHQQLALKYKLVESEVPYYKYVPDPVLESDHVTLYWDRSIITDRTIVANKPDIVMIDRSARRVMIIDVTIPHDENLVKAEKEKQIKYLDLAHEVRDMWNMNSVIIVPIVVTANGLIAKSFDDHLSKLSLGGWIKGLIQKAVLLDTARIVRRFLSLQP

SEQ ID NO: 28450 - protein, 868 aa, Cosmia trapezina
MRFVRRAFSGTGISPPEYMSRVTERIDFLKQKVCAWASRIRRYKRRVDRYTQNRMFQSDERWVYRAWERPEQNVTDVCRPDDAATSAFWRSIWSVPVCHAEAGWMKDVERVCEAIPEMEPVLITPLDVARTVRPLPNWKSPGPDGLHNFWLKWLISSHTRLASQFQSSLESGSLPQFLTTGVTHLLHKSGSPAEPKNYRPITCLSTIYKLLTSILRAKINMHIDSNSIMSTSQNGCRNGSRGTKELLLIDMAISQQVRRSRKDLSTCWIDYKKAYDSVSHAWLMRVLELYKIDATLRTFLESCMGQWRTVLRYPGCRRIQGNDEPVRIKRGIFQGDSLSPLWFCLALNPLSTLLEDSGLGYRLRRGGQVISHLLYMDDLKLFAPNKLRLMDLLKVTETFSSAIRMEFGVDKCAVMHVKRGEIMESEGIQLSDSIHLRSQSSSETYKYLGMSEALGINVADMKQSLRERFFGRLTKVLISLLSGGNKVRAFNGWVMPVLMYSFGILKWTQTELDALDRRVRTLLTANRMHHPRSSVMRLYIPRKCGGRGFLNAKTLHNREVCSLREYFFKSDVGMHRDVVAVDKGLTPLSMAKENWRKPVVLTTDDRKKVWQSKELHGRFYRALHEPDVDFLASVSWLRFGDLFGETEGFVCAIMDEVILTNNYRRYIMKDGTVDVCRACHRPGESIRHIISGCSRLANGEYLHRHNQVARIIHQQLALKYKLVDSEVPYYKYVPDPVLENDHVTLYWDRSIITDRTIVANKPDIVVIDRLARRAMIVDVTIPHDGNLVKAEKEKQIKYLDLAHEVVDMWNVDSAVIVPIVVTANGLIADSLDQHLSRLSLGGWIKGQIQKAVLLDTARIVRRFLSLQP

SEQ ID NO: 28451 - protein, 1111 aa, Mamestra brassicae
MRWTQSMNENVMRAYYGSTEGGTNLTAYRVRMLSLFQDLEPTVNVSAQRLSDQVRVIQRNHRLDDAALDRLRSEVLNNLIISTPTQTAVQAPVNGRITPRPNNVSDEVDDRVVTVSSQCNDRLRSALEDALHEYRSTPTELRPRLPRLPMHKKNRALVCALDSLLQNIFESSESLVDTHSILYCGAVAACRIANVKFPGCDEAIRPKPAAPAWQRRIERRIDETRALIGKLYCFREGNTRPRVMRFVRRAFSGTEISPRDFTSRVTERIDFLKQKVCAWASRIRRYKRRVDRYSQNRMFQSDERWMYRAWERPEQSVTDVCRPDDVATSIFWRSIWSVPICHAEGGWMRDVERVCEAIPQMEKITITTLDVAKAVRPLPNWKSPGPDGLHNFWLKWYSSSHALLASQFQSSLDSGSLPQFLTTGVTHLLHKTGSPAEPKNYRPITCLSTVYKLLTSILRTKINEHIESNSIMSASQNGCRKGSRGTKELLLIDMAISQQVRRSRKDLSTCWIDYKKAYDSVPHTWLMKVLELYKIDATLRTFLESCMRQWKTVLRYPGCRPIQGSDEPVWIKRGIFQGDSLSPLWFCLALNPLSTLLEDSGLGYRLRRGGQAISHLLYMDDLKLFAPNNLRLMELLKVTETFSSAIRMEFGVDKCAVMHVKKGEIMESEGIHLSDSIQVRSLSSTETYKYLGMLEALGINGTDMKQSLRERFFGRLKKVLNSLLSGGNKVRAFNGWVMPVLMYTFGILKWTQTELDALDRRVRTLLTANRMHHPRSSVMRLYIPRKCGGRGFLNAKTLHNREMCSLREYFLKADVGMHRDVVAVDKGLTPLSMAKENWRTPVILTTDDRKEVWKGKELHGRFYRALHGSDVDFSASVAWLRFGDLFGETEGFVCAIMDEVILTNNYRRHIMKDGTVDMCRACHRPGESIRHIISGCSRLANGEYLHRHNQVARIIHQQLALKYNLVDSEVPYYKYVPDPVLENDHVTLYWDRSIITDRTIVANKPDIVVIDRLARRTMIIDVTIPHDENLVKAEKEKQIKYLDLAHEVVDMWNVESAVIVPIVVTANGLMAKSFDDHLSKLALRSWVKGLIQKAVLLDTARIVRRFLSLEP

SEQ ID NO: 28452 - protein, 868 aa, Mamestra brassicae
MRFVRRAFSGTEISPRDFTSRVTERIDFLKQKVCAWASRIRRYKRRVDRYSQNRMFQSDERWVYRAWERPEQSVTDVCRPDDVATSIFWRSIWSVPICHAEGGWMRDVERMCEAIPQMEKITITTLDVAKAVRPLPNWKSPGPDGLHNFWLKWYSSSHALLASQFQSSLDSGSLPQFLTTGVTHLLHKTGSPTEPKNYRPITCLSTVYKLLTSILRAKINEHIESNSIMSASQNGCRKGSRGTKELLLIDMAISQQVRRSRKDLSTCWIDYKKAYDSVPHTWLMKVLELYKIDATLRTFLESCMRQWKTVLRYPGCRPIQGSDEPVWIKRGIFQGDSLSPLWFCLALNPLSTLLEDSGLGYRLRRGGQAISHLLYMDDLKLFAPNNLRLMELLKVTETFSSAIRMEFGVDKCAVMHVKKGEIMESEGIHLSDSIQVRSLSSTETYKYLGVLEALGINGTDMKQSLRERFFGRLKKVLNSLLSGGNKVRAFNGWVMPVLMYTFGILKWTQTELDALDRRVRTLLTANRMHHPRSSVMRLYIPRKCGGRGFLNAKTLHNREMCSLREYFLKADVGMHRDVVAVDKGLTPLSMAKENWRTPVILTTDDRKEVWKGKELHGRFYRALHGSDVDFSASVAWLRFGDLFGETEGFVCAIMDEVILTNNYRRHIMKDGTVDMCRACHRPGESIRHIISVCSRLANGEYLHRHNQVARIIHQQLALKYNLVDSEVPYYKYVPDPVLENDHVTLYWDRSIITDRTIVANKPDIVVIDRLARRTMIIDVTIPHDENLVKAEKEKQIKYLDLAHAVVDMWNVESAVIVPIVVTANGLMAKSFDDHLSKLALRSWVKGLIQKAVLLDTARIVRRFLSLEP
